United States Patent Application Publication US 2024/0066114 A1 - sequence listing, part 18

SEQ ID NO: 22599 - RNA, 1045 nt, Artificial Sequence
  SARS-CoV-2__MT412323.1__ORF3a protein mRNA gc
aggagaaagcuuaccauggaccuguucaugcgcaucuucaccaucggcaccgugacgcucaagcagggggagaucaaggacgccacccccagcgacuucguccgggccaccgcgaccaucccgauccaggccucccugcccuucggcuggcugaucguggggguggcccuccuggccgucuuccagagcgccuccaagaucaucacgcugaagaagcgcuggcagcucgcgcugagcaagggcgugcacuucgugugcaaccugcuccugcuguucgucaccguguacucccaccuccugcugguggccgccgggcucgaggcccccuuccuguaccuguacgcgcucgucuacuuccugcagagcaucaacuucgugcggaucaucaugcgccuguggcucugcuggaagugccgguccaagaacccccugcuguacgacgccaacuacuuccucuacuggcacaccaacugcuacgacuacugcaucccguacaacagcgugaccuccagcaucgucaucacguccggcgacggcaccaccagccccaucuccgagcacgacuaccagaucgggggcuacaccgagaagugggagagcggggugaaggacugcgugguccugcacuccuacuucacgagcgacuacuaccagcuguacuccacccagcucagcaccgacaccggcguggagcacgugacguucuucaucuacaacaagaucgucgacgagcccgaggagcacgugcagauccacaccaucgacggguccagcggcguggucaaccccgugauggagccgaucuacgacgagcccaccaccacgaccagcgugccccugugaggacuaguuauaagacugacuagcccgaugggccucccaacgggcccuccuccccuccuugcaccgagauuaauaaaaaaaaaaaaaaaaaaaaaaaaaaaaaaaaaaaaaaaaaaaaaaaaaaaaaaaaaaaaaaaaugcaucccccccccccccccccccccccccccccccaaaggcucuuuucagagccaccagaauu

SEQ ID NO: 22600 - RNA, 1045 nt, Artificial Sequence
  SARS-CoV-2__MT385434.1__ORF3a protein mRNA gc
aggagaaagcuuaccauggaccuguucaugcgcaucuucaccaucggcaccgugacgcucaagcagggggagaucaaggacgccacccccagcgacuucguccgggccaccgcgaccaucccgauccaggccucccugcccuucggcuggcugaucguggggguggcccuccuggccgucuuccagagcgccuccaagaucaucacgcugaagaagcgcuggcagcucgcgcugagcaagggcgugcacuucgugugcaaccugcuccugcuguucgucaccguguacucccaccuccugcugguggccgccgggcucgaggcccccuuccuguaccuguacgcgcucgucuacuuccugcagagcaucaacuucgugcggaucaucaugucccuguggcucugcuggaagugccgcagcaagaacccccugcuguacgacgccaacuacuuccucugcuggcacaccaacugcuacgacuacugcaucccguacaacuccgugaccagcuccaucgucaucacgagcggcgacggcaccaccucccccaucagcgagcacgacuaccagaucgggggcuacaccgagaagugggaguccggggugaaggacugcgugguccugcacagcuacuucacguccgacuacuaccagcuguacagcacccagcucuccaccgacaccggcguggagcacgugacguucuucaucuacaacaagaucgucgacgagcccgaggagcacgugcagauccacaccaucgacgggagcagcggcguggucaaccccgugauggagccgaucuacgacgagcccaccaccacgaccuccgugccccugugaggacuaguuauaagacugacuagcccgaugggccucccaacgggcccuccuccccuccuugcaccgagauuaauaaaaaaaaaaaaaaaaaaaaaaaaaaaaaaaaaaaaaaaaaaaaaaaaaaaaaaaaaaaaaaaaugcaucccccccccccccccccccccccccccccccaaaggcucuuuucagagccaccagaauu

SEQ ID NO: 22601 - RNA, 1045 nt, Artificial Sequence
  SARS-CoV-2__MT375441.1__ORF3a protein mRNA gc
aggagaaagcuuaccauggaccuguucaugcgcaucuucaccaucggcaccgugacgcucaagcagggggagaucaaggacgccacccccagcgacuucguccgggccaccgcgaccaucccgauccaggccucccugcccuucggcuggcugaucguggggguggcccuccuggccgucuuccagagcgccuccaagaucaucacgcugaagaagcgcuggcagcucgcgcugagcaagggcgugcacuucgugugcaaccugcuccugcuguucgucaccguguacucccaccucuuccugguggccgccgggcuggaggcccccuuccucuaccuguacgcgcuggucuacuuccuccagagcaucaacuucgugcggaucaucaugcgccuguggcugugcuggaagugccgguccaagaacccccuccuguacgacgccaacuacuuccugugcuggcacaccagcugcuacgacuacugcaucccguacaacuccgugaccagcuccaucgucaucacgagcggcgacggcaccaccucccccaucagcgagcacgacuaccagaucgggggcuacaccgagaagugggaguccggggugaaggacugcgugguccuccacagcuacuucacguccgacuacuaccagcuguacagcacccagcuguccaccgacaccggcguggagcacgugacguucuucaucuacaacaagaucgucgacgagcccgaggagcacgugcagauccacaccaucgacgggagcagcggcguggucaaccccgugauggagccgaucuacgacgagcccaccaccacgaccuccgugccccucugaggacuaguuauaagacugacuagcccgaugggccucccaacgggcccuccuccccuccuugcaccgagauuaauaaaaaaaaaaaaaaaaaaaaaaaaaaaaaaaaaaaaaaaaaaaaaaaaaaaaaaaaaaaaaaaaugcaucccccccccccccccccccccccccccccccaaaggcucuuuucagagccaccagaauu

SEQ ID NO: 22602 - RNA, 1045 nt, Artificial Sequence
  SARS-CoV-2__MT375459.1__ORF3a protein mRNA gc
aggagaaagcuuaccauggaccuguucaugcgcaucuucaucaucggcaccgugacccucaagcagggggagaucaaggacgccacgcccagcgacuucguccgggccaccgcgaccaucccgauccaggccucccugcccuucggcuggcugaucguggggguggcccuccuggccgucuuccagagcgccuccaagaucaucacccugaagaagcgcuggcagcucgcgcugagcaagggcgugcacuucgugugcaaccugcuccugcuguucgucacgguguacucccaccuccugcugguggccgccgggcucgaggcccccuuccuguaccuguacgcgcucgucuacuuccugcagagcaucaacuucgugcggaucaucaugcgccuguggcucugcuggaagugccgguccaagaacccccugcuguacgacgccaacuacuuccucugcuggcacaccaacugcuacgacuacugcaucccguacaacagcgugaccuccagcaucgucaucaccuccggcgacggcacgaccagccccaucuccgagcacgacuaccagaucgggggcuacaccgagaagugggagagcggggugaaggacugcgugguccugcacuccuacuucaccagcgacuacuaccagcuguacuccacgcagcucagcaccgacaccggcguggagcacgugaccuucuucaucuacaacaagaucgucgacgagcccgaggagcacgugcagauccacacgaucgacggguccagcggcguggucaaccccgugauggagccgaucuacgacgagcccaccaccaccacgagcgugccccugugaggacuaguuauaagacugacuagcccgaugggccucccaacgggcccuccuccccuccuugcaccgagauuaauaaaaaaaaaaaaaaaaaaaaaaaaaaaaaaaaaaaaaaaaaaaaaaaaaaaaaaaaaaaaaaaaugcaucccccccccccccccccccccccccccccccaaaggcucuuuucagagccaccagaauu

SEQ ID NO: 22603 - RNA, 1045 nt, Artificial Sequence
  SARS-CoV-2__MT375470.1__ORF3a protein mRNA gc
aggagaaagcuuaccauggaccuguucaugcgcaucuucaccaucggcaccgugacgcucaagcagggggagaucaaggacgccacccccagcgacuucguccgggccaccgcgaccaucccgauccaggccucccugcccuucggcuggcugaucguggggguggcccuccuggccgucuuccacagcgccuccaagaucaucacgcugaagaagcgcuggcagcucgcgcugagcaagggcgugcacuucgugugcaaccugcuccugcuguucgucaccguguacucccaccuccugcugguggccgccgggcucgaggcccccuuccuguaccuguacgcgcucgucuacugccugcagagcaucaacuucgugcggaucaucaugcgccuguggcucugcuggaagugccgguccaagaacccccugcuguacgacgccaacuacuuccucugcuggcacaccaacugcuacgacuacugcaucccguacaacagcgugaccuccagcaucgucaucacguccggcgacggcaccaccagccccaucuccgagcacgacuaccagaucgggggcuacaccgagaagugggagagcggggugaaggacugcgugguccugcacuccuacuucacgagcgacuacuaccagcuguacuccacccagcucagcaccgacaccggcguggagcacgugacguucuucaucuacaacaagaucgucgacgagcccgaggagcacgugcagauccacaccaucgacggguccagcggcguggucaaccccgugauggagccgaucuacgacgagcccaccaccacgaccagcgugccccugugaggacuaguuauaagacugacuagcccgaugggccucccaacgggcccuccuccccuccuugcaccgagauuaauaaaaaaaaaaaaaaaaaaaaaaaaaaaaaaaaaaaaaaaaaaaaaaaaaaaaaaaaaaaaaaaaugcaucccccccccccccccccccccccccccccccaaaggcucuuuucagagccaccagaauu

SEQ ID NO: 22604 - RNA, 1045 nt, Artificial Sequence
  SARS-CoV-2__MT374112.1__ORF3a protein mRNA gc
aggagaaagcuuaccauggaccuguucaugcgcaucuucaccaucggcaccgugacgcucaagcagggggagaucaaggacgccacccccagcgacuucguccgggccaccgcgaccaucccgauccaggccucccugcccuucggcuggcugaucguggggguggcccuccuggccgucuuccacagcgccuccaagaucaucacgcugaagaagcgcuggcagcucgcgcugagcaagggcgugcacuucgugugcaaccugcuccugcuguucgucaccguguacucccaccuccugcugguggccgccgggcucgaggcccccuuccuguaccuguacgcgcucgucuacuuccugcagagcaucaacuucgugcggaucaucauccgccuguggcucugcuggaagugccgguccaagaacccccugcuguacgacgccaacuacuuccucugcuggcacaccaacugcuacgacuacugcaucccguacaacagcgugaccuccagcaucgucaucacguccggcgacggcaccaccagccccaucuccgagcacgacuaccagaucgggggcuacaccgagaagugggagagcggggugaaggacugcgugguccugcacuccuacuucacgagcgacuacuaccagcuguacuccacccagcucagcaccgacaccggcguggagcacgugacguucuucaucuacaacaagaucgucgacgagcccgaggagcacgugcagauccacaccaucgacggguccagcggcguggucaaccccgugauggagccgaucuacgacgagcccaccaccacgaccagcgugccccugugaggacuaguuauaagacugacuagcccgaugggccucccaacgggcccuccuccccuccuugcaccgagauuaauaaaaaaaaaaaaaaaaaaaaaaaaaaaaaaaaaaaaaaaaaaaaaaaaaaaaaaaaaaaaaaaaugcaucccccccccccccccccccccccccccccccaaaggcucuuuucagagccaccagaauu

SEQ ID NO: 22605 - RNA, 1045 nt, Artificial Sequence
  SARS-CoV-2__MT252680.1__ORF3a protein mRNA gc
aggagaaagcuuaccauggaccuguucaugcgcaucuucaccaucggcaccgugacgcucaagcagggggagaucaaggacgccacccccagcgacuucguccgggccaccgcgaccaucccgauccaggccucccugcccuucggcuggcugaucguggggguggcccuccuggccgucuuccagagcgccuccaagaucaucacgcugaagaagcgcuggcagcucgcgcugagcaagggcgugcacuucgugugcaaccugcuccugcuguucgucaccguguacucccaccuccugcugguggccgccgggcucgaggcccccuuccuguaccuguacgcgcucgucuacuuccugcagagcaucaacuucgugcggaucaucaugcgccuguggcucugcuggaagugccgguccaagaacccccugcuguacgacgccaacuacuuccucugcuggcacaccaacugcuacgacuacugcaucccguacaacagcgugaccuccagcaucgucaucacguccggcgacggcaccaccagccccaucuccgagcacgacuaccagaucgggggcuacaccgagaagugggagagcggggugaaggacugcgugguccugcacuccuacuucacgagcgacuacuaccagcuguacuccacccagcucagcaccgacaccgugguggagcacgucacguucuucaucuacaacaagaucguggacgagcccgaggagcacgugcagauccacaccaucgacggcuccagcggggucgugaaccccgugauggagccgaucuacgacgagcccaccaccacgaccagcgucccccugugaggacuaguuauaagacugacuagcccgaugggccucccaacgggcccuccuccccuccuugcaccgagauuaauaaaaaaaaaaaaaaaaaaaaaaaaaaaaaaaaaaaaaaaaaaaaaaaaaaaaaaaaaaaaaaaaugcaucccccccccccccccccccccccccccccccaaaggcucuuuucagagccaccagaauu

SEQ ID NO: 22606 - RNA, 1045 nt, Artificial Sequence
  SARS-CoV-2__MT371047.1__ORF3a protein mRNA gc
aggagaaagcuuaccauggaccuguucaugcgcaucuucaccaucggcaccgugacgcucaagcagggggagaucaaggacgccacccccagcgacuucguccgggccaccgcgaccaucccgauccaggccucccugcccuucggcuggcugaucguggggguggcccuccuggccgucuuccagagcgccuccaagaucaucacgcugaagaagcgcuggcagcucgcgcugagcaagggcgugcacuucgugugcaaccugcuccugcuguucgucaccguguacucccaccuccugcugguggccgccgggcucgaggcccccuuccuguaccuguacgcgcucgucuacuuccugcagagcaucaacuucgugcggaucaucaugcgccuguggcucugcuggaagugccgguccaagaacccccugcuguacgacgccaacuacuuccucugcuggcacaccaacugcuacgacuacugcaucccguacaacagcgugaccuccagcaucgucaucacguccggcgacggcaccaccagccccaucuccgagcacgacuaccagaucgggggcuacaccgagaagugggagagcggggugaaggacugcgugguccugcacuccuacuucacgagcgacuacuaccagcuguacuccacccagcucagcaccgacaccggcguggagcacgugacguucuucaucuacaacaagaucgucgacgagcccgaggagcacgugcagauccacaccaucgacggguccagcggcguggucaaccccgugauggagccgauguacgacgagcccaccaccacgaccagcgugccccugugaggacuaguuauaagacugacuagcccgaugggccucccaacgggcccuccuccccuccuugcaccgagauuaauaaaaaaaaaaaaaaaaaaaaaaaaaaaaaaaaaaaaaaaaaaaaaaaaaaaaaaaaaaaaaaaaugcaucccccccccccccccccccccccccccccccaaaggcucuuuucagagccaccagaauu

SEQ ID NO: 22607 - RNA, 1045 nt, Artificial Sequence
  SARS-CoV-2__MT370848.1__ORF3a protein mRNA gc
aggagaaagcuuaccauggaccuguucaugcgcaucuucaccaucggcaccgugacgcucaagcagggggagaucaaggacgccacccccagcgacuucguccgggccaccgcgaccaucccgauccaggccucccugcccuucggcuggcugaucgugggggccgcccuccuggccguguuccagagcgcguccaagaucaucacgcugaagaagcgcuggcagcucgcccugagcaagggcguccacuucgugugcaaccugcuccugcuguucgugaccgucuacucccaccuccugcugguggccgccgggcucgaggcgcccuuccuguaccuguacgcccucguguacuuccugcagagcaucaacuucguccggaucaucaugcgccuguggcucugcuggaagugccgguccaagaacccccugcuguacgacgccaacuacuuccucugcuggcacaccaacugcuacgacuacugcaucccguacaacagcgugaccuccagcaucgugaucacguccggcgacggcaccaccagccccaucuccgagcacgacuaccagaucgggggcuacaccgagaagugggagagcggggucaaggacugcguggugcugcacuccuacuucacgagcgacuacuaccagcuguacuccacccagcucagcaccgacaccggcgucgagcacgugacguucuucaucuacaacaagaucguggacgagcccgaggagcacguccagauccacaccaucgacggguccagcggcguggugaaccccgucauggagccgaucuacgacgagcccaccaccacgaccagcgugccccugugaggacuaguuauaagacugacuagcccgaugggccucccaacgggcccuccuccccuccuugcaccgagauuaauaaaaaaaaaaaaaaaaaaaaaaaaaaaaaaaaaaaaaaaaaaaaaaaaaaaaaaaaaaaaaaaaugcaucccccccccccccccccccccccccccccccaaaggcucuuuucagagccaccagaauu

SEQ ID NO: 22608 - RNA, 1045 nt, Artificial Sequence
  SARS-CoV-2__MT370869.1__ORF3a protein mRNA gc
aggagaaagcuuaccauggaccuguucaugcgcaucuucaccaucggcaccgugacgcucaagcagggggagaucaaggacgccacccccagcgacuucguccgggccaccgcgaccaucccgauccaggccucccugcccuucggcuggcugaucguggggguggcccuccuggccgucuuccagagcgccuccaacaucaucacgcugaagaagcgcuggcagcucgcgcugagcaagggcgugcacuucgugugcaaccugcuccugcuguucgucaccguguacucccaccuccugcugguggccgccgggcucgaggcccccuuccuguaccuguacgcgcucgucuacuuccugcagagcaucaacuucgugcggaucaucaugcgccuguggcucugcuggaagugccgguccaagaacccccugcuguacgacgccaacuacuuccucugcuggcacaccaacugcuacgacuacugcaucccguacaacagcgugaccuccagcaucgucaucacguccggcgacggcaccaccagccccaucuccgagcacgacuaccagaucgggggcuacaccgagaagugggagagcggggugaaggacugcgugguccugcacuccuacuucacgagcgacuacuaccagcuguacuccacccagcucagcaccgacaccggcguggagcacgugacguucuucaucuacaacaagaucgucgacgagcccgaggagcacgugcagauccacaccaucgacggguccagcggcguggucaaccccgugauggagccgaucuacgacgagcccaccaccacgaccagcgugccccugugaggacuaguuauaagacugacuagcccgaugggccucccaacgggcccuccuccccuccuugcaccgagauuaauaaaaaaaaaaaaaaaaaaaaaaaaaaaaaaaaaaaaaaaaaaaaaaaaaaaaaaaaaaaaaaaaugcaucccccccccccccccccccccccccccccccaaaggcucuuuucagagccaccagaauu

SEQ ID NO: 22609 - RNA, 1045 nt, Artificial Sequence
  SARS-CoV-2__MT371038.1__ORF3a protein mRNA gc
aggagaaagcuuaccauggaccuguucaugcgcaucuucaccaucggcaccgugacgcucaagcagggggagaucaaggacgccacccccagcgacuucguccgggccaccgcgaccaucccgauccaggccucccugcccuucggcuggcugaucguggggguggcccuccuggccgucuuccacagcgccuccaagaucaucacgcugaagaagcgcuggcagcucgcgcugagcaagggcgugcacuucgugugcaaccugcuccugcuguucgucaccguguacucccaccuccugcugguggccgccgggcucgaggcccccuuccuguaccuguacgcgcucgucuacuuccugcacagcaucaacuucgugcggaucaucaugcgccuguggcucugcuggaagugccgguccaagaacccccugcuguacgacgccaacuacuuccucugcuggcacaccaacugcuacgacuacugcaucccguacaacagcgugaccuccagcaucgucaucacguccggcgacggcaccaccagccccaucuccgagcacgacuaccagaucgggggcuacaccgagaagugggagagcggggugaaggacugcgugguccugcacuccuacuucacgagcgacuacuaccagcuguacuccacccagcucagcaccgacaccggcguggagcacgugacguucuucaucuacaacaagaucgucgacgagcccgaggagcacgugcagauccacaccaucgacggguccagcggcguggucaaccccgugauggagccgaucuacgacgagcccaccaccacgaccagcgugccccugugaggacuaguuauaagacugacuagcccgaugggccucccaacgggcccuccuccccuccuugcaccgagauuaauaaaaaaaaaaaaaaaaaaaaaaaaaaaaaaaaaaaaaaaaaaaaaaaaaaaaaaaaaaaaaaaaugcaucccccccccccccccccccccccccccccccaaaggcucuuuucagagccaccagaauu

SEQ ID NO: 22610 - RNA, 1045 nt, Artificial Sequence
  SARS-CoV-2__MT358656.1__ORF3a protein mRNA gc
aggagaaagcuuaccauggaccuguucaugcgcaucuucaagaucggcaccgugacccucaagcagggggagaucaaggacgccacgcccagcgacuucguccgggccaccgcgaccaucccgauccaggccucccugcccuucggcuggcugaucguggggguggcccuccuggccgucuuccagagcgccuccaagaucaucacccugaagaagcgcuggcagcucgcgcugagcaagggcgugcacuucgugugcaaccugcuccugcuguucgucacgguguacucccaccuccugcugguggccgccgggcucgaggcccccuuccuguaccuguacgcgcucgucuacuuccugcagagcaucaacuucgugcggaucaucaugcgccuguggcucugcuggaagugccgguccaagaacccccugcuguacgacgccaacuacuuccucugcuggcacaccaacugcuacgacuacugcaucccguacaacagcgugaccuccagcaucgucaucaccuccggcgacggcacgaccagccccaucuccgagcacgacuaccagaucgggggcuacaccgagaagugggagagcggggugaaggacugcgugguccugcacuccuacuucaccagcgacuacuaccagcuguacuccacgcagcucagcaccgacaccggcguggagcacgugaccuucuucaucuacaacaagaucgucgacgagcccgaggagcacgugcagauccacacgaucgacggguccagccgcguggucaaccccgugauggagccgaucuacgacgagcccaccaccaccacgagcgugccccugugaggacuaguuauaagacugacuagcccgaugggccucccaacgggcccuccuccccuccuugcaccgagauuaauaaaaaaaaaaaaaaaaaaaaaaaaaaaaaaaaaaaaaaaaaaaaaaaaaaaaaaaaaaaaaaaaugcaucccccccccccccccccccccccccccccccaaaggcucuuuucagagccaccagaauu

SEQ ID NO: 22611 - RNA, 1045 nt, Artificial Sequence
  SARS-CoV-2__MT344957.1__ORF3a protein mRNA gc
aggagaaagcuuaccauggaccuguucaugcgcaucuucaccaucggcaccgugacgcucaagcagggggagaucaaggacgccacccccagcgacuucguccgggccaccgcgaccaucccgauccaggccucccugagcuucggcuggcugaucguggggguggcccuccuggccgucuuccacuccgccagcaagaucaucacgcugaagaagcgcuggcagcucgcgcuguccaagggcgugcacuucgugugcaaccugcuccugcuguucgucaccguguacagccaccuccugcugguggccgccgggcucgaggcccccuuccuguaccuguacgcgcucgucuacuuccugcaguccaucaacuucgugcggaucaucaugcgccuguggcucugcuggaagugccggagcaagaacccccugcuguacgacgccaacuacuuccucugcuggcacaccaacugcuacgacuacugcauccccuacaacuccgugaccagcuccaucgucaucacgagcggcgacggcaccaccuccccgaucagcgagcacgacuaccagaucgggggcuacaccgagaagugggaguccggggugaaggacugcgugguccugcacagcuacuucacguccgacuacuaccagcuguacagcacccagcucuccaccgacaccggcguggagcacgugacguucuucaucuacaacaagaucgucgacgagcccgaggagcacgugcagauccacaccaucgacgggagcagcggcguggucaaccccgugauggagcccaucuacgacgagccgaccaccacgaccuccgugccccugugaggacuaguuauaagacugacuagcccgaugggccucccaacgggcccuccuccccuccuugcaccgagauuaauaaaaaaaaaaaaaaaaaaaaaaaaaaaaaaaaaaaaaaaaaaaaaaaaaaaaaaaaaaaaaaaaugcaucccccccccccccccccccccccccccccccaaaggcucuuuucagagccaccagaauu

SEQ ID NO: 22612 - RNA, 1045 nt, Artificial Sequence
  SARS-CoV-2__MT326054.1__ORF3a protein mRNA gc
aggagaaagcuuaccauggaccuguucaugcgcaucuucaccaucggcaccgugacgcucaagcagggggagaucaaggacgccacccccagcgacuucguccgggccaccgcgaccaucccgauccaggccucccugcccuucggcuggcugaucguggggguggcccuccuggccgucuuccacagcgccuccaagaucaucacgcugaagaagcgcuggcagcucgcgcugagcaagggcgugcacuucgugugcaaccugcuccugcuguucgucaccguguacucccaccuccugcugguggccgccgggcucgaggcccccuuccuguaccuguacgcgcucgucuacuuccugcagagcaucaacuucgugcggaucaucaugcgccuguggcucugcuggaagugccgguccaagaacccccugcuguacgacgccaacuacuuccucugcuggcacaucaacugcuacgacuacugcaucccguacaacagcgugaccuccagcaucgucaucaccuccggcgacggcacgaccagccccaucuccgagcacgacuaccagaucgggggcuacaccgagaagugggagagcggggugaaggacugcgugguccugcacuccuacuucaccagcgacuacuaccagcuguacuccacgcagcucagcaccgacaccggcguggagcacgugaccuucuucaucuacaacaagaucgucgacgagcccgaggagcacgugcagauccacacgaucgacggguccagcggcguggucaaccccgugauggagccgaucuacgacgagcccaccaccaccacgagcgugccccugugaggacuaguuauaagacugacuagcccgaugggccucccaacgggcccuccuccccuccuugcaccgagauuaauaaaaaaaaaaaaaaaaaaaaaaaaaaaaaaaaaaaaaaaaaaaaaaaaaaaaaaaaaaaaaaaaugcaucccccccccccccccccccccccccccccccaaaggcucuuuucagagccaccagaauu

SEQ ID NO: 22613 - RNA, 1045 nt, Artificial Sequence
  SARS-CoV-2__MT326096.1__ORF3a protein mRNA gc
aggagaaagcuuaccauggaccuguucaugcgcaucuucaccaucggcaccgugacgcucaagcagggggagaucaaggacgccacccccagcgacuucguccgggccaccgcgaccaucccgauccaggccucccugcccuucggcuggcugaucguggggguggcccuccuggccgucuuccacagcgccuccaagaucaucacgcugaagaagcgcuggcagcucgcgcugagcaagggcgugcacuucgugugcaaccugcuccugcuguucgucaccguguacucccaccucuuccugguggccgccgggcuggaggcccccuuccucuaccuguacgcgcuggucuacuuccuccagagcaucaacuucgugcggaucaucaugcgccuguggcugugcuggaagugccgguccaagaacccccuccuguacgacgccaacuacuuccugugcuggcacaccaacugcuacgacuacugcaucccguacaacagcgugaccuccagcaucgucaucacguccggcgacggcaccaccagccccaucuccgagcacgacuaccagaucgggggcuacaccgagaagugggagagcggggugaaggacugcgugguccuccacuccuacuucacgagcgacuacuaccagcuguacuccacccagcugagcaccgacaccggcguggagcacgugacguucuucaucuacaacaagaucgucgacgagcccgaggagcacgugcagauccacaccaucgacggguccagcggcguggucaaccccgugauggagccgaucuacgacgagcccaccaccacgaccagcgugccccucugaggacuaguuauaagacugacuagcccgaugggccucccaacgggcccuccuccccuccuugcaccgagauuaauaaaaaaaaaaaaaaaaaaaaaaaaaaaaaaaaaaaaaaaaaaaaaaaaaaaaaaaaaaaaaaaaugcaucccccccccccccccccccccccccccccccaaaggcucuuuucagagccaccagaauu

SEQ ID NO: 22614 - RNA, 1045 nt, Artificial Sequence
  SARS-CoV-2__MT326151.1__ORF3a protein mRNA gc
aggagaaagcuuaccauggaccuguucaugcgcaucuucaccaucggcaccgugacgcucaagcagggggagaucaaggacgccacccccagcgacuucguccgggccaccgcgaccaucccgauccaggccucccugcccuucggcuggcugaucguggggguggcccuccuggccgucuuccagagcgccuccaagaucaucacgcugaagaagcgcuggcagcucagccuguccaagggcgugcacuucgugugcaaccugcuccugcuguucgucaccguguacagccaccuccugcugguggcggccgggcucgaggcccccuuccuguaccuguacgcccucgucuacuuccugcaguccaucaacuucgugcggaucaucaugcgccuguggcucugcuggaagugccggagcaagaacccccugcuguacgacgcgaacuacuuccucugcuggcacaccaacugcuacgacuacugcaucccguacaacuccgugaccagcuccaucgucaucacgagcggcgacggcaccaccucccccaucagcgagcacgacuaccagaucgggggcuacaccgagaagugggaguccggggugaaggacugcgugguccugcacagcuacuucacguccgacuacuaccagcuguacagcacccagcucuccaccgacaccggcguggagcacgugacguucuucaucuacaacaagaucgucgacgagcccgaggagcacgugcagauccacaccaucgacgggagcagcggcguggucaaccccgugauggagccgaucuacgacgagcccaccaccacgaccuccgugccccugugaggacuaguuauaagacugacuagcccgaugggccucccaacgggcccuccuccccuccuugcaccgagauuaauaaaaaaaaaaaaaaaaaaaaaaaaaaaaaaaaaaaaaaaaaaaaaaaaaaaaaaaaaaaaaaaaugcaucccccccccccccccccccccccccccccccaaaggcucuuuucagagccaccagaauu

SEQ ID NO: 22615 - RNA, 1045 nt, Artificial Sequence
  SARS-CoV-2__MT325635.1__ORF3a protein mRNA gc
aggagaaagcuuaccauggaccuguucaugcgcaucuucaccaucggcaccgugacgcucaagcagggggagaucaaggacgccacccccagcgacuucguccgggccaccgcgaccaucccgauccaggccucccugcccuucggcuggcugaucguggggguggcccuccuggccgucuuccacagcgccuccaagaucaucacgcugaagaagcgcuggcagcucgcgcugagcaagggcgugcacuucgugugcaaccugcuccugcuguucgucaccguguacucccaccuccugcugguggccgccgggcucgaggcccccuuccuguaccuguacgcgcucgucuacuuccugcagagcaucaacuucgugcggaucaucaugcgccuguggcucugcuggaagugccgguccaagaacccccugcuguacgacgccaacuacuuccucugcuggcacaccaacugcuacgacuacugcaucccguacaacagcgugaccuccagcaucgucaucacguccggcgacggcaccaccagccccaucuccgagcacgacuaccagaucgggggcuacaccgagaagugggagagcggggugaaggacugcgugguccugcacuccuacuucacgagcgacuacuaccagcuguacuccacccagcucagcaccgacaccggcguggagcacgugacguucuucaucuacaacaagaucgucgacgaccccgaggagcacgugcagauccacaccaucgacggguccagcggcguggucaaccccgugauggagccgaucuacgacgagcccaccaccacgaccagcgugccccugugaggacuaguuauaagacugacuagcccgaugggccucccaacgggcccuccuccccuccuugcaccgagauuaauaaaaaaaaaaaaaaaaaaaaaaaaaaaaaaaaaaaaaaaaaaaaaaaaaaaaaaaaaaaaaaaaugcaucccccccccccccccccccccccccccccccaaaggcucuuuucagagccaccagaauu

SEQ ID NO: 22616 - RNA, 1045 nt, Artificial Sequence
  SARS-CoV-2__MT328033.1__ORF3a protein mRNA gc
aggagaaagcuuaccauggaccuguucaugcgcaucuucaccaucggcaccgugacgcucaagcagggggagaucaaggacgccacccccagcgacuucguccgggccaccgcgaccaucccgauccaggccucccugcccuucggcuggcugaucguggggguggcccuccuggccgucuuccagagcgccuccaagaucaucacgcugaagaagcgcuggcagcucgcgcugagcaagggcgugcacuucgugugcaaccugcuccugcuguucgucaccguguacucccaccuccugcugguggccgccgggcucgaggcccccuuccuguaccuguacgcgcucgucuacuuccugcagagcaucaacuucgugcggaucaucaugcgcaucuggcugugcuggaagugccgguccaagaacccccuccuguacgacgccaacuacuuccugugcuggcacaccaacugcuacgacuacugcaucccguacaacagcgugaccuccagcaucgucaucacguccggcgacggcaccaccagccccaucuccgagcacgacuaccagaucgggggcuacaccgagaagugggagagcggggugaaggacugcgugguccuccacuccuacuucacgagcgacuacuaccagcuguacuccacccagcugagcaccgacaccggcguggagcacgugacguucuucaucuacaacaagaucgucgacgagcccgaggagcacgugcagauccacaccaucgacggguccagcggcguggucaaccccgugauggagccgaucuacgacgagcccaccaccacgaccagcgugccccucugaggacuaguuauaagacugacuagcccgaugggccucccaacgggcccuccuccccuccuugcaccgagauuaauaaaaaaaaaaaaaaaaaaaaaaaaaaaaaaaaaaaaaaaaaaaaaaaaaaaaaaaaaaaaaaaaugcaucccccccccccccccccccccccccccccccaaaggcucuuuucagagccaccagaauu

SEQ ID NO: 22617 - RNA, 1036 nt, Artificial Sequence
  SARS-CoV-2__MT293186.1__ORF3a protein mRNA gc
aggagaaagcuuaccauggaccuguucaugcgcauccucaccgugacccugaagcagggcgagaucaaggacgccacgcccagcgacuucguccgggccaccgcgaccaucccgauccaggccucccugcccuucggguggcucaucgugggcguggcccugcuggccgucuuccagagcgccuccaagaucaucacccucaagaagcgcuggcagcuggcgcugagcaagggggugcacuucgugugcaaccuccugcugcuguucgucacgguguacucccaccuccugcucguggccgccggccuggaggcccccuuccuguaccucuacgcgcuggucuacuuccugcagagcaucaacuucgugcggaucaucaugcgccucuggcugugcuggaagugccgguccaagaacccccugcucuacgacgccaacuacuuccugugcuggcacaccaacugcuacgacuacugcaucccguacaacagcgugaccuccagcaucgucaucaccuccggggacggcacgaccagccccaucuccgagcacgacuaccagaucggcggguacaccgagaagugggagagcggcgugaaggacugcgugguccugcacuccuacuucaccagcgacuacuaccagcucuacuccacgcagcugagcaccgacaccgggguggagcacgugaccuucuucaucuacaacaagaucgucgacgagcccgaggagcacgugcagauccacacgaucgacggcuccagcgggguggucaaccccgugauggagccgaucuacgacgagcccaccaccaccacgagcgugccccugugaggacuaguuauaagacugacuagcccgaugggccucccaacgggcccuccuccccuccuugcaccgagauuaauaaaaaaaaaaaaaaaaaaaaaaaaaaaaaaaaaaaaaaaaaaaaaaaaaaaaaaaaaaaaaaaaugcaucccccccccccccccccccccccccccccccaaaggcucuuuucagagccaccagaauu

SEQ ID NO: 22618 - RNA, 1045 nt, Artificial Sequence
  SARS-CoV-2__MT263428.1__ORF3a protein mRNA gc
aggagaaagcuuaccauggaccuguucaugcgcaucuucaccaucggcaccgugacgcucaagcagggggagaucaaggacgccacccccagcgacuucguccgggccaccgcgaccaucccgauccaggccucccugcccuucggcuggcugaucguggggguggcccuccuggccgucuuccacagcgccuccaagaucaucacgcugaagaagcgcuggcagcucgcgcugagcaagggcgugcacuucgugugcaaccugcuccugcuguucgucaccguguacucccaccuccugcugguggccgccguccucgaggcccccuuccuguaccuguacgcgcucguguacuuccugcagagcaucaacuucgugcggaucaucaugcgccuguggcucugcuggaagugccgguccaagaacccccugcuguacgacgccaacuacuuccucugcuggcacaccaacugcuacgacuacugcaucccguacaacagcgucaccuccagcaucgugaucacguccggggacggcaccaccagccccaucuccgagcacgacuaccagaucggcggguacaccgagaagugggagagcggcgugaaggacugcgucgugcugcacuccuacuucacgagcgacuacuaccagcuguacuccacccagcucagcaccgacaccgggguggagcacgucacguucuucaucuacaacaagaucguggacgagcccgaggagcacgugcagauccacaccaucgacggcuccagcggggucgugaaccccgugauggagccgaucuacgacgagcccaccaccacgaccagcgucccccugugaggacuaguuauaagacugacuagcccgaugggccucccaacgggcccuccuccccuccuugcaccgagauuaauaaaaaaaaaaaaaaaaaaaaaaaaaaaaaaaaaaaaaaaaaaaaaaaaaaaaaaaaaaaaaaaaugcaucccccccccccccccccccccccccccccccaaaggcucuuuucagagccaccagaauu

SEQ ID NO: 22619 - RNA, 1045 nt, Artificial Sequence
  SARS-CoV-2__MT263448.1__ORF3a protein mRNA gc
aggagaaagcuuaccauggaccuguucaugcgcaucuucaccaucggcaccgugacgcucaagcagggggagaucaaggacgccacccccagcgacuucguccgggccaccgcgaccaucccgauccaggccucccugcccuucggcuggcugaucguggggguggcccuccuggccgucuuccagagcgccuccaagaucaucacgcugaagaagcgcuggcagcucgcgcugagcaagggcgugcacuucgugugcaaccugcuccugcuguucgucaccguguacucccaccuccugcugguggccgccgggcucgaggcccccuuccuguaccuguacgcgcucgucuacuuccugcagagcaucaacuucgugcggaucaucaugcgccuguggcucugcuggaagugccgguccaagaacccccugcuguacgacgccaacuacuuccucugcuggcacaccaacuacuacgacuacugcaucccguacaacagcgugaccuccagcaucgucaucacguccggcgacggcaccaccagccccaucuccgagcacgacuaccagaucgggggcuacaccgagaagugggagagcggggugaaggacugcgugguccugcacuccuacuucacgagcgacuacuaccagcuguacuccacccagcucagcaccgacaccggcguggagcacgugacguucuucaucuacaacaagaucgucgacgagcccgaggagcacgugcagauccacaccaucgacggguccagcggcguggucaaccccgugauggagccgaucuacgacgagcccaccaccacgaccagcgugccccugugaggacuaguuauaagacugacuagcccgaugggccucccaacgggcccuccuccccuccuugcaccgagauuaauaaaaaaaaaaaaaaaaaaaaaaaaaaaaaaaaaaaaaaaaaaaaaaaaaaaaaaaaaaaaaaaaugcaucccccccccccccccccccccccccccccccaaaggcucuuuucagagccaccagaauu

SEQ ID NO: 22620 - RNA, 1045 nt, Artificial Sequence
  SARS-CoV-2__MT159712.2__ORF3a protein mRNA gc
aggagaaagcuuaccauggaccuguucaugcgcaucuucaccaucggcaccgugacgcucaagcagggggagaucaaggacgccacccccagcgacuucguccgggccaccgcgaccaucccgauccaggccucccugcccuucggcuggcugaucguggggguggcccuccuggccgucuuccagagcgccuccaagaucaucacgcugaagaagcgcuggcagcucgcgcugagcaagggcgugcacuucgugugcaaccugcuccugcuguucgucaccguguacucccaccuccugcugguggccgccgggcucgaggcccccuuccuguaccuguacgcgcucgucuacuuccugcagagcaucaacuucgugcggaucaucaugcgccuguggcucugcuggaagugccggcccaagaacccgcugcuguacgacgccaacuacuuccucugcuggcacaccaacugcuacgacuacugcauccccuacaacuccgugaccagcuccaucgucaucacgagcggcgacggcaccaccucccccaucagcgagcacgacuaccagaucgggggcuacaccgagaagugggaguccggggugaaggacugcgugguccugcacagcuacuucacguccgacuacuaccagcuguacagcacccagcucuccaccgacaccggcguggagcacgugacguucuucaucuacaacaagaucgucgacgagcccgaggagcacgugcagauccacaccaucgacgggagcuccggcguggucaacccggugauggagcccaucuacgacgagcccaccaccacgaccagcgugccccugugaggacuaguuauaagacugacuagcccgaugggccucccaacgggcccuccuccccuccuugcaccgagauuaauaaaaaaaaaaaaaaaaaaaaaaaaaaaaaaaaaaaaaaaaaaaaaaaaaaaaaaaaaaaaaaaaugcaucccccccccccccccccccccccccccccccaaaggcucuuuucagagccaccagaauu

SEQ ID NO: 22621 - RNA, 1045 nt, Artificial Sequence
  SARS-CoV-2__MT039890.1__ORF3a protein mRNA gc
aggagaaagcuuaccauggaccuguucaugcgcaucuucaccaucggcaccgugacgcucaagcagggggagaucaaggacgccacccccagcgacuucguccgggccaccgcgaccaucccgauccaggccucccugcccuucggcuggcugaucguggggguggcccuccuggccgucuuccagagcgccuccaagaucaucacgcugaagaagcgcuggcagcucgcgcugagcaagggcgugcacuucgugugcaaccugcuccugcuguucgucaccguguacucccaccuccugcugguggccgccgggcucgaggcccccuuccuguaccuguacgcgcucgucuacuuccugcagagcaucaacuucgugcggaucaucaugcgccugcuccugugcuggaagugccgguccaagaacccccugcucuacgacgccaacuacuuccugugcuggcacaccaacugcuacgacuacugcaucccguacaacagcgugaccuccagcaucgucaucacguccggcgacggcaccaccagccccaucuccgagcacgacuaccagaucgggggcuacaccgagaagugggagagcggggugaaggacugcgugguccugcacuccuacuucacgagcgacuacuaccagcucuacuccacccagcugagcaccgacaccggcguggagcacgugacguucuucaucuacaacaagaucgucgacgagcccgaggagcacgugcagauccacaccaucgacguguccagcggggucgugaaccccgugauggagccgaucuacgacgagcccaccaccacgaccagcgucccccugugaggacuaguuauaagacugacuagcccgaugggccucccaacgggcccuccuccccuccuugcaccgagauuaauaaaaaaaaaaaaaaaaaaaaaaaaaaaaaaaaaaaaaaaaaaaaaaaaaaaaaaaaaaaaaaaaugcaucccccccccccccccccccccccccccccccaaaggcucuuuucagagccaccagaauu

SEQ ID NO: 22622 - RNA, 556 nt, Artificial Sequence
  MERS-CoV/MERS-CoV-Jeddah-human-1__KF958702.1__ORF8b protein mRNA gc
aggagaaagcuuaccaugcccaucccgccccugcgcaagaugcugggcaucgggggcgaccggaccgagaagcugauccccgggauggagcugagcaacuggcuccccggcgggaccuccacgacccuggagcuggacccgaagcagcacagccacuccggccuccugcgcauggccagcuucggcuccaugaagauggcgccccugaugcuccugcagcugcucgggcggggcacccugaccaugauccagcugcuccugcacaacagccugcccgugcucuccuuccugaagacgagcacccugcgcgggcucgaggccaucgucaaccaccuccaggagccccuggccugaggacuaguuauaagacugacuagcccgaugggccucccaacgggcccuccuccccuccuugcaccgagauuaauaaaaaaaaaaaaaaaaaaaaaaaaaaaaaaaaaaaaaaaaaaaaaaaaaaaaaaaaaaaaaaaaugcaucccccccccccccccccccccccccccccccaaaggcucuuuucagagccaccagaauu

SEQ ID NO: 22623 - RNA, 556 nt, Artificial Sequence
  MERS-CoV/Al-Hasa_4_2013__KF186564.1__ORF8b protein mRNA gc
aggagaaagcuuaccaugcccaucccgccccugcgcaagaugcucggcaucgggggcgaccggaccgagaagcugauccccgggauggagcugagcaacuggcuccccggcgggaccuccacgacccuggagcuggacccgaagcagcacagccacuccggccuccugcgcauggccagcuucggcuccaugaagauggcgccccugaugcuccugcagcugcucgggcggggcacccugaccaugauccagcugcuccugcacaacagccgccccgugcuguccuuccucaagacgagcacccugcgggggcuggaggccaucgucaaccaccuccaggagccccuggccugaggacuaguuauaagacugacuagcccgaugggccucccaacgggcccuccuccccuccuugcaccgagauuaauaaaaaaaaaaaaaaaaaaaaaaaaaaaaaaaaaaaaaaaaaaaaaaaaaaaaaaaaaaaaaaaaugcaucccccccccccccccccccccccccccccccaaaggcucuuuucagagccaccagaauu

SEQ ID NO: 22624 - RNA, 556 nt, Artificial Sequence; identical to SEQ ID NO: 22623
  MERS-CoV/Riyadh_14_2013__KJ156934.1__ORF8b protein mRNA gc

SEQ ID NO: 22625 - RNA, 337 nt, Artificial Sequence
  SARS-CoV/Tor2__NC_004718.3__ORF8a protein mRNA gc
aggagaaagcuuaccaugaagcugcucaucgugcugaccugcaucagccugugcuccugcaucugcaccgucgugcagcgcugcgccagcaacaagccccacgugcucgaggacccgugcaagguccagcacugaggacuaguuauaagacugacuagcccgaugggccucccaacgggcccuccuccccuccuugcaccgagauuaauaaaaaaaaaaaaaaaaaaaaaaaaaaaaaaaaaaaaaaaaaaaaaaaaaaaaaaaaaaaaaaaaugcaucccccccccccccccccccccccccccccccaaaggcucuuuucagagccaccagaauu

SEQ ID NO: 22626 - RNA, 472 nt, Artificial Sequence
  SARS-CoV/Tor2__NC_004718.3__ORF8b protein mRNA gc
aggagaaagcuuaccaugugccugaagauccucgugcgcuacaacacccggggcaacaccuacagcacggccuggcugugcgcccuggggaagguccuccccuuccaccgcuggcacaccauggugcagaccugcaccccgaacgugacgaucaacugccaggaccccgcgggcggggcccugaucgcccggugcugguaccugcacgagggccaccagaccgccgccuuccgcgacguccucguggugcugaacaagcggaccaacugaggacuaguuauaagacugacuagcccgaugggccucccaacgggcccuccuccccuccuugcaccgagauuaauaaaaaaaaaaaaaaaaaaaaaaaaaaaaaaaaaaaaaaaaaaaaaaaaaaaaaaaaaaaaaaaaugcaucccccccccccccccccccccccccccccccaaaggcucuuuucagagccaccagaauu

SEQ ID NO: 22627 - RNA, 583 nt, Artificial Sequence
  Bat SARS-like CoV/WIV1__KF367457.1__ORF8 protein mRNA gc
aggagaaagcuuaccaugaagcugcucaucgugcugggccugcucaccagcgucuacugcaugcacaaggagugcuccauccaggagugcugcgagaaccagcccuuccagcuggaggaccccugccccauccacuacuacagcgacugguucgugaagaucgggccccgcaaguccgcccggcuggugcagcucugcgccggcgaguacgggcaccgcguccccauccacuacgagauguucggcaacuacaccaucagcugcgagccgcuggagaucaacugccagaacccgcccguggggucccugaucgugcggugcagcuacgacgucgacuucauggaguaccacgacgugcgcgugguccucgacuucaucugaggacuaguuauaagacugacuagcccgaugggccucccaacgggcccuccuccccuccuugcaccgagauuaauaaaaaaaaaaaaaaaaaaaaaaaaaaaaaaaaaaaaaaaaaaaaaaaaaaaaaaaaaaaaaaaaugcaucccccccccccccccccccccccccccccccaaaggcucuuuucagagccaccagaauu

SEQ ID NO: 22628 - RNA, 583 nt, Artificial Sequence
  SARS-CoV-2/Wuhan-Hu-1__NC_045512.2/MN908947.2/EPI_ISL_402128__ORF 8 protein (ORF8) mRNA gc R9945
aggagaaagcuuaccaugaaguuccugguguuccucggcaucaucaccaccgucgccgccuuccaccaggagugcagccugcaguccugcacgcagcaccagcccuacgugguggacgacccgugccccauccacuucuacagcaagugguacauccgcgucggggcccggaaguccgcgccccugaucgagcucugcguggacgaggccggcagcaagucccccauccaguacaucgacaucgggaacuacaccgugagcugccugccguucaccaucaacugccaggagcccaagcugggcucccucgucgugcgcugcagcuucuacgaggacuuccuggaguaccacgacgugcgggucgugcuggacuucaucugaggacuaguuauaagacugacuagcccgaugggccucccaacgggcccuccuccccuccuugcaccgagauuaauaaaaaaaaaaaaaaaaaaaaaaaaaaaaaaaaaaaaaaaaaaaaaaaaaaaaaaaaaaaaaaaaugcaucccccccccccccccccccccccccccccccaaaggcucuuuucagagccaccagaauu

SEQ ID NO: 22629 - RNA, 583 nt, Artificial Sequence
  SARS-CoV-2__MT919788.1__ORF8 protein mRNA gc
aggagaaagcuuaccaugaaguuccugguguuccucggcaucaucaccaccgucgccgccuuccaccaggagugcagccugcaguccugcacgcagcaccagcccuacgugguggacgacccgugccccauccacuucuacagcaagugguacauccgcgucggggcccggaaguccgcgccccugaucgagcucugcguggacgaggccggcuucaagagccccauccaguacaucgacaucgggaacuacaccguguccugccugccguucaccaucaacugccaggagcccaagcugggcagccucgucgugcgcugcuccuucuacgaggacuuccuggaguaccacgacgugcgggucgugcuggacuucaucugaggacuaguuauaagacugacuagcccgaugggccucccaacgggcccuccuccccuccuugcaccgagauuaauaaaaaaaaaaaaaaaaaaaaaaaaaaaaaaaaaaaaaaaaaaaaaaaaaaaaaaaaaaaaaaaaugcaucccccccccccccccccccccccccccccccaaaggcucuuuucagagccaccagaauu

SEQ ID NO: 22630 - RNA, 583 nt, Artificial Sequence
  SARS-CoV-2__MT919994.1__ORF8 protein mRNA gc
aggagaaagcuuaccaugaaguuccugguguuccucggcaucaucaccaccgucgccgccuuccaccaggagugcagccugcaguccugcacgcagcaccagcccuacgugguggacgacccgugccccauccacuucuacagcaagugguacauccgcgucggggcccggaaguccgcgccccugaucgagcucugcguggacgaggccggcagcaagucccccauccaguacaucgacaucgggaacuacaccgugagcugcuccccguucaccaucaacugccaggagcccaagcugggcagccuggucgugcgcugcuccuucuacgaggacuuccucgaguaccacgacgugcgggucgugcuggacuucaucugaggacuaguuauaagacugacuagcccgaugggccucccaacgggcccuccuccccuccuugcaccgagauuaauaaaaaaaaaaaaaaaaaaaaaaaaaaaaaaaaaaaaaaaaaaaaaaaaaaaaaaaaaaaaaaaaugcaucccccccccccccccccccccccccccccccaaaggcucuuuucagagccaccagaauu

SEQ ID NO: 22631 - RNA, 583 nt, Artificial Sequence
  SARS-CoV-2__MT919999.1__ORF8 protein mRNA gc
aggagaaagcuuaccaugaaguuccugguguuccucggcaucaucaccaccgucgccgccuuccaccaggagugcagccugcaguccugcacgcagcaccagcccuacgugguggacgacccgugccccauccacuucuacagcaagugguacauccgcgucggggcccggaaguccgcgccccugaucgagcucugccuggacgaggccggcagcaagucccccauccaguacaucgacaucgggaacuacaccgugagcugcuccccguucaccaucaacugccaggagcccaagcugggcagccucgugguccgcugcuccuucuacgaggacuuccuggaguaccacgacgugcgggugguccuggacuucaucugaggacuaguuauaagacugacuagcccgaugggccucccaacgggcccuccuccccuccuugcaccgagauuaauaaaaaaaaaaaaaaaaaaaaaaaaaaaaaaaaaaaaaaaaaaaaaaaaaaaaaaaaaaaaaaaaugcaucccccccccccccccccccccccccccccccaaaggcucuuuucagagccaccagaauu

SEQ ID NO: 22632 - RNA, 583 nt, Artificial Sequence
  SARS-CoV-2__MT920037.1__ORF8 protein mRNA gc
aggagaaagcuuaccaugaaguuccugguguuccucggcaucaucaccaccgucgccgccuuccaccaggagugcagccugcagcugugcacgcagcaccagcccuacgugguggacgacccgugccccauccacuucuacuccaagugguacauccgcgucggggcccgcaagagcgcgccccucaucgagcugugcguggacgaggccggcuccaagcugcccauccaguacaucgacaucgggaacuacaccgugagcugccucccguucaccaucaacugccaggagcccaagcugggcucccuggucgugcggugcagcuucuacgaggacuuccucgaguaccacgacgugcgggucgugcuggacuucaucugaggacuaguuauaagacugacuagcccgaugggccucccaacgggcccuccuccccuccuugcaccgagauuaauaaaaaaaaaaaaaaaaaaaaaaaaaaaaaaaaaaaaaaaaaaaaaaaaaaaaaaaaaaaaaaaaugcaucccccccccccccccccccccccccccccccaaaggcucuuuucagagccaccagaauu

SEQ ID NO: 22633 - RNA, 583 nt, Artificial Sequence
  SARS-CoV-2__MT921009.1__ORF8 protein mRNA gc
aggagaaagcuuaccaugaaguuccugguguuccucggcaucaucaccaccgucgccgccuuccaccaggagugcagccugcagcugugcacgcagcaccagcccuacgugguggacgacccgugccccauccacuucuacuccaagugguacauccgcgucggggcccgcaagagcgcgccccucaucgagcugugcguggacgaggccggcuccaagagccccauccaguacaucgacaucgggaacuacaccguguccugccugccguucaccaucaacugccaggagcccaagcucggcagccuggucgugcggugcuccuucuacgaggacuuccuggaguaccacgacgugcgggucgugcucgacuucaucugaggacuaguuauaagacugacuagcccgaugggccucccaacgggcccuccuccccuccuugcaccgagauuaauaaaaaaaaaaaaaaaaaaaaaaaaaaaaaaaaaaaaaaaaaaaaaaaaaaaaaaaaaaaaaaaaugcaucccccccccccccccccccccccccccccccaaaggcucuuuucagagccaccagaauu

SEQ ID NO: 22634 - RNA, 583 nt, Artificial Sequence
  SARS-CoV-2__MT913071.1__ORF8 protein mRNA gc
aggagaaagcuuaccaugaaguuccugguguuccucggcaucaucaccaccgucgccgccuuccaccaggagugcagccugcaguccugcacgcagcaccagcccuacgugguggacgacccgugccccauccacuucuacagcaagugguacauccgcgucggggcccggaaguccgcgccccugaucgagcucugcguggacgagagcggcuccaagagccccauccaguacaucgacaucgggaacuacaccguguccugccugccguucaccaucaacugccaggagcccaagcugggcagccucgucgugcgcugcuccuucuacgaggacuuccuggaguaccacgacgugcgggucgugcuggacuucaucugaggacuaguuauaagacugacuagcccgaugggccucccaacgggcccuccuccccuccuugcaccgagauuaauaaaaaaaaaaaaaaaaaaaaaaaaaaaaaaaaaaaaaaaaaaaaaaaaaaaaaaaaaaaaaaaaugcaucccccccccccccccccccccccccccccccaaaggcucuuuucagagccaccagaauu

SEQ ID NO: 22635 - RNA, 583 nt, Artificial Sequence
  SARS-CoV-2__MT913109.1__ORF8 protein mRNA gc
aggagaaagcuuaccaugaaguuccugguguuccucggcaucaucaccaccgucgccgccuuccaccaggagugcagccugcaguccugcacgcagcaccagcccuacgugguggacgacagcugcccgauccacuucuacuccaagugguacauccgcgucggggcccgcaagagcgcgccccugaucgagcucugcguggacgaggccggcuccaagagccccauccaguacaucgacaucgggaacuacaccguguccugccugcccuucaccaucaacugccaggagccgaagcugggcagccucgucgugcggugcuccuucuacgaggacuuccuggaguaccacgacgugcgggucgugcuggacuucaucugaggacuaguuauaagacugacuagcccgaugggccucccaacgggcccuccuccccuccuugcaccgagauuaauaaaaaaaaaaaaaaaaaaaaaaaaaaaaaaaaaaaaaaaaaaaaaaaaaaaaaaaaaaaaaaaaugcaucccccccccccccccccccccccccccccccaaaggcucuuuucagagccaccagaauu

SEQ ID NO: 22636 - RNA, 583 nt, Artificial Sequence
  SARS-CoV-2__MT911807.1__ORF8 protein mRNA gc
aggagaaagcuuaccaugaaguuccugguguuccucggcaucaucaccaccgucgccgccuuccaccaggagugcagccugcaguccugcacgcagcaccagcccuacgugguggacgacccgugccccauccacuucuacagcaagugguacauccgcgucggggcccggaaguccgcgccccugaucgagcucugcguggacgaggccggcagcaagucccccauccaguacaucgacaucgggaacuacaccgugagcugccugccguucaccaucaacugccaggagcccaagcugggcucccucgucgugcgcugcagcuucuacgaggacuuccugggguaccacgacgugcgggucgugcuggacuucaucugaggacuaguuauaagacugacuagcccgaugggccucccaacgggcccuccuccccuccuugcaccgagauuaauaaaaaaaaaaaaaaaaaaaaaaaaaaaaaaaaaaaaaaaaaaaaaaaaaaaaaaaaaaaaaaaaugcaucccccccccccccccccccccccccccccccaaaggcucuuuucagagccaccagaauu

SEQ ID NO: 22637 - RNA, 583 nt, Artificial Sequence
  SARS-CoV-2__MT893659.1__ORF8 protein mRNA gc
aggagaaagcuuaccaugaaguuccugguguuccucggcaucaucaccaccgucgccgccuuccaccaggagugcagccugcaguccugcacgcagcaccagcccuacgugguggacgacccgugccccauccacuucuacagcaagugguacauccgcgucggggcccggaaguccgcgccccugaucgagcucugcguggacgaggugggcagcaagucccccauccaguacaucgacaucgggaacuacaccgucagcugccugccguucaccaucaacugccaggagcccaagcugggcucccucguggugcgcugcagcuucuacgaggacuuccuggaguaccacgacguccggguggugcuggacuucaucugaggacuaguuauaagacugacuagcccgaugggccucccaacgggcccuccuccccuccuugcaccgagauuaauaaaaaaaaaaaaaaaaaaaaaaaaaaaaaaaaaaaaaaaaaaaaaaaaaaaaaaaaaaaaaaaaugcaucccccccccccccccccccccccccccccccaaaggcucuuuucagagccaccagaauu

SEQ ID NO: 22638 - RNA, 583 nt, Artificial Sequence
  SARS-CoV-2__MT893685.1__ORF8 protein mRNA gc
aggagaaagcuuaccaugaaguuccugguguuccucggcaucaucaccaccgucgccgccuuccaccaggagugcagccugcaguccugcacgcagcaccagcccuacgugguggacgacccgugccccauccacuucuacagcaaguggcacauccgcgucggggcccggaaguccgcgccccugaucgagcucugcguggacgaggccggcagcaagucccccauccaguacaucgacaucgggaacuacaccgugagcugccugccguucaccaucaacugccaggagcccaagcugggcucccucgucgugcgcugcagcuucuacgaggacuuccuggaguaccacgacgugcgggucgugcuggacuucaucugaggacuaguuauaagacugacuagcccgaugggccucccaacgggcccuccuccccuccuugcaccgagauuaauaaaaaaaaaaaaaaaaaaaaaaaaaaaaaaaaaaaaaaaaaaaaaaaaaaaaaaaaaaaaaaaaugcaucccccccccccccccccccccccccccccccaaaggcucuuuucagagccaccagaauu

SEQ ID NO: 22639 - RNA, 583 nt, Artificial Sequence
  SARS-CoV-2__MT890281.1__ORF8 protein mRNA gc
aggagaaagcuuaccaugaaguuccugguguuccucggcaucaucaccaccgucgccgccuuccaccaggagugcagccugcaguccugcacgcagcaccagcccuaccugguggacgacccgugccccauccacuucuacagcaagugguacauccgcgugggggcccggaaguccgcgccccucaucgagcugugcgucgacgaggccggcagcaagucccccauccaguacaucgacaucgggaacuacaccgugagcugccugccguucaccaucaacugccaggagcccaagcucggcucccuggugguccgcugcagcuucuacgaggacuuccuggaguaccacgacgugcgggugguccucgacuucaucugaggacuaguuauaagacugacuagcccgaugggccucccaacgggcccuccuccccuccuugcaccgagauuaauaaaaaaaaaaaaaaaaaaaaaaaaaaaaaaaaaaaaaaaaaaaaaaaaaaaaaaaaaaaaaaaaugcaucccccccccccccccccccccccccccccccaaaggcucuuuucagagccaccagaauu

SEQ ID NO: 22640 - RNA, 583 nt, Artificial Sequence
  SARS-CoV-2__MT890301.1__ORF8 protein mRNA gc
aggagaaagcuuaccaugaaguuccugguguuccucggcaucaucaccaccgucgccgccuuccaccaggagugcagccugcaguccugcacgcagcaccagcccuacgugguggacgacccgugccccauccacuucuacagcaagugguacauccgcgucggggcccggaaguccgcgccccugaucgagcucugcguggacgagcccggcagcaaguccccgauccaguacaucgacaucgggaacuacaccgugagcugccugcccuucaccaucaacugccaggagcccaagcugggcucccucgucgugcgcugcagcuucuacgaggacuuccuggaguaccacgacgugcgggucgugcuggacuucaucugaggacuaguuauaagacugacuagcccgaugggccucccaacgggcccuccuccccuccuugcaccgagauuaauaaaaaaaaaaaaaaaaaaaaaaaaaaaaaaaaaaaaaaaaaaaaaaaaaaaaaaaaaaaaaaaaugcaucccccccccccccccccccccccccccccccaaaggcucuuuucagagccaccagaauu

SEQ ID NO: 22641 - RNA, 583 nt, Artificial Sequence
  SARS-CoV-2__MT883499.1__ORF8 protein mRNA gc
aggagaaagcuuaccaugaaguuccugguguuccucggcaucaucaccaccgucgccgccuuccaccaggagugcagccugcaguccugcacgcagcaccagcccuacgugguggacgacccgugccccauccacuucuacagcaagugguacauccgcgucggggcgcggaaguccgugccccugaucgagcucugcguggacgaggccggcagcaagucccccauccaguacaucgacaucgggaacuacaccgucagcugccugccguucaccaucaacugccaggagcccaagcugggcucccucguggugcgcugcagcuucuacgaggacuuccuggaguaccacgacguccggguggugcuggacuucaucugaggacuaguuauaagacugacuagcccgaugggccucccaacgggcccuccuccccuccuugcaccgagauuaauaaaaaaaaaaaaaaaaaaaaaaaaaaaaaaaaaaaaaaaaaaaaaaaaaaaaaaaaaaaaaaaaugcaucccccccccccccccccccccccccccccccaaaggcucuuuucagagccaccagaauu

SEQ ID NO: 22642 - RNA, 583 nt, Artificial Sequence
  SARS-CoV-2__MT883503.1__ORF8 protein mRNA gc
aggagaaagcuuaccaugaaguuccugguguuccucggcaucaucaccaccgucgccgccuuccaccaggagugcagccugcaguccugcacgcagcaccagcccuacgugguggacgacccgugccccauccacuucuacagcaagugguacauccgcgucggggcccggaaguccgcgccccugaucgagcucugccuggacgaggccggcagcaagucccccauccaguacaucgacaucgggaacuacaccgugagcugccugccguucaccaucaacugccaggagcccaagcucggcucccuggugguccgcugcagcuucuacgaggacuuccuggaguaccacgacgugcgggugguccucgacuucaucugaggacuaguuauaagacugacuagcccgaugggccucccaacgggcccuccuccccuccuugcaccgagauuaauaaaaaaaaaaaaaaaaaaaaaaaaaaaaaaaaaaaaaaaaaaaaaaaaaaaaaaaaaaaaaaaaugcaucccccccccccccccccccccccccccccccaaaggcucuuuucagagccaccagaauu

SEQ ID NO: 22643 - RNA, 595 nt, Artificial Sequence
  SARS-CoV-2__MT886367.1__ORF8 protein mRNA gc
aggagaaagcuuaccaugaaguuccugguguuccucggcaucaucaccaccgucgccgccuuccaccaggagugcagccugcaguccugcacgcagcaccagcccuacgugguggacgacccgugccccauccacuucuacagcaagugguacauccgcgucggggcccggaaguccgcgccccugaucgagcucugcguggacgaggccggcagcaagucccccauccaguacaucgacaucgggaacuacaccgugagcugcuccccguucaccaucaacugccaggagcccaagcugggcagccuggucgugcgcugcuccuucuacgaggacuuccucgaguaccacgacgugcgggucgugcuggacuucagcaagcgcaccaacugaggacuaguuauaagacugacuagcccgaugggccucccaacgggcccuccuccccuccuugcaccgagauuaauaaaaaaaaaaaaaaaaaaaaaaaaaaaaaaaaaaaaaaaaaaaaaaaaaaaaaaaaaaaaaaaaugcaucccccccccccccccccccccccccccccccaaaggcucuuuucagagccaccagaauu

SEQ ID NO: 22644 - RNA, 583 nt, Artificial Sequence
  SARS-CoV-2__MT873075.1__ORF8 protein mRNA gc
aggagaaagcuuaccaugaaguuccugguguuccucggcaucaucaccaccgucgccgccuuccaccaggagugcagccugcaguccuucacgcagcaccagcccuacgugguggacgacccgugccccauccacuucuacagcaagugguacauccgcgucggggcccggaaguccgcgccccugaucgagcucugcguggacgaggccggcagcaagucccccauccaguacaucgacaucgggaacuacaccgugagcugccugccguucaccaucaacugccaggagcccaagcugggcucccucgucgugcgcugcagcuucuacgaggacuuccuggaguaccacgacgugcgggucgugcuggacuucaucugaggacuaguuauaagacugacuagcccgaugggccucccaacgggcccuccuccccuccuugcaccgagauuaauaaaaaaaaaaaaaaaaaaaaaaaaaaaaaaaaaaaaaaaaaaaaaaaaaaaaaaaaaaaaaaaaugcaucccccccccccccccccccccccccccccccaaaggcucuuuucagagccaccagaauu

SEQ ID NO: 22645 - RNA, 583 nt, Artificial Sequence
  SARS-CoV-2__MT873148.1__ORF8 protein mRNA gc
aggagaaagcuuaccaugaaguuccugguguuccucggcaucaucaccaccgucgccgccuuccaccaggagugcauccugcagagcugcacgcagcaccagcccuacgugguggacgacccgugccccauccacuucuacuccaagugguacauccgcgucggggcccgcaagagcgcgccccugaucgagcucugcguggacgaggccggcuccaagagccccauccaguacaucgacaucgggaacuacaccguguccugccugccguucaccaucaacugccaggagcccaagcugggcagccucgucgugcggugcuccuucuacgaggacuuccuggaguaccacgacgugcgggucgugcuggacuucaucugaggacuaguuauaagacugacuagcccgaugggccucccaacgggcccuccuccccuccuugcaccgagauuaauaaaaaaaaaaaaaaaaaaaaaaaaaaaaaaaaaaaaaaaaaaaaaaaaaaaaaaaaaaaaaaaaugcaucccccccccccccccccccccccccccccccaaaggcucuuuucagagccaccagaauu

SEQ ID NO: 22646 - RNA, 583 nt, Artificial Sequence
  SARS-CoV-2__MT873152.1__ORF8 protein mRNA gc
aggagaaagcuuaccaugaaguuccugguguuccucggcaucaucaccaccgucgccgccuuccaccaggagugcagccugcaguccugcauccagcaccagcccuacgugguggacgacccgugccccauccacuucuacagcaagugguacauccgcgucggggcccggaaguccgcgccccugaucgagcucugcguggacgaggccggcagcaagucccccauccaguacaucgacaucgggaacuacacggugagcugccugccguucaccaucaacugccaggagcccaagcugggcucccucgucgugcgcugcagcuucuacgaggacuuccuggaguaccacgacgugcgggucgugcuggacuucaucugaggacuaguuauaagacugacuagcccgaugggccucccaacgggcccuccuccccuccuugcaccgagauuaauaaaaaaaaaaaaaaaaaaaaaaaaaaaaaaaaaaaaaaaaaaaaaaaaaaaaaaaaaaaaaaaaugcaucccccccccccccccccccccccccccccccaaaggcucuuuucagagccaccagaauu

SEQ ID NO: 22647 - RNA, 583 nt, Artificial Sequence
  SARS-CoV-2__MT873255.1__ORF8 protein mRNA gc
aggagaaagcuuaccaugaaguuccugguguuccucggcaucaucaccaccgucgccgccuuccaccaggagugcagccugcaguccugcacgcagcaccagcccuacgugguggacgacccgugccugauccacuucuacagcaagugguacauccgcgucggggcccggaaguccgcgccccucaucgagcugugcguggacgaggccggcagcaagucccccauccaguacaucgacaucgggaacuacaccgugagcugccugcccuucaccaucaacugccaggagccgaagcucggcucccuggucgugcgcugcagcuucuacgaggacuuccuggaguaccacgacgugcgggucgugcucgacuucaucugaggacuaguuauaagacugacuagcccgaugggccucccaacgggcccuccuccccuccuugcaccgagauuaauaaaaaaaaaaaaaaaaaaaaaaaaaaaaaaaaaaaaaaaaaaaaaaaaaaaaaaaaaaaaaaaaugcaucccccccccccccccccccccccccccccccaaaggcucuuuucagagccaccagaauu

SEQ ID NO: 22648 - RNA, 583 nt, Artificial Sequence
  SARS-CoV-2__MT873439.1__ORF8 protein mRNA gc
aggagaaagcuuaccaugaaguuccugguguuccucggcaucaucaccaccgucgccgccuuccaccaggagugcagccugcaguccugcacgcagcaccagcccuacgugguggacgacccgugccccauccacuucuacagcaagugguacauccgcgucggggcccggaaguccgcgccccugaucgagcucugcguggacgaggccggcagcaagucccccauccaguacaucgacaucgggaacuacaccgugagcugccugccguucaccaucaacugccaggagcccaagcugggcucccucgucgugcgcugcagcuucuacgaggacuuccuggaguaccacgacgugcgggucgugcuggaccucaucugaggacuaguuauaagacugacuagcccgaugggccucccaacgggcccuccuccccuccuugcaccgagauuaauaaaaaaaaaaaaaaaaaaaaaaaaaaaaaaaaaaaaaaaaaaaaaaaaaaaaaaaaaaaaaaaaugcaucccccccccccccccccccccccccccccccaaaggcucuuuucagagccaccagaauu

SEQ ID NO: 22649 - RNA, 583 nt, Artificial Sequence
  SARS-CoV-2__MT873503.1__ORF8 protein mRNA gc
aggagaaagcuuaccaugaaguuccugguguuccucggcaucaucaccaccgucacggccuuccaccaggagugcagccugcaguccugcacccagcaccagcccuacgugguggacgacccgugccccauccacuucuacagcaagugguacauccgcgucggggcccggaaguccgcgccccugaucgagcucugcguggacgaggccggcagcaagucccccauccaguacaucgacaucgggaacuacaccgugagcugccugccguucaccaucaacugccaggagcccaagcugggcucccucgucgugcgcugcagcuucuacgaggacuuccuggaguaccacgacgugcgggucgugcuggacuucaucugaggacuaguuauaagacugacuagcccgaugggccucccaacgggcccuccuccccuccuugcaccgagauuaauaaaaaaaaaaaaaaaaaaaaaaaaaaaaaaaaaaaaaaaaaaaaaaaaaaaaaaaaaaaaaaaaugcaucccccccccccccccccccccccccccccccaaaggcucuuuucagagccaccagaauu

SEQ ID NO: 22650 - RNA, 583 nt, Artificial Sequence
  SARS-CoV-2__MT873509.1__ORF8 protein mRNA gc
aggagaaagcuuaccaugaaguuccugguguuccucggcaucaucaccaccgucgccgccuuccaccaggagugcagccugcagcugugcacgcagcaccagcccuacgugguggacgacuccugcccgauccacuucuacagcaagugguacauccgcgucggggcccggaaguccgcgccccucaucgagcugugcguggacgaggccggcagcaagucccccauccaguacaucgacaucgggaacuacaccgugagcugccugcccuucaccaucaacugccaggagccgaagcucggcucccuggucgugcgcugcagcuucuacgaggacuuccuggaguaccacgacgugcgggucgugcucgacuucaucugaggacuaguuauaagacugacuagcccgaugggccucccaacgggcccuccuccccuccuugcaccgagauuaauaaaaaaaaaaaaaaaaaaaaaaaaaaaaaaaaaaaaaaaaaaaaaaaaaaaaaaaaaaaaaaaaugcaucccccccccccccccccccccccccccccccaaaggcucuuuucagagccaccagaauu

SEQ ID NO: 22651 - RNA, 583 nt, Artificial Sequence
  SARS-CoV-2__MT875354.1__ORF8 protein mRNA gc
aggagaaagcuuaccaugaaguuccugguguuccucggcaucaucaccaccgucgccgccuuccaccaggagugcagccugcaguccugcacgcagcaccagcccuacgugguggacgacccgugccccauccacuucuacagcaagugguacauccgcgucggggcccggaaguccgcgccccugaucgagcucugcguggacgaggccggcagcaagucccccauccaguacaucgacaucgggaacuacaccgugagcugccugccguucaccaucuacugccaggagcccaagcugggcucccucgucgugcgcugcagcuucuacgaggacuuccuggaguaccacgacgugcgggucgugcuggacuucaucugaggacuaguuauaagacugacuagcccgaugggccucccaacgggcccuccuccccuccuugcaccgagauuaauaaaaaaaaaaaaaaaaaaaaaaaaaaaaaaaaaaaaaaaaaaaaaaaaaaaaaaaaaaaaaaaaugcaucccccccccccccccccccccccccccccccaaaggcucuuuucagagccaccagaauu

SEQ ID NO: 22652 - RNA, 583 nt, Artificial Sequence
  SARS-CoV-2__MT876599.1__ORF8 protein mRNA gc
aggagaaagcuuaccaugaaguuccugguguuccucggcaucaucaccaccgucgccgccuuccaccaggagugcagccugcaguccugcacgcagcaccagcccuacgugguggacgacccgugccccguccacuucuacagcaagugguacauccgcgugggggcccggaaguccgcgccccugaucgagcucugcguggacgaggccggcagcaagucccccauccaguacaucgacaucgggaacuacaccgucagcugccugccguucaccaucaacugccaggagcccaagcugggcucccucguggugcgcugcagcuucuacgaggacuuccuggaguaccacgacguccggguggugcuggacuucaucugaggacuaguuauaagacugacuagcccgaugggccucccaacgggcccuccuccccuccuugcaccgagauuaauaaaaaaaaaaaaaaaaaaaaaaaaaaaaaaaaaaaaaaaaaaaaaaaaaaaaaaaaaaaaaaaaugcaucccccccccccccccccccccccccccccccaaaggcucuuuucagagccaccagaauu

SEQ ID NO: 22653 - RNA, 583 nt, Artificial Sequence
  SARS-CoV-2__MT872501.1__ORF8 protein mRNA gc
aggagaaagcuuaccaugaaguuccugguguuccucggcaucaucaccaccgucgccgccuucuaccaggagugcagccugcaguccugcacgcagcaccagcccuacgugguggacgacccgugccccauccacuucuacagcaagugguacauccgcgucggggcccggaaguccgcgccccugaucgagcucugcguggacgaggccggcagcaagucccccauccaguacaucgacaucgggaacuacaccgugagcugcuccccguucaccaucaacugccaggagcccaagcugggcagccuggucgugcgcugcuccuucuacgaggacuuccucgaguaccacgacgugcgggucgugcuggacuucaucugaggacuaguuauaagacugacuagcccgaugggccucccaacgggcccuccuccccuccuugcaccgagauuaauaaaaaaaaaaaaaaaaaaaaaaaaaaaaaaaaaaaaaaaaaaaaaaaaaaaaaaaaaaaaaaaaugcaucccccccccccccccccccccccccccccccaaaggcucuuuucagagccaccagaauu

SEQ ID NO: 22654 - RNA, 583 nt, Artificial Sequence
  SARS-CoV-2__MT846006.1__ORF8 protein mRNA gc
aggagaaagcuuaccaugaaguuccugguguuccucggcaucaucaccaccgucgccgccuuccaccaggagugcagccugcaguccugcacgcagcaccagcccuacgugguggacgacccgugccccauccacuucuacagcaagugguacauccgcgucggggcccggaaguccgcgccccugaucgagcucugcguggacgaggccggcagcaagucccccauccaguacaucgacaucgggaacuacaccgugagcugccugccguucaccaucaacugccaggagcccaaguucggcucccuggucgugcgcugcagcuucuacgaggacuuccucgaguaccacgacgugcgggucgugcuggacuucaucugaggacuaguuauaagacugacuagcccgaugggccucccaacgggcccuccuccccuccuugcaccgagauuaauaaaaaaaaaaaaaaaaaaaaaaaaaaaaaaaaaaaaaaaaaaaaaaaaaaaaaaaaaaaaaaaaugcaucccccccccccccccccccccccccccccccaaaggcucuuuucagagccaccagaauu

SEQ ID NO: 22655 - RNA, 583 nt, Artificial Sequence
  SARS-CoV-2__MT846007.1__ORF8 protein mRNA gc
aggagaaagcuuaccaugaaguuccugguguuccucggcaucaucaccaccgucgccgccuuccaccaggagugcagccugcaguccugcacgcagcaccagcccuacgugguggacgacccgugccccauccacuucuacagcaagugguacauccgcgucggggcccggaaguccgcgccccugaucgagcucugcguggacgaggccggcagcaagucccccauccaguacaucgacaucgggaacuacaccgugagcugccugccguucaccaucaacugccaggagcccaagcugggcucccucgucgugcgcugcagcuucuacgaggacuuccuggacuaccacgacgugcgggucgugcuggacuucaucugaggacuaguuauaagacugacuagcccgaugggccucccaacgggcccuccuccccuccuugcaccgagauuaauaaaaaaaaaaaaaaaaaaaaaaaaaaaaaaaaaaaaaaaaaaaaaaaaaaaaaaaaaaaaaaaaugcaucccccccccccccccccccccccccccccccaaaggcucuuuucagagccaccagaauu

SEQ ID NO: 22656 - RNA, 583 nt, Artificial Sequence
  SARS-CoV-2__MT846420.1__ORF8 protein mRNA gc
aggagaaagcuuaccaugaaguuccugguguuccucggcaucaucaccaccgucgccgccuuccaccaggagugcagccugcaguccugcacgcagcaccagcccuacgugguggacgacccgugccccauccacuucuacagcaagugguacauccgcgucggggcccggaaguccgcgccccugaucgagcucugcgugggcgaggccgggagcaagucccccauccaguacaucgacaucggcaacuacaccgugagcugcuccccguucaccaucaacugccaggagcccaagcuggggagccuggucgugcgcugcuccuucuacgaggacuuccucgaguaccacgacgugcgggucgugcuggacuucaucugaggacuaguuauaagacugacuagcccgaugggccucccaacgggcccuccuccccuccuugcaccgagauuaauaaaaaaaaaaaaaaaaaaaaaaaaaaaaaaaaaaaaaaaaaaaaaaaaaaaaaaaaaaaaaaaaugcaucccccccccccccccccccccccccccccccaaaggcucuuuucagagccaccagaauu

SEQ ID NO: 22657 - RNA, 583 nt, Artificial Sequence
  SARS-CoV-2__MT846452.1__ORF8 protein mRNA gc
aggagaaagcuuaccaugaaguuccugguguuccucggcaucaucaccaacgucgccgccuuccaccaggagugcagccugcaguccugcacccagcaccagcccuacgugguggacgacccgugccccauccacuucuacagcaagugguacauccgcgucggggcccggaaguccgcgccccugaucgagcucugcguggacgaggccggcagcaagucccccauccaguacaucgacaucgggaacuacacggugagcugccugccguucaccaucaacugccaggagcccaagcugggcucccucgucgugcgcugcagcuucuacgaggacuuccuggaguaccacgacgugcgggucgugcuggacuucaucugaggacuaguuauaagacugacuagcccgaugggccucccaacgggcccuccuccccuccuugcaccgagauuaauaaaaaaaaaaaaaaaaaaaaaaaaaaaaaaaaaaaaaaaaaaaaaaaaaaaaaaaaaaaaaaaaugcaucccccccccccccccccccccccccccccccaaaggcucuuuucagagccaccagaauu

SEQ ID NO: 22658 - RNA, 583 nt, Artificial Sequence
  SARS-CoV-2__MT846478.1__ORF8 protein mRNA gc
aggagaaagcuuaccaugaaguuccugguguuccuccgcaucaucaccaccgucgccgccuuccaccaggagugcagccugcaguccugcacgcagcaccagcccuacgugguggacuacccgugccccauccacuucuacagcaagugguacauccgggucggcgcccgcaaguccgcgccccugaucgagcucugcguggacgaggccgggagcaagucccccauccaguacaucgacaucggcaacuacaccgugagcugccugccguucaccaucaacugccaggagcccaagcuggggucccucgucgugcggugcagcuucuacgaggacuuccuggaguaccacgacgugcgcgucgugcuggacuucaucugaggacuaguuauaagacugacuagcccgaugggccucccaacgggcccuccuccccuccuugcaccgagauuaauaaaaaaaaaaaaaaaaaaaaaaaaaaaaaaaaaaaaaaaaaaaaaaaaaaaaaaaaaaaaaaaaugcaucccccccccccccccccccccccccccccccaaaggcucuuuucagagccaccagaauu

SEQ ID NO: 22659 - RNA, 583 nt, Artificial Sequence
  SARS-CoV-2__MT846647.1__ORF8 protein mRNA gc
aggagaaagcuuaccaugaaguuccugguguuccucggcaucaucaccaccgucgccgccuuccaccaggagugcagccugcaguccugcacgcagcaccagcccuacgugguggacgacccgugccccauccacuucuacagcaagugguacauccgcgucggggcccggaaguccgcgccccugaucgagagcugcguggacgaggccggcuccaagagccccauccaguacaucgacaucgggaacuacaccguguccugccucccguucaccaucaacugccaggagcccaagcugggcagccuggucgugcgcugcuccuucuacgaggacuuccucgaguaccacgacgugcgggucgugcuggacuucaucugaggacuaguuauaagacugacuagcccgaugggccucccaacgggcccuccuccccuccuugcaccgagauuaauaaaaaaaaaaaaaaaaaaaaaaaaaaaaaaaaaaaaaaaaaaaaaaaaaaaaaaaaaaaaaaaaugcaucccccccccccccccccccccccccccccccaaaggcucuuuucagagccaccagaauu

SEQ ID NO: 22660 - RNA, 583 nt, Artificial Sequence
  SARS-CoV-2__MT847226.1__ORF8 protein mRNA gc
aggagaaagcuuaccaugaaguuccugguguuccucggcaucaucaucaccgucgccgccuuccaccaggagugcagccugcaguccugcacccagcaccagcccuacgugguggacgacccgugccccauccacuucuacagcaagugguacauccgcgucggggcccggaaguccgcgccccugaucgagcucugcguggacgaggccggcagcaagucccccauccaguacaucgacaucgggaacuacacggugagcugccugccguucaccaucaacugccaggagcccaagcugggcucccucgucgugcgcugcagcuucuacgaggacuuccuggaguaccacgacgugcgggucgugcuggacuucaucugaggacuaguuauaagacugacuagcccgaugggccucccaacgggcccuccuccccuccuugcaccgagauuaauaaaaaaaaaaaaaaaaaaaaaaaaaaaaaaaaaaaaaaaaaaaaaaaaaaaaaaaaaaaaaaaaugcaucccccccccccccccccccccccccccccccaaaggcucuuuucagagccaccagaauu

SEQ ID NO: 22661 - RNA, 583 nt, Artificial Sequence
  SARS-CoV-2__MT843305.1__ORF8 protein mRNA gc
aggagaaagcuuaccaugaaguuccugguguuccucggcaucaucaccaccgucgccgccuuccaccaggagugcagccugcaguccugcacgcagcaccagcccuacguggugaacgacccgugccccauccacuucuacagcaagugguacauccgcgucggggcccggaaguccgcgccccugaucgagcucugcguggacgaggccggcagcaagucccccauccaguacaucgacaucgggaacuacaccgugagcugccugccguucaccaucaacugccaggagcccaagcugggcucccucgucgugcgcugcagcuucuacgaggacuuccuggaguaccacgacgugcgggucgugcuggacuucaucugaggacuaguuauaagacugacuagcccgaugggccucccaacgggcccuccuccccuccuugcaccgagauuaauaaaaaaaaaaaaaaaaaaaaaaaaaaaaaaaaaaaaaaaaaaaaaaaaaaaaaaaaaaaaaaaaugcaucccccccccccccccccccccccccccccccaaaggcucuuuucagagccaccagaauu

SEQ ID NO: 22662 - RNA, 583 nt, Artificial Sequence
  SARS-CoV-2__MT831123.1__ORF8 protein mRNA gc
aggagaaagcuuaccaugaaguucuucguguuccugggcaucaucaccaccgucgccgccuuccaccaggagugcagccuccaguccugcacgcagcaccagcccuacgugguggacgacccgugccccauccacuucuacagcaagugguacauccgcgucggggcccggaaguccgcgccccugaucgagcugugcgugaacgaggccggcagcaagucccccauccaguacaucgacaucgggaacuacaccgugagcugccucccguucaccaucaacugccaggagcccaagcugggcucccuggucgugcgcugcagcuucuacgaggacuuccucgaguaccacgacgugcgggucgugcuggacuucaucugaggacuaguuauaagacugacuagcccgaugggccucccaacgggcccuccuccccuccuugcaccgagauuaauaaaaaaaaaaaaaaaaaaaaaaaaaaaaaaaaaaaaaaaaaaaaaaaaaaaaaaaaaaaaaaaaugcaucccccccccccccccccccccccccccccccaaaggcucuuuucagagccaccagaauu

SEQ ID NO: 22663 - RNA, 583 nt, Artificial Sequence
  SARS-CoV-2__MT831186.1__ORF8 protein mRNA gc
aggagaaagcuuaccaugaaguuccugguguuccucggcaucaucaccaccgucgccgccuuccaccaggagugcagccugcaguccugcacgcagcaccagcccuacgugguggacgacccgugccccauccacuucuacagcaagugguacauccgcgucggggccaucaaguccgcgccccugaucgagcucugcguggacgaggccggcagcaagucccccauccaguacaucgacaucgggaacuacaccgugagcugccugccguucaccaucaacugccaggagcccaagcugggcucccucgucgugcggugcagcuucuacgaggacuuccuggaguaccacgacgugcgcgucgugcuggacuucaucugaggacuaguuauaagacugacuagcccgaugggccucccaacgggcccuccuccccuccuugcaccgagauuaauaaaaaaaaaaaaaaaaaaaaaaaaaaaaaaaaaaaaaaaaaaaaaaaaaaaaaaaaaaaaaaaaugcaucccccccccccccccccccccccccccccccaaaggcucuuuucagagccaccagaauu

SEQ ID NO: 22664 - RNA, 583 nt, Artificial Sequence
  SARS-CoV-2__MT831227.1__ORF8 protein mRNA gc
aggagaaagcuuaccaugaaguuccugguguuccucggcaucaucaccaccgucgccgccuuccaccaggagugcagccugcaguccugcacgcagcaccagcccuacgugguggacgacccgagccccauccacuucuacuccaagugguacauccgcgucggggcccgcaagagcgcgccccugaucgagcucugcguggacgaggccggcuccaagagccccauccaguacaucgacaucgggaacuacaccguguccugccugccguucaccaucaacugccaggagcccaagcugggcagccucgucgugcggugcuccuucuacgaggacuuccuggaguaccacgacgugcgggucgugcuggacuucaucugaggacuaguuauaagacugacuagcccgaugggccucccaacgggcccuccuccccuccuugcaccgagauuaauaaaaaaaaaaaaaaaaaaaaaaaaaaaaaaaaaaaaaaaaaaaaaaaaaaaaaaaaaaaaaaaaugcaucccccccccccccccccccccccccccccccaaaggcucuuuucagagccaccagaauu

SEQ ID NO: 22665 - RNA, 583 nt, Artificial Sequence
  SARS-CoV-2__MT831230.1__ORF8 protein mRNA gc
aggagaaagcuuaccaugaaguuccugguguuccucggcaucaucaccaccgucgccgccuuccaccaggagugcagccugcaguccugcacgcagcaccagcccuacgugguggacgacccgugccccauccacuucuacagcaagugguacauccgcgucggggcccggaaguccgcgccccugaucgagcucugcgugaacgaggccggcagcaagucccccauccaguacaucgacaucgggaacuacaccgugagcugccugccguucaccaucaacugccaggagcccaagcugggcucccucgucgugcgcugcagcuucuacgaggacuuccuggaguaccacgacgugcgggucgugcuggacuucaucugaggacuaguuauaagacugacuagcccgaugggccucccaacgggcccuccuccccuccuugcaccgagauuaauaaaaaaaaaaaaaaaaaaaaaaaaaaaaaaaaaaaaaaaaaaaaaaaaaaaaaaaaaaaaaaaaugcaucccccccccccccccccccccccccccccccaaaggcucuuuucagagccaccagaauu

SEQ ID NO: 22666 - RNA, 583 nt, Artificial Sequence
  SARS-CoV-2__MT831282.1__ORF8 protein mRNA gc
aggagaaagcuuaccaugaaguuccugguguuccucggcaucaucaccaccgucgccgccuuccaccaggacugcagccugcaguccugcacgcagcaccagcccuacgugguggacgacccgugccccauccacuucuacagcaagugguacauccgcgucggggcccggaaguccgcgccccugaucgagcucugcguggacgaggccggcagcaagucccccauccaguacaucgacaucgggaacuacaccgugagcugcuccccguucaccaucaacugccaggagcccaagcugggcagccuggucgugcgcugcuccuucuacgaggacuuccucgaguaccacgacgugcgggucgugcuggacuucaucugaggacuaguuauaagacugacuagcccgaugggccucccaacgggcccuccuccccuccuugcaccgagauuaauaaaaaaaaaaaaaaaaaaaaaaaaaaaaaaaaaaaaaaaaaaaaaaaaaaaaaaaaaaaaaaaaugcaucccccccccccccccccccccccccccccccaaaggcucuuuucagagccaccagaauu

SEQ ID NO: 22667 - RNA, 583 nt, Artificial Sequence
  SARS-CoV-2__MT831623.1__ORF8 protein mRNA gc
aggagaaagcuuaccaugaaguuccugguguuccucggcaucaucaccaccgucgccgccuuccaccaggagugcagccugcaguccugcacgcagcaccagcccuacgugguggacgacccgugccccauccacuucuacagcaagugguacauccgcgucggggugcggaaguccgcgccccugaucgagcucugcguggacgaggccggcagcaagucccccauccaguacaucgacaucgggaacuacaccgucagcugccugccguucaccaucaacugccaggagcccaagcugggcucccucguggugcgcugcagcuucuacgaggacuuccuggaguaccacgacguccggguggugcuggacuucaucugaggacuaguuauaagacugacuagcccgaugggccucccaacgggcccuccuccccuccuugcaccgagauuaauaaaaaaaaaaaaaaaaaaaaaaaaaaaaaaaaaaaaaaaaaaaaaaaaaaaaaaaaaaaaaaaaugcaucccccccccccccccccccccccccccccccaaaggcucuuuucagagccaccagaauu

SEQ ID NO: 22668 - RNA, 583 nt, Artificial Sequence
  SARS-CoV-2__MT831735.1__ORF8 protein mRNA gc
aggagaaagcuuaccaugaaguuccugguguuccucggcaucaucaccaccgucgccgccuuccaccaggagugcagccugcaguccugcacgcagcaccagcccuacgugguggacgacccgugccccauccacuucuacagcaagugcuacauccgcgucggggcccggaaguccgcgccccugaucgagcucugcguggacgaggccggcagcaagucccccauccaguacaucgacaucgggaacuacaccgugagcugccugccguucaccaucaacugccaggagcccaagcugggcucccucgucgugcgcugcagcuucuacgaggacuuccuggaguaccacgacgugcgggucgugcuggacuucaucugaggacuaguuauaagacugacuagcccgaugggccucccaacgggcccuccuccccuccuugcaccgagauuaauaaaaaaaaaaaaaaaaaaaaaaaaaaaaaaaaaaaaaaaaaaaaaaaaaaaaaaaaaaaaaaaaugcaucccccccccccccccccccccccccccccccaaaggcucuuuucagagccaccagaauu

SEQ ID NO: 22669 - RNA, 583 nt, Artificial Sequence
  SARS-CoV-2__MT831739.1__ORF8 protein mRNA gc
aggagaaagcuuaccaugaaguuccugguguuccucggcaucaucaccaccgucgccgccuuccaccaggagugcagccugcaguccugcacgcagcaccagcccuacgugguggacgacccgugccccauccacuucuacagcaagugguacauccgcgucggggcccggaaguccgcgccccugaucgagcucugcguggacgaggccggcagcaagucccccauccaguacaucgacaucgggaacuacaccgugagcugccugccguucaccaucaacugccaggagcccaagcugggcaaccucgucgugcgcugcuccuucuacgaggacuuccuggaguaccacgacgugcgggucgugcuggacuucaucugaggacuaguuauaagacugacuagcccgaugggccucccaacgggcccuccuccccuccuugcaccgagauuaauaaaaaaaaaaaaaaaaaaaaaaaaaaaaaaaaaaaaaaaaaaaaaaaaaaaaaaaaaaaaaaaaugcaucccccccccccccccccccccccccccccccaaaggcucuuuucagagccaccagaauu

SEQ ID NO: 22670 - RNA, 583 nt, Artificial Sequence
  SARS-CoV-2__MT831821.1__ORF8 protein mRNA gc
aggagaaagcuuaccaugaaguuccugguguuccucggcaucaucaccaccgucgccgccuuccaccaggagugcagccugcaguccugcacgcagcaccagcccuacgugguggacgacccguuccccauccacuucuacagcaagugguacauccgcgucggggcccggaaguccgcgccccugaucgagcucugcguggacgaggccggcagcaagucccccauccaguacaucgacaucgggaacuacaccgugagcugccugccguucaccaucaacugccaggagcccaagcugggcucccucgucgugcgcugcagcuucuacgaggacuuccuggaguaccacgacgugcgggucgugcuggacuucaucugaggacuaguuauaagacugacuagcccgaugggccucccaacgggcccuccuccccuccuugcaccgagauuaauaaaaaaaaaaaaaaaaaaaaaaaaaaaaaaaaaaaaaaaaaaaaaaaaaaaaaaaaaaaaaaaaugcaucccccccccccccccccccccccccccccccaaaggcucuuuucagagccaccagaauu

SEQ ID NO: 22671 - RNA, 583 nt, Artificial Sequence
  SARS-CoV-2__MT833958.1__ORF8 protein mRNA gc
aggagaaagcuuaccaugaaguuccugguguuccucggcaucaucaccaccgucgccgccuuccaccaggagugcagccugcaguccugcacgcagcaccagcccuacgugguggacgacccgugccccauccacuucuacagcaagugguacauccgcgucggggcccggaaguccgcgccccugaucgagcucugcguggacgaggccggcagcaagucccccauccacuacaucgacaucgggaacuacaccgugagcugccugccguucaccaucaacugccaggagcccaagcugggcucccucgucgugcgcugcagcuucuacgaggacuuccuggaguaccacgacgugcgggucgugcuggacuucaucugaggacuaguuauaagacugacuagcccgaugggccucccaacgggcccuccuccccuccuugcaccgagauuaauaaaaaaaaaaaaaaaaaaaaaaaaaaaaaaaaaaaaaaaaaaaaaaaaaaaaaaaaaaaaaaaaugcaucccccccccccccccccccccccccccccccaaaggcucuuuucagagccaccagaauu

SEQ ID NO: 22672 - RNA, 583 nt, Artificial Sequence
  SARS-CoV-2__MT834344.1__ORF8 protein mRNA gc
aggagaaagcuuaccaugaaguuccugguguuccucggcaucaucaccaccgucgccgccuuccaccaggagugcagccugcaguccugcacgcagcaccagcccuacgugguggacgacccgugccccauccacuucuacagcaagugguacauccgcgucggggcccggaaguccgcgccccugaucgagcucugcguggacgaggccggcagcaagucccccauccaguacaucgacaucgggaacuacaccgugagcugccugccguucaccaucaacugccaggagcugaagcucggcucccuggucgugcgcugcagcuucuacgaggacuuccuggaguaccacgacgugcgggucgugcucgacuucaucugaggacuaguuauaagacugacuagcccgaugggccucccaacgggcccuccuccccuccuugcaccgagauuaauaaaaaaaaaaaaaaaaaaaaaaaaaaaaaaaaaaaaaaaaaaaaaaaaaaaaaaaaaaaaaaaaugcaucccccccccccccccccccccccccccccccaaaggcucuuuucagagccaccagaauu

SEQ ID NO: 22673 - RNA, 583 nt, Artificial Sequence
  SARS-CoV-2__MT834622.1__ORF8 protein mRNA gc
aggagaaagcuuaccaugaaguuccugguguuccuccgcaucaucaccaccgucgccgccuuccaccaggagugcagccugcaguccugcacgcagcaccagcccuacgugguggacgacccgugccccauccacuucuacagcaagugguacauccgggucggcgcccgcaaguccgcgccccugaucgagcucugcguggacgaggccgggagcaagucccccauccaguacaucgacaucggcaacuacaccgugagcugccugccguucaccaucaacugccaggagcccaagcuggggucccucgucgugcggugcagcuucuacgaggacuuccuggaguaccacgacgugcgcgucgugcuggacuucaucugaggacuaguuauaagacugacuagcccgaugggccucccaacgggcccuccuccccuccuugcaccgagauuaauaaaaaaaaaaaaaaaaaaaaaaaaaaaaaaaaaaaaaaaaaaaaaaaaaaaaaaaaaaaaaaaaugcaucccccccccccccccccccccccccccccccaaaggcucuuuucagagccaccagaauu

SEQ ID NO: 22674 - RNA, 583 nt, Artificial Sequence
  SARS-CoV-2__MT834647.1__ORF8 protein mRNA gc
aggagaaagcuuaccaugaaguuccugguguuccucggcaucaucaccaccgucgccgccuuccaccaggagugcagccugcaguccugcacgcagcaccagcccuacgugguggacgacccgugccccauccacuucuacagcaagugguacauccgcgucggggcccggaaguccgcgccccugaucgagcucugcguggacgaggccggcagcaagucccccauccaguacaucgacaucgggaacuacaccgugagcugcuccccguucaccaucaacugccaggagcccaagcugggcagccuggucgugcgcugcuccagcuacgaggacuuccucgaguaccacgacgugcgggucgugcuggacuucaucugaggacuaguuauaagacugacuagcccgaugggccucccaacgggcccuccuccccuccuugcaccgagauuaauaaaaaaaaaaaaaaaaaaaaaaaaaaaaaaaaaaaaaaaaaaaaaaaaaaaaaaaaaaaaaaaaugcaucccccccccccccccccccccccccccccccaaaggcucuuuucagagccaccagaauu

SEQ ID NO: 22675 - RNA, 583 nt, Artificial Sequence
  SARS-CoV-2__MT827821.1__ORF8 protein mRNA gc
aggagaaagcuuaccaugaaguuccuguucuuccucggcaucaucaccaccguggccgccuuccaccaggagugcagccugcaguccugcacgcagcaccagcccuacgucguggacgacccgugccccauccacuucuacagcaagugguacauccgcgugggggcccggaaguccgcgccccugaucgagcucugcgucgacgaggccggcagcaagucccccauccaguacaucgacaucgggaacuacaccgugagcugcuccccguucaccaucaacugccaggagcccaagcugggcagccuggugguccgcugcuccuucuacgaggacuuccucgaguaccacgacgugcgggugguccuggacuucaucugaggacuaguuauaagacugacuagcccgaugggccucccaacgggcccuccuccccuccuugcaccgagauuaauaaaaaaaaaaaaaaaaaaaaaaaaaaaaaaaaaaaaaaaaaaaaaaaaaaaaaaaaaaaaaaaaugcaucccccccccccccccccccccccccccccccaaaggcucuuuucagagccaccagaauu

SEQ ID NO: 22676 - RNA, 583 nt, Artificial Sequence
  SARS-CoV-2__MT825091.1__ORF8 protein mRNA gc
aggagaaagcuuaccaugaaguuccugguguuccucggcaucaucaccaccgucgccgccuuccaccaggagugcagccugcaguccugcacgcagcaccagcccuacgugguggacgacccgugccccauccacuucuacagcaagugguacauccgcgucggggcccggaaguccgcgccccugaucgagcucugcauggacgaggccggcagcaagucccccauccaguacaucgacaucgggaacuacaccgugagcugccugccguucaccaucaacugccaggagcccaagcugggcucccucgugguccgcugcagcuucuacgaggacuuccuggaguaccacgacgugcgggugguccuggacuucaucugaggacuaguuauaagacugacuagcccgaugggccucccaacgggcccuccuccccuccuugcaccgagauuaauaaaaaaaaaaaaaaaaaaaaaaaaaaaaaaaaaaaaaaaaaaaaaaaaaaaaaaaaaaaaaaaaugcaucccccccccccccccccccccccccccccccaaaggcucuuuucagagccaccagaauu

SEQ ID NO: 22677 - RNA, 583 nt, Artificial Sequence
  SARS-CoV-2__MT821566.1__ORF8 protein mRNA gc
aggagaaagcuuaccaugaaguuccugguguucuucggcaucaucaccaccgucgccgccuuccaccaggagugcagccuccaguccugcacgcagcaccagcccuacgugguggacgacccgugccccauccacuucuacagcaagugguacauccgcgucggggcccggaaguccgcgccccugaucgagcugugcguggacgaggccggcagcaagucccccauccaguacaucgacaucgggaacuacaccgugagcugccucccguucaccaucaacugccaggagcccaagcugggcucccuggucgugcgcugcagcuucuacgaggacuuccucgaguaccacgacgugcgggucgugcuggacuucaucugaggacuaguuauaagacugacuagcccgaugggccucccaacgggcccuccuccccuccuugcaccgagauuaauaaaaaaaaaaaaaaaaaaaaaaaaaaaaaaaaaaaaaaaaaaaaaaaaaaaaaaaaaaaaaaaaugcaucccccccccccccccccccccccccccccccaaaggcucuuuucagagccaccagaauu

SEQ ID NO: 22678 - RNA, 583 nt, Artificial Sequence
  SARS-CoV-2__MT821663.1__ORF8 protein mRNA gc
aggagaaagcuuaccaugaaguuccugguguuccucggcaucaucaucaccgucgccgccuuccaccaggagugcagccugcaguccugcacccagcaccagcccuacgugguggacgacccgugccccauccacuucuacagcaagugguacauccgcgucggggcccggaaguccgcgccccugaucgagcucugcguggacgaggccggcagcaagucccccauccaguacaucgacaucgggaacuacacggugagcugcuccccguucaccaucaacugccaggagcccaagcugggcagccuggucgugcgcugcuccuucuacgaggacuuccucgaguaccacgacgugcgggucgugcuggacuucaucugaggacuaguuauaagacugacuagcccgaugggccucccaacgggcccuccuccccuccuugcaccgagauuaauaaaaaaaaaaaaaaaaaaaaaaaaaaaaaaaaaaaaaaaaaaaaaaaaaaaaaaaaaaaaaaaaugcaucccccccccccccccccccccccccccccccaaaggcucuuuucagagccaccagaauu

SEQ ID NO: 22679 - RNA, 583 nt, Artificial Sequence
  SARS-CoV-2__MT821773.1__ORF8 protein mRNA gc
aggagaaagcuuaccaugaaguuccugguguuccucggcaucaucaccaccgucgccgccuuccaccaggagugcagccugcaguccugcacgcagcaccagcccuacgugguggacgacccgugccccauccacuucuacagcaagugguacauccgcgucggggcccggaaguccgcgccccugaucgagcucugcguggacgaggccggcagcaagucccccauccaguacaucgacaucgggaacuacaccgugagcugcuccccguucaccaucaacugccaggagcccaagcugggcagccuggucgugcgcugcuccuucuacgaggacuuccuccaguaccacgacgugcgggucgugcuggacuucaucugaggacuaguuauaagacugacuagcccgaugggccucccaacgggcccuccuccccuccuugcaccgagauuaauaaaaaaaaaaaaaaaaaaaaaaaaaaaaaaaaaaaaaaaaaaaaaaaaaaaaaaaaaaaaaaaaugcaucccccccccccccccccccccccccccccccaaaggcucuuuucagagccaccagaauu

SEQ ID NO: 22680 - RNA, 583 nt, Artificial Sequence
  SARS-CoV-2__MT810566.1__ORF8 protein mRNA gc
aggagaaagcuuaccaugaaguuccugguguuccucggcaucaucaccaccgucgccgccuuccaccaggagugcagccugcaguccugcacgcagcaccagcccuacgugguggacgacccgugccccauccacuucuacagcaagugguacauccgcgucggggcccggaaguccgcgccccugaucgagcucugcguggacgaggccggcagcaagucccccauccaguacaucgacaucgggaacuacaccgccagcugccugccguucaccaucaacugccaggagcccaagcugggcucccucgugguccgcugcagcuucuacgaggacuuccuggaguaccacgacgugcgggugguccuggacuucaucugaggacuaguuauaagacugacuagcccgaugggccucccaacgggcccuccuccccuccuugcaccgagauuaauaaaaaaaaaaaaaaaaaaaaaaaaaaaaaaaaaaaaaaaaaaaaaaaaaaaaaaaaaaaaaaaaugcaucccccccccccccccccccccccccccccccaaaggcucuuuucagagccaccagaauu

SEQ ID NO: 22681 - RNA, 583 nt, Artificial Sequence
  SARS-CoV-2__MT810601.1__ORF8 protein mRNA gc
aggagaaagcuuaccaugaaguuccugguguuccucggcaucaucaccaccgucgccgccuuccaccaggagugcagccugcaguccugcacgcagcaccagcccuacgugguggacgacccgugccccauccacuucuacagcaagugguacauccgcgucggggcccggaaguccgcgccccugaucgagcucugcguggacgaggccggcagcaagucccccauccaguacaucgacaucgggaacuacaccgugagcugccugccguucaccaucaacugccaggagcccaagcugugcucccucgucgugcgcugcagcuucuacgaggacuuccuggaguaccacgacgugcgggucgugcuggacuucaucugaggacuaguuauaagacugacuagcccgaugggccucccaacgggcccuccuccccuccuugcaccgagauuaauaaaaaaaaaaaaaaaaaaaaaaaaaaaaaaaaaaaaaaaaaaaaaaaaaaaaaaaaaaaaaaaaugcaucccccccccccccccccccccccccccccccaaaggcucuuuucagagccaccagaauu

SEQ ID NO: 22682 - RNA, 583 nt, Artificial Sequence
  SARS-CoV-2__MT810624.1__ORF8 protein mRNA gc
aggagaaagcuuaccaugaaguucuucguguuccugggcaucaucaccaccgucgccgccuuccaccaggagugcagccuccaguccugcacgcagcaccagcccuacgugguggacgacccgugccccauccacuucuacagcaagugguacauccgcgucggggcccggaaguccgcgccccugaucgagcugugcguggacgaggccggcagcaagucccccauccaguacaucgacaucgggaacuacaccgugagcugccucccguucaccaucaacugccaggagcccaagcugggcucccuggucgugcgcugcagcuucuacgaggacuuccucgaguaccacgacgugcgggucgugcuggacuucaucugaggacuaguuauaagacugacuagcccgaugggccucccaacgggcccuccuccccuccuugcaccgagauuaauaaaaaaaaaaaaaaaaaaaaaaaaaaaaaaaaaaaaaaaaaaaaaaaaaaaaaaaaaaaaaaaaugcaucccccccccccccccccccccccccccccccaaaggcucuuuucagagccaccagaauu

SEQ ID NO: 22683 - RNA, 583 nt, Artificial Sequence
  SARS-CoV-2__MT811022.1__ORF8 protein mRNA gc
aggagaaagcuuaccaugaaguuccugguguuccucggcaucaucaccaccgucgccgccuuccaccaggagugcagccugcaguccugcacgcagcaccagcccuacgugguggacgacccgugccccauccacuucuacagcaagugguacauccgcgucggggcccggaaguccgcgccccugaucgagcucugcguggacgaggccggcagcaagucccccauccagcacaucgacaucgggaacuacaccgugagcugccugccguucaccaucaacugccaggagcccaagcugggcucccucgucgugcgcugcagcuucuacgaggacuuccuggaguaccacgacgugcgggucgugcuggacuucaucugaggacuaguuauaagacugacuagcccgaugggccucccaacgggcccuccuccccuccuugcaccgagauuaauaaaaaaaaaaaaaaaaaaaaaaaaaaaaaaaaaaaaaaaaaaaaaaaaaaaaaaaaaaaaaaaaugcaucccccccccccccccccccccccccccccccaaaggcucuuuucagagccaccagaauu

SEQ ID NO: 22684 - RNA, 583 nt, Artificial Sequence
  SARS-CoV-2__MT811486.1__ORF8 protein mRNA gc
aggagaaagcuuaccaugaaguuccugguguuccucggcaucaucaccaccgucgccgccuuccaccaggagugcagccugcaguccugcacgaagcaccagcccuacgugguggacgacccgugccccauccacuucuacagcaagugguacauccgcgucggggcccggaaguccgcgccccugaucgagcucugcguggacgaggccggcagcaagucccccauccaguacaucgacaucgggaacuacaccgugagcugccugccguucaccaucaacugccaggagcccaagcugggcucccucgucgugcgcugcagcuucuacgaggacuuccuggaguaccacgacgugcgggucgugcuggacuucaucugaggacuaguuauaagacugacuagcccgaugggccucccaacgggcccuccuccccuccuugcaccgagauuaauaaaaaaaaaaaaaaaaaaaaaaaaaaaaaaaaaaaaaaaaaaaaaaaaaaaaaaaaaaaaaaaaugcaucccccccccccccccccccccccccccccccaaaggcucuuuucagagccaccagaauu

SEQ ID NO: 22685 - RNA, 583 nt, Artificial Sequence
  SARS-CoV-2__MT811528.1__ORF8 protein mRNA gc
aggagaaagcuuaccaugaagauccugguguuccucggcaucaucaccaccgucgccgccuuccaccaggagugcagccugcaguccugcacgcagcaccagcccuacgugguggacgacccgugccccauccacuucuacagcaagugguacauccgcgucggggcccggaaguccgcgccccugaucgagcucugcguggacgaggccggcagcaagucccccauccaguacaucgacaucgggaacuacaccgugagcugccugccguucaccaucaacugccaggagcccaagcugggcucccucgucgugcgcugcagcuucuacgaggacuuccuggaguaccacgacgugcgggucgugcuggacuucaucugaggacuaguuauaagacugacuagcccgaugggccucccaacgggcccuccuccccuccuugcaccgagauuaauaaaaaaaaaaaaaaaaaaaaaaaaaaaaaaaaaaaaaaaaaaaaaaaaaaaaaaaaaaaaaaaaugcaucccccccccccccccccccccccccccccccaaaggcucuuuucagagccaccagaauu

SEQ ID NO: 22686 - RNA, 583 nt, Artificial Sequence
  SARS-CoV-2__MT811533.1__ORF8 protein mRNA gc
aggagaaagcuuaccaugaaguuccugguguuccucggcaucaucaccaccgucgccgccuuccaccaggagugcagccugcaguccugcacgcagcaccagcccuacgugguggacgacccgugccccauccacuucuacagcaagugguacauccgcgucggggcccggaaguccgcgccccugaucgagcucugcguggacgaggccggcagcaagucccccauccaguacaucgacaucgggaacuacaccgugagcugccugccguucaccaucaacugccaggagcccaagcugggcucccucgucgugcgcugcagcuucuacgaggacuuccuggaguaccacgacgugcgggucgugcuggacgugcucugaggacuaguuauaagacugacuagcccgaugggccucccaacgggcccuccuccccuccuugcaccgagauuaauaaaaaaaaaaaaaaaaaaaaaaaaaaaaaaaaaaaaaaaaaaaaaaaaaaaaaaaaaaaaaaaaugcaucccccccccccccccccccccccccccccccaaaggcucuuuucagagccaccagaauu

SEQ ID NO: 22687 - RNA, 583 nt, Artificial Sequence
  SARS-CoV-2__MT811534.1__ORF8 protein mRNA gc
aggagaaagcuuaccaugaaguuccugguguuccucggcaucaucaccaccgucgccgccuuccaccaggagugcagccugcaguccugcacgcagcaccagcccuacgugguggacgacccgugccccauccacuucuacagcaagugguacauccgcgucggggcccggaaguccgcgccccugaucgagcucugcguggacgaggccggcagcaagucccccauccaguacaucgacaucgggaacuacaccgugagcugccugccguucaccaucaacugccaggagcccaagcugggcucccucgucgugcgcugcagcuucuacgaggacuuccuggagugccacgacgugcgggucgugcuggacuucaucugaggacuaguuauaagacugacuagcccgaugggccucccaacgggcccuccuccccuccuugcaccgagauuaauaaaaaaaaaaaaaaaaaaaaaaaaaaaaaaaaaaaaaaaaaaaaaaaaaaaaaaaaaaaaaaaaugcaucccccccccccccccccccccccccccccccaaaggcucuuuucagagccaccagaauu

SEQ ID NO: 22688 - RNA, 583 nt, Artificial Sequence
  SARS-CoV-2__MT806884.1__ORF8 protein mRNA gc
aggagaaagcuuaccaugaaguuccugguguuccucggcaucaucaccaccgucgccgccuuccaccaggagugcagccugcagcugugcacgcagcaccagcccuacgugguggacgacccgugccccauccacuucuacuccaagugguacauccgcgucggggcccgcaagagcgcgccccucaucgagcugugcguggacgaggccggcuucaagucccccauccaguacaucgacaucgggaacuacaccgugagcugccugccguucaccaucaacugccaggagcccaagcucggcucccuggucgugcggugcagcuucuacgaggacuuccuggaguaccacgacgugcgggucgugcucgacuucaucugaggacuaguuauaagacugacuagcccgaugggccucccaacgggcccuccuccccuccuugcaccgagauuaauaaaaaaaaaaaaaaaaaaaaaaaaaaaaaaaaaaaaaaaaaaaaaaaaaaaaaaaaaaaaaaaaugcaucccccccccccccccccccccccccccccccaaaggcucuuuucagagccaccagaauu

SEQ ID NO: 22689 - RNA, 583 nt, Artificial Sequence
  SARS-CoV-2__MT800031.1__ORF8 protein mRNA gc
aggagaaagcuuaccaugaaguuccugguguuccucggcaucaucaccaccgucagcgccuuccaccaggagugcucccugcagagcugcacgcagcaccagcccuacgugguggacgacccgugccccauccacuucuacuccaagugguacauccgcgucggggcccgcaagagcgcgccccugaucgagcucugcguggacgaggccggcuccaagagccccauccaguacaucgacaucgggaacuacaccguguccugccugccguucaccaucaacugccaggagcccaagcugggcagccucgucgugcggugcuccuucuacgaggacuuccuggaguaccacgacgugcgggucgugcuggacuucaucugaggacuaguuauaagacugacuagcccgaugggccucccaacgggcccuccuccccuccuugcaccgagauuaauaaaaaaaaaaaaaaaaaaaaaaaaaaaaaaaaaaaaaaaaaaaaaaaaaaaaaaaaaaaaaaaaugcaucccccccccccccccccccccccccccccccaaaggcucuuuucagagccaccagaauu

SEQ ID NO: 22690 - RNA, 583 nt, Artificial Sequence
  SARS-CoV-2__MT795889.1__ORF8 protein mRNA gc
aggagaaagcuuaccaugaaguuccugguguuccucggcaucaucaccaccgucgccgccuuccaccaggagugcagccugcaguccugcacgcagcaccagcccuacguguucgacgacccgugccccauccacuucuacagcaagugguacauccgcgugggggcccggaaguccgcgccccugaucgagcucugcgucgacgaggccggcagcaagucccccauccaguacaucgacaucgggaacuacaccgugagcugccugccguucaccaucaacugccaggagcccaagcugggcucccucgugguccgcugcagcuucuacgaggacuuccuggaguaccacgacgugcgggugguccuggacuucaucugaggacuaguuauaagacugacuagcccgaugggccucccaacgggcccuccuccccuccuugcaccgagauuaauaaaaaaaaaaaaaaaaaaaaaaaaaaaaaaaaaaaaaaaaaaaaaaaaaaaaaaaaaaaaaaaaugcaucccccccccccccccccccccccccccccccaaaggcucuuuucagagccaccagaauu

SEQ ID NO: 22691 - RNA, 583 nt, Artificial Sequence
  SARS-CoV-2__MT791870.1__ORF8 protein mRNA gc
aggagaaagcuuaccaugaaguuccugguguuccucggcaucaucaccaccgucgccgccuuccaccaggagugcagccugcaguccugcacgcagcaccagcccuacgugguggacgacccgugccccauccacuucuacagcaagcuguacauccgcgucggggcccggaaguccgcgccccucaucgagcugugcguggacgaggccggcagcaagucccccauccaguacaucgacaucgggaacuacaccgugagcugccugccguucaccaucaacugccaggagcccaagcucggcucccuggucgugcgcugcagcuucuacgaggacuuccuggaguaccacgacgugcgggucgugcucgacuucaucugaggacuaguuauaagacugacuagcccgaugggccucccaacgggcccuccuccccuccuugcaccgagauuaauaaaaaaaaaaaaaaaaaaaaaaaaaaaaaaaaaaaaaaaaaaaaaaaaaaaaaaaaaaaaaaaaugcaucccccccccccccccccccccccccccccccaaaggcucuuuucagagccaccagaauu

SEQ ID NO: 22692 - RNA, 583 nt, Artificial Sequence
  SARS-CoV-2__MT786817.1__ORF8 protein mRNA gc
aggagaaagcuuaccaugaaguuccugguguuccucggcaucaucaccaccgucgccgccuuccaccaggagugcagccugcaguccugcacgcagcaccagcccuacgugguggacgacccgugccccauccacuucuacagcaagugguacauccgcgucggggccaagaaguccgcgccccugaucgagcucugcguggacgaggccggcagcaagucccccauccaguacaucgacaucgggaacuacaccgugagcugccugccguucaccaucaacugccaggagcccaagcugggcucccucgucgugcggugcagcuucuacgaggacuuccuggaguaccacgacgugcgcgucgugcuggacuucaucugaggacuaguuauaagacugacuagcccgaugggccucccaacgggcccuccuccccuccuugcaccgagauuaauaaaaaaaaaaaaaaaaaaaaaaaaaaaaaaaaaaaaaaaaaaaaaaaaaaaaaaaaaaaaaaaaugcaucccccccccccccccccccccccccccccccaaaggcucuuuucagagccaccagaauu

SEQ ID NO: 22693 - RNA, 556 nt, Artificial Sequence
  SARS-CoV-2__MT782382.1__ORF8 protein mRNA gc
aggagaaagcuuaccaugaaguuccugguguuccucggcaucaucaccaccgucgccgccuuccaccaggagugcagccugcaguccugcacgcagcaccagcccuacgugguggacgacccgugcauccgcgucggggcccgcaagagcgcgccccugaucgagcucugcguggacgaggccggcuccaagagccccauccaguacaucgacaucgggaacuacaccguguccugccugcccuucaccaucaacugccaggagccgaagcugggcagccucgucgugcggugcuccuucuacgaggacuuccuggaguaccacgacgugcgggucgugcuggacuucaucugaggacuaguuauaagacugacuagcccgaugggccucccaacgggcccuccuccccuccuugcaccgagauuaauaaaaaaaaaaaaaaaaaaaaaaaaaaaaaaaaaaaaaaaaaaaaaaaaaaaaaaaaaaaaaaaaugcaucccccccccccccccccccccccccccccccaaaggcucuuuucagagccaccagaauu

SEQ ID NO: 22694 - RNA, 583 nt, Artificial Sequence
  SARS-CoV-2__MT777677.1__ORF8 protein mRNA gc
aggagaaagcuuaccaugaaguuccugguguuccucggcaucaucaccaccgucgccgccuuccaccaggagugcagccugcaguccugcacgcagcaccagcccuacgugguggacuacccgugccccauccacuucuacagcaagugguacauccgcgucggggcccggaaguccgcgccccugaucgagcucugcguggacgaggccggcagcaagucccccauccaguacaucgacaucgggaacuacaccgugagcugccugccguucaccaucaacugccaggagcccaagcugggcucccucgucgugcgcugcagcuucuacgaggacuuccuggaguaccacgacgugcgggucgugcuggacuucaucugaggacuaguuauaagacugacuagcccgaugggccucccaacgggcccuccuccccuccuugcaccgagauuaauaaaaaaaaaaaaaaaaaaaaaaaaaaaaaaaaaaaaaaaaaaaaaaaaaaaaaaaaaaaaaaaaugcaucccccccccccccccccccccccccccccccaaaggcucuuuucagagccaccagaauu

SEQ ID NO: 22695 - RNA, 583 nt, Artificial Sequence
  SARS-CoV-2__MT757030.1__ORF8 protein mRNA gc
aggagaaagcuuaccaugaaguuccugguguuccucggcaucaucaccaccgucgccgcccugcaccaggagugcagccugcaguccugcacgcagcaccagcccuacgugguggacgacccgugccccauccacuucuacagcaagugguacauccgcgucggggcccggaaguccgcgccccucaucgagcugugccuggacgaggccggcagcaagucccccauccaguacaucgacaucgggaacuacaccgugagcugcuccccguucaccaucaacugccaggagcccaagcucggcagccuggugguccgcugcuccuucuacgaggacuuccuggaguaccacgacgugcgggugguccucgacuucaucugaggacuaguuauaagacugacuagcccgaugggccucccaacgggcccuccuccccuccuugcaccgagauuaauaaaaaaaaaaaaaaaaaaaaaaaaaaaaaaaaaaaaaaaaaaaaaaaaaaaaaaaaaaaaaaaaugcaucccccccccccccccccccccccccccccccaaaggcucuuuucagagccaccagaauu

SEQ ID NO: 22696 - RNA, 583 nt, Artificial Sequence
  SARS-CoV-2__MT757105.1__ORF8 protein mRNA gc
aggagaaagcuuaccaugaaguuccugguguuccucggcaucaucaccaccgucgccgccuuccaccaggagugcagccugcagcugugcacgcagcaccagcccuacgugguggacgacccgugccccauccacuucuacuccaagugguacauccgcgucggggcccgcaagagcgcgccccucaucgagcugugccuggacgaggccggcuccaagagccccauccaguacaucgacaucgggaacuacaccguguccugccucccguucaccaucaacugccaggagcccaagcugggcagccuggugguccggugcuccuucuacgaggacuuccucgaguaccacgacgugcgggugguccuggacuucaucugaggacuaguuauaagacugacuagcccgaugggccucccaacgggcccuccuccccuccuugcaccgagauuaauaaaaaaaaaaaaaaaaaaaaaaaaaaaaaaaaaaaaaaaaaaaaaaaaaaaaaaaaaaaaaaaaugcaucccccccccccccccccccccccccccccccaaaggcucuuuucagagccaccagaauu

SEQ ID NO: 22697 - RNA, 583 nt, Artificial Sequence
  SARS-CoV-2__MT757116.1__ORF8 protein mRNA gc
aggagaaagcuuaccaugaaguuccugguguuccucggcaucaucaccaccgucgccgccuuccaccaggagugcagccugcagcugugcacgcagcaccagcccuacgugguggacgacccgugcuccauccacuucuacagcaagugguacauccgcgucggggcccggaaguccgcgccccucaucgagcugugcguggacgaggccggcagcaagucccccauccaguacaucgacaucgggaacuacaccgugagcugccugcccuucaccaucaacugccaggagccgaagcucggcucccuggucgugcgcugcagcuucuacgaggacuuccuggaguaccacgacgugcgggucgugcucgacuucaucugaggacuaguuauaagacugacuagcccgaugggccucccaacgggcccuccuccccuccuugcaccgagauuaauaaaaaaaaaaaaaaaaaaaaaaaaaaaaaaaaaaaaaaaaaaaaaaaaaaaaaaaaaaaaaaaaugcaucccccccccccccccccccccccccccccccaaaggcucuuuucagagccaccagaauu

SEQ ID NO: 22698 - RNA, 583 nt, Artificial Sequence
  SARS-CoV-2__MT750459.1__ORF8 protein mRNA gc
aggagaaagcuuaccaugaaguuccugguguuccucggcaucaucaccaccgucgccgccuuccaccaggagugcagccugcaguccugcacgcagcaccagcccuacgugguggacgacccgugccccauccacuucuacagcaagugguacauccgcgucggggcccggaaguccgcgccccugaucgagcucugcguggacgagagcggcuccaagagccccauccaguacaucgacaucgggaacuacaccguguccugcagcccguucaccaucaacugccaggagcccaagcugggcucccuggucgugcgcugcagcuucuacgaggacuuccucgaguaccacgacgugcgggucgugcuggacuucaucugaggacuaguuauaagacugacuagcccgaugggccucccaacgggcccuccuccccuccuugcaccgagauuaauaaaaaaaaaaaaaaaaaaaaaaaaaaaaaaaaaaaaaaaaaaaaaaaaaaaaaaaaaaaaaaaaugcaucccccccccccccccccccccccccccccccaaaggcucuuuucagagccaccagaauu

SEQ ID NO: 22699 - RNA, 583 nt, Artificial Sequence
  SARS-CoV-2__MT750487.1__ORF8 protein mRNA gc
aggagaaagcuuaccaugaaguuccugguguuccucggcaucaucaccaccgucgccgccuuccaccaggagugcagccugcaguccugcacgcagcaccagcccuacgugguggacgacccgugccccacccacuucuacagcaagugguacauccgcgucggggcccggaaguccgcgccccugaucgagcucugcguggacgaggccggcagcaagucccccauccaguacaucgacaucgggaacuacaccgugagcugccugccguucaccaucaacugccaggagcccaagcugggcucccucgucgugcgcugcagcuucuacgaggacuuccuggaguaccacgacgugcgggucgugcuggacuucaucugaggacuaguuauaagacugacuagcccgaugggccucccaacgggcccuccuccccuccuugcaccgagauuaauaaaaaaaaaaaaaaaaaaaaaaaaaaaaaaaaaaaaaaaaaaaaaaaaaaaaaaaaaaaaaaaaugcaucccccccccccccccccccccccccccccccaaaggcucuuuucagagccaccagaauu

SEQ ID NO: 22700 - RNA, 583 nt, Artificial Sequence
  SARS-CoV-2__MT740384.1__ORF8 protein mRNA gc
aggagaaagcuuaccaugaaguuccugguguuccucggcaucaucaccaccgucgccgccuuccaccaggagugcagccugcaguccugcacgcagcaccagcccuacgugguggacgacccgugccgcauccacuucuacagcaagugguacauccgggucggggcccgcaaguccgcgccccugaucgagcucugcguggacgaggccggcagcaagucccccauccaguacaucgacaucgggaacuacaccgugagcugccugcccuucaccaucaacugccaggagccgaagcugggcucccucgucgugcggugcagcuucuacgaggacuuccuggaguaccacgacgugcgcgucgugcuggacuucaucugaggacuaguuauaagacugacuagcccgaugggccucccaacgggcccuccuccccuccuugcaccgagauuaauaaaaaaaaaaaaaaaaaaaaaaaaaaaaaaaaaaaaaaaaaaaaaaaaaaaaaaaaaaaaaaaaugcaucccccccccccccccccccccccccccccccaaaggcucuuuucagagccaccagaauu

SEQ ID NO: 22701 - RNA, 583 nt, Artificial Sequence
  SARS-CoV-2__MT734055.1__ORF8 protein mRNA gc
aggagaaagcuuaccaugaaguuccugguguuccucggcaucaucaccaccgucgccgccuuccaccaggagugcagccugcaguccugcacgcagcaccagcccuacgugguggacgacccgugccccauccacuucuacagcaagugguacauccgcgucggggcccggaaguccgcgccccugaucgagcucugcguggacgacgccggcagcaagucccccauccaguacaucgacaucgggaacuacaccgugagcugccugccguucaccaucaacugccaggagcccaagcugggcucccucgucgugcgcugcagcuucuacgaggacuuccuggaguaccacgacgugcgggucgugcuggacuucaucugaggacuaguuauaagacugacuagcccgaugggccucccaacgggcccuccuccccuccuugcaccgagauuaauaaaaaaaaaaaaaaaaaaaaaaaaaaaaaaaaaaaaaaaaaaaaaaaaaaaaaaaaaaaaaaaaugcaucccccccccccccccccccccccccccccccaaaggcucuuuucagagccaccagaauu

SEQ ID NO: 22702 - RNA, 583 nt, Artificial Sequence
  SARS-CoV-2__MT704111.1__ORF8 protein mRNA gc
aggagaaagcuuaccaugaaguuccugguguuccucggcaucaucaccaccgucgccgccuuccaccaggagugcagccugcaguccugcacgcagcaccagccccacgugguggacgacccgugccccauccacuucuacagcaagugguacauccgcgucggggcccggaaguccgcgccccugaucgagcucugcguggacgaggccggcagcaagucccccauccaguacaucgacaucgggaacuacaccgugagcugccugccguucaccaucaacugccaggagcccaagcugggcucccucgucgugcgcugcagcuucuacgaggacuuccuggaguaccacgacgugcgggucgugcuggacuucaucugaggacuaguuauaagacugacuagcccgaugggccucccaacgggcccuccuccccuccuugcaccgagauuaauaaaaaaaaaaaaaaaaaaaaaaaaaaaaaaaaaaaaaaaaaaaaaaaaaaaaaaaaaaaaaaaaugcaucccccccccccccccccccccccccccccccaaaggcucuuuucagagccaccagaauu

SEQ ID NO: 22703 - RNA, 583 nt, Artificial Sequence
  SARS-CoV-2__MT683389.1__ORF8 protein mRNA gc
aggagaaagcuuaccaugaaguuccugguguuccucggcaucaucaccaccgucgccgccuuccaccaggagugcagccugcaguccugcacgcagcaccagcccuacguggugggggacccgugccccauccacuucuacagcaagugguacauccgcgucggcgcccggaaguccgcgccccugaucgagcucugcguggacgaggccgggagcaagucccccauccaguacaucgacaucggcaacuacaccgugagcugccugccguucaccaucaacugccaggagcccaagcuggggucccucgucgugcgcugcagcuucuacgaggacuuccuggaguaccacgacgugcgggucgugcuggacuucaucugaggacuaguuauaagacugacuagcccgaugggccucccaacgggcccuccuccccuccuugcaccgagauuaauaaaaaaaaaaaaaaaaaaaaaaaaaaaaaaaaaaaaaaaaaaaaaaaaaaaaaaaaaaaaaaaaugcaucccccccccccccccccccccccccccccccaaaggcucuuuucagagccaccagaauu

SEQ ID NO: 22704 - RNA, 583 nt, Artificial Sequence
  SARS-CoV-2__MT679161.1__ORF8 protein mRNA gc
aggagaaagcuuaccaugaaguuccugguguuccucggcaucaucaccaccgucgccgccuuccaccaggagugcagccugcaguccugcacgcagcaccagcccuacgugguggacgacccgugccccauccacuucuacagcaagugguacauccgcgucggggcccggaaguccgcgccccugaucgagcucugcguggacgaggccggcagcaagucccccauccuguacaucgacaucgggaacuacaccgugagcugccugccguucaccaucaacugccaggagcccaagcucggcucccuggucgugcgcugcagcuucuacgaggacuuccuggaguaccacgacgugcgggucgugcucgacuucaucugaggacuaguuauaagacugacuagcccgaugggccucccaacgggcccuccuccccuccuugcaccgagauuaauaaaaaaaaaaaaaaaaaaaaaaaaaaaaaaaaaaaaaaaaaaaaaaaaaaaaaaaaaaaaaaaaugcaucccccccccccccccccccccccccccccccaaaggcucuuuucagagccaccagaauu

SEQ ID NO: 22705 - RNA, 583 nt, Artificial Sequence
  SARS-CoV-2__MT642081.1__ORF8 protein mRNA gc
aggagaaagcuuaccaugaaguuccugguguuccucggcaucaucaccaccgucgccgccuuccaccaggagugcagccugcaguccugcacgcagcaccagcccuacgugguggacgacccgugccccauccacuucuacagcaagugguacauccgcgucggggcccggaaguccgcgccccugaucgagcucugcguggacgaggccggcagcaagucccccauccaguacaucgacaucugcaacuacaccgugagcugccugccguucaccaucaacugccaggagcccaagcuggggucccucgucgugcgcugcagcuucuacgaggacuuccuggaguaccacgacgugcgggucgugcuggacuucaucugaggacuaguuauaagacugacuagcccgaugggccucccaacgggcccuccuccccuccuugcaccgagauuaauaaaaaaaaaaaaaaaaaaaaaaaaaaaaaaaaaaaaaaaaaaaaaaaaaaaaaaaaaaaaaaaaugcaucccccccccccccccccccccccccccccccaaaggcucuuuucagagccaccagaauu

SEQ ID NO: 22706 - RNA, 583 nt, Artificial Sequence
  SARS-CoV-2__MT642109.1__ORF8 protein mRNA gc
aggagaaagcuuaccaugaaguuccugguguuccucggcaucaucaccaccgucgccgccagccaccaggagugcucccugcagagcugcacgcagcaccagcccuacgugguggacgacccgugccccauccacuucuacuccaagugguacauccgcgucggggcccgcaagagcgcgccccugaucgagcucugcguggacgaggccggcuccaagagccccauccaguacaucgacaucgggaacuacaccguguccugccugccguucaccaucaacugccaggagcccaagcugggcagccucgucgugcggugcuccuucuacgaggacuuccuggaguaccacgacgugcgggucgugcuggacuucaucugaggacuaguuauaagacugacuagcccgaugggccucccaacgggcccuccuccccuccuugcaccgagauuaauaaaaaaaaaaaaaaaaaaaaaaaaaaaaaaaaaaaaaaaaaaaaaaaaaaaaaaaaaaaaaaaaugcaucccccccccccccccccccccccccccccccaaaggcucuuuucagagccaccagaauu

SEQ ID NO: 22707 - RNA, 583 nt, Artificial Sequence
  SARS-CoV-2__MT642177.1__ORF8 protein mRNA gc
aggagaaagcuuaccaugaaguuccugguguuccucggcaucaucaccaccgucgccgccuuccaccaggagugcagccugcaguccugcacgcagcaccagcccuacgugguggacgacccgugccccauccacuucuacagcaagugguacauccgcgucggggcccggaaguccgcgccccugaucgagcucugcguggacgaggccggcagcaagucccccauccacuacaucgacaucgggaacuacaccgugagcugcuccccguucaccaucaacugccaggagcccaagcugggcagccuggucgugcgcugcuccuucuacgaggacuuccucgaguaccacgacgugcgggucgugcuggacuucaucugaggacuaguuauaagacugacuagcccgaugggccucccaacgggcccuccuccccuccuugcaccgagauuaauaaaaaaaaaaaaaaaaaaaaaaaaaaaaaaaaaaaaaaaaaaaaaaaaaaaaaaaaaaaaaaaaugcaucccccccccccccccccccccccccccccccaaaggcucuuuucagagccaccagaauu

SEQ ID NO: 22708 - RNA, 583 nt, Artificial Sequence
  SARS-CoV-2__MT630423.1__ORF8 protein mRNA gc
aggagaaagcuuaccaugaaguuccugguguuccucggcaucaucaccaccgucgccgccuuccaccaggagugcagccugcaguccugcacgcagcaccagcccuacgugguggacgacccgugccccauccacuucuacagcaagcuguacauccgcgucggggcccggaaguccgcgccccucaucgagcugugcguggacgaggccggcagcaagucccccauccaguacaucgacaucgggaacuacaccgugagcugcuccccguucaccaucaacugccaggagcccaagcugggcagccucgucgugcgcugcuccuucuacgaggacuuccuggaguaccacgacgugcgggucgugcuggacuucaucugaggacuaguuauaagacugacuagcccgaugggccucccaacgggcccuccuccccuccuugcaccgagauuaauaaaaaaaaaaaaaaaaaaaaaaaaaaaaaaaaaaaaaaaaaaaaaaaaaaaaaaaaaaaaaaaaugcaucccccccccccccccccccccccccccccccaaaggcucuuuucagagccaccagaauu

SEQ ID NO: 22709 - RNA, 583 nt, Artificial Sequence
  SARS-CoV-2__MT632817.1__ORF8 protein mRNA gc
aggagaaagcuuaccaugaaguuccugguguuccucggcaucaucaccaccgucgccgccuuccaccaggagugcagccugcaguccugcacgcagcaccagcccuacgugguggacgacccgugccccauccacuucuacagcaagugguacauccgcgucggggcccggaaguccgcgccccugaucgagcucugcguggacgaggccggcuucaagagccccauccaguacaucgacaucgggaacuacaccguguccugcagcccguucaccaucaacugccaggagcccaagcugggcucccuggucgugcgcugcagcuucuacgaggacuuccucgaguaccacgacgugcgggucgugcuggacuucaucugaggacuaguuauaagacugacuagcccgaugggccucccaacgggcccuccuccccuccuugcaccgagauuaauaaaaaaaaaaaaaaaaaaaaaaaaaaaaaaaaaaaaaaaaaaaaaaaaaaaaaaaaaaaaaaaaugcaucccccccccccccccccccccccccccccccaaaggcucuuuucagagccaccagaauu

SEQ ID NO: 22710 - RNA, 583 nt, Artificial Sequence
  SARS-CoV-2__MT632919.1__ORF8 protein mRNA gc
aggagaaagcuuaccaugaaguuccugguguuccucggcaucaucgccaccgucgccgccuuccaccaggagugcagccugcaguccugcacccagcaccagcccuacgugguggacgacccgugccccauccacuucuacagcaagugguacauccgcgucggggcccggaaguccgcgccccugaucgagcucugcguggacgaggccggcagcaagucccccauccaguacaucgacaucgggaacuacacggugagcugcuccccguucaccaucaacugccaggagcccaagcugggcagccuggucgugcgcugcuccuucuacgaggacuuccucgaguaccacgacgugcgggucgugcuggacuucaucugaggacuaguuauaagacugacuagcccgaugggccucccaacgggcccuccuccccuccuugcaccgagauuaauaaaaaaaaaaaaaaaaaaaaaaaaaaaaaaaaaaaaaaaaaaaaaaaaaaaaaaaaaaaaaaaaugcaucccccccccccccccccccccccccccccccaaaggcucuuuucagagccaccagaauu

SEQ ID NO: 22711 - RNA, 583 nt, Artificial Sequence
  SARS-CoV-2__MT607245.1__ORF8 protein mRNA gc
aggagaaagcuuaccaugaaguuccugguguuccucggcaucaucaccaccgucgccgccuuccaccaggagugcagccugcaguccugcacgcagcaccagcccuacgugguggacgacccgugccccauccacuucuacagcaagugguacauccgcgucggggcccggaaguccgcgccccugaucgagcucugcguggacgaggccugcagcaagucccccauccaguacaucgacaucggcaacuacaccgugagcugccugccguucaccaucaacugccaggagcccaagcuggggucccucgucgugcgcugcagcuucuacgaggacuuccuggaguaccacgacgugcgggucgugcuggacuucaucugaggacuaguuauaagacugacuagcccgaugggccucccaacgggcccuccuccccuccuugcaccgagauuaauaaaaaaaaaaaaaaaaaaaaaaaaaaaaaaaaaaaaaaaaaaaaaaaaaaaaaaaaaaaaaaaaugcaucccccccccccccccccccccccccccccccaaaggcucuuuucagagccaccagaauu

SEQ ID NO: 22712 - RNA, 583 nt, Artificial Sequence
  SARS-CoV-2__MT609558.1__ORF8 protein mRNA gc
aggagaaagcuuaccaugaaguuccugguguuccucggcaucaucaccaccgucgccgccuuccaccaggagugcagccugcaguccugcacgcagcaccagcccuacgugguggacgaccugugcccgauccacuucuacagcaagugguacauccgcgucggggcccggaaguccgcgccccucaucgagcugugcguggacgaggccggcagcaagucccccauccaguacaucgacaucgggaacuacaccgugagcugccugcccuucaccaucaacugccaggagccgaagcucggcucccuggucgugcgcugcagcuucuacgaggacuuccuggaguaccacgacgugcgggucgugcucgacuucaucugaggacuaguuauaagacugacuagcccgaugggccucccaacgggcccuccuccccuccuugcaccgagauuaauaaaaaaaaaaaaaaaaaaaaaaaaaaaaaaaaaaaaaaaaaaaaaaaaaaaaaaaaaaaaaaaaugcaucccccccccccccccccccccccccccccccaaaggcucuuuucagagccaccagaauu

SEQ ID NO: 22713 - RNA, 595 nt, Artificial Sequence
  SARS-CoV-2__MT568638.1__ORF8 protein mRNA gc
aggagaaagcuuaccaugaaguuccugguguuccucggcaucaucaccaccgucgccgccuuccaccaggagugcagccugcaguccugcacgcagcaccagcccuacgugguggacgacccgugccccauccacuucuacagcaagugguacauccgcgucggggcccggaaguccgcgccccugaucgagcucugcguggacgaggccggcagcaagucccccauccaguacaucgacaucgggaacuacaccgugagcugcuccccguucaccaucaacugccaggagcccaagcugggcagccuggucgugcgcugcuccuucuacgaggacuuccucgaguaccacgacgugcgggucgugcuggaguucagcaagcgcaccaacugaggacuaguuauaagacugacuagcccgaugggccucccaacgggcccuccuccccuccuugcaccgagauuaauaaaaaaaaaaaaaaaaaaaaaaaaaaaaaaaaaaaaaaaaaaaaaaaaaaaaaaaaaaaaaaaaugcaucccccccccccccccccccccccccccccccaaaggcucuuuucagagccaccagaauu

SEQ ID NO: 22714 - RNA, 583 nt, Artificial Sequence
  SARS-CoV-2__MT520189.1__ORF8 protein mRNA gc
aggagaaagcuuaccaugaaguuccugguguuccucggcaucaucaccaccgucgccgccuuccaccaggagugcagccugcaguccugcacgcagcaccagcccuacgugguggacgacagcugcccgauccacuucuacuccaagugguacauccgcgucggggcccgcaagagcgcgccccugaucgagcucugccuggacgaggccggcuccaagagccccauccaguacaucgacaucgggaacuacaccguguccugcagccccuucaccaucaacugccaggagccgaagcugggcucccucgugguccggugcagcuucuacgaggacuuccuggaguaccacgacgugcgggugguccuggacuucaucugaggacuaguuauaagacugacuagcccgaugggccucccaacgggcccuccuccccuccuugcaccgagauuaauaaaaaaaaaaaaaaaaaaaaaaaaaaaaaaaaaaaaaaaaaaaaaaaaaaaaaaaaaaaaaaaaugcaucccccccccccccccccccccccccccccccaaaggcucuuuucagagccaccagaauu

SEQ ID NO: 22715 - RNA, 583 nt, Artificial Sequence
  SARS-CoV-2__MT534313.1__ORF8 protein mRNA gc
aggagaaagcuuaccaugaaguuccugguguuccucggcaucaucaagaccgucgccgccuuccaccaggagugcagccugcaguccugcacccagcaccagcccuacgugguggacgacccgugccccauccacuucuacagcaagugguacauccgcgucggggcccggaaguccgcgccccugaucgagcucugcguggacgaggccggcagcaagucccccauccaguacaucgacaucgggaacuacacggugagcugccugccguucaccaucaacugccaggagcccaagcugggcucccucgucgugcgcugcagcuucuacgaggacuuccuggaguaccacgacgugcgggucgugcuggacuucaucugaggacuaguuauaagacugacuagcccgaugggccucccaacgggcccuccuccccuccuugcaccgagauuaauaaaaaaaaaaaaaaaaaaaaaaaaaaaaaaaaaaaaaaaaaaaaaaaaaaaaaaaaaaaaaaaaugcaucccccccccccccccccccccccccccccccaaaggcucuuuucagagccaccagaauu

SEQ ID NO: 22716 - RNA, 583 nt, Artificial Sequence
  SARS-CoV-2__MT511079.1__ORF8 protein mRNA gc
aggagaaagcuuaccaugaaguuccugguguuccucggcaucaucaccaccgucgccgccuuccaccaggagugcagccugcaguccugcacgcagcaccagcccuacgugguggacgacccgugcagcauccacuucuacuccaagugguacauccgcgucggggcccgcaagagcgcgccccugaucgagcucugcguggacgaggccggcuccaagagccccauccaguacaucgacaucgggaacuacaccguguccugccugcccuucaccaucaacugccaggagccgaagcugggcagccucgucgugcggugcuccuucuacgaggacuuccuggaguaccacgacgugcgggucgugcuggacuucaucugaggacuaguuauaagacugacuagcccgaugggccucccaacgggcccuccuccccuccuugcaccgagauuaauaaaaaaaaaaaaaaaaaaaaaaaaaaaaaaaaaaaaaaaaaaaaaaaaaaaaaaaaaaaaaaaaugcaucccccccccccccccccccccccccccccccaaaggcucuuuucagagccaccagaauu

SEQ ID NO: 22717 - RNA, 583 nt, Artificial Sequence
  SARS-CoV-2__MT509510.1__ORF8 protein mRNA gc
aggagaaagcuuaccaugaaguuccugguguuccucgagaucaucaccaccgucgccgccuuccaccaggagugcagccugcaguccugcacgcagcaccagcccuacgugguggacgacccgugccccauccacuucuacagcaagugguacauccgcgucggcgcccggaaguccgcgccccugaucgagcucugcguggacgaggccgggagcaagucccccauccaguacaucgacaucggcaacuacaccgugagcugccugccguucaccaucaacugccaggagcccaagcuggggucccucgucgugcgcugcagcuucuacgaggacuuccuggaguaccacgacgugcgggucgugcuggacuucaucugaggacuaguuauaagacugacuagcccgaugggccucccaacgggcccuccuccccuccuugcaccgagauuaauaaaaaaaaaaaaaaaaaaaaaaaaaaaaaaaaaaaaaaaaaaaaaaaaaaaaaaaaaaaaaaaaugcaucccccccccccccccccccccccccccccccaaaggcucuuuucagagccaccagaauu

SEQ ID NO: 22718 - RNA, 583 nt, Artificial Sequence
  SARS-CoV-2__MT506707.1__ORF8 protein mRNA gc
aggagaaagcuuaccaugaaguuccugguguuccucggcaucaucaccaccgucgccgccuuccaccaggagugcagccugcaguccugcacgcagcaccagcccuacgugguggacgacccgugccccauccacuucuacagcaagugguacauccgcgucgggucccgcaagagcgcgccccugaucgagcucugcguggacgaggccggcuccaagagccccauccaguacaucgacaucgggaacuacaccguguccugccugccguucaccaucaacugccaggagcccaagcugggcagccucgucgugcggugcuccuucuacgaggacuuccuggaguaccacgacgugcgggucgugcuggacuucaucugaggacuaguuauaagacugacuagcccgaugggccucccaacgggcccuccuccccuccuugcaccgagauuaauaaaaaaaaaaaaaaaaaaaaaaaaaaaaaaaaaaaaaaaaaaaaaaaaaaaaaaaaaaaaaaaaugcaucccccccccccccccccccccccccccccccaaaggcucuuuucagagccaccagaauu

SEQ ID NO: 22719 - RNA, 583 nt, Artificial Sequence
  SARS-CoV-2__MT482119.1__ORF8 protein mRNA gc
aggagaaagcuuaccaugaaguuccugguguuccucggcaucaucaccaccgucgccgccuuccaccaggagugcagccugcaguccugcacgcagcaccagcccuacgugguggacgacccgugccccauccacuucuacagcaagugguacauccgcgucggggcccggaaguccgcgccccugaucgagcucugcguggacgaggccggcagcaagucccccauccaguacaucgacaucgggaacuacaccgugagcugccugccguucaccaucaacugccaggagcccaagcugggcucccucgucgugcgcugcagcuucuacgagaacuuccuggaguaccacgacgugcgggucgugcuggacuucaucugaggacuaguuauaagacugacuagcccgaugggccucccaacgggcccuccuccccuccuugcaccgagauuaauaaaaaaaaaaaaaaaaaaaaaaaaaaaaaaaaaaaaaaaaaaaaaaaaaaaaaaaaaaaaaaaaugcaucccccccccccccccccccccccccccccccaaaggcucuuuucagagccaccagaauu

SEQ ID NO: 22720 - RNA, 583 nt, Artificial Sequence
  SARS-CoV-2__MT467253.1__ORF8 protein mRNA gc
aggagaaagcuuaccaugaaguuccugguguuccucggcaucaucaccaccgucgccgccuuccaccaggagugcagccugcaguccugcacgcagcaccagcccuacgugguggacgacccgugccccauccacuucuacagcaagugguacauccgcgucggggcccggaaguccgcgccccugaucgagcucugcguggacgaggccggcagcaagucccccauccaguacaucgacaucgggaacuacaccgugagcugccugccguucaccaucaacugccaggagcccaagcugggcucccucgucgugcgcugcagcuucuacgaggacuuccuggaguaccacgacgugcgggucgugcuggacuuccucugaggacuaguuauaagacugacuagcccgaugggccucccaacgggcccuccuccccuccuugcaccgagauuaauaaaaaaaaaaaaaaaaaaaaaaaaaaaaaaaaaaaaaaaaaaaaaaaaaaaaaaaaaaaaaaaaugcaucccccccccccccccccccccccccccccccaaaggcucuuuucagagccaccagaauu

SEQ ID NO: 22721 - RNA, 583 nt, Artificial Sequence
  SARS-CoV-2__MT470123.1__ORF8 protein mRNA gc
aggagaaagcuuaccaugaaguuccugguguuccucggcaucaucaccaccgucgccgccuuccaccaggagugcagccugcaguccugcacgcagcaccagcccuacgugguggacgacccgugccccauccacuucuacagcaagugguacauccgcgucggggcccggaaguccgcgccccugaucgagcucugcguggacgaggccggcagcaagucccccauccaguacaucgacaucgggaacuacaccgugagcugccugccguucaccaucaacugccaggagcccaagcugggcucccucgucgugcgcugcagcuucuacgaggacuuccuggaguaccacgacgugcgggucgugcuggacuucuucugaggacuaguuauaagacugacuagcccgaugggccucccaacgggcccuccuccccuccuugcaccgagauuaauaaaaaaaaaaaaaaaaaaaaaaaaaaaaaaaaaaaaaaaaaaaaaaaaaaaaaaaaaaaaaaaaugcaucccccccccccccccccccccccccccccccaaaggcucuuuucagagccaccagaauu

SEQ ID NO: 22722 - RNA, 583 nt, Artificial Sequence
  SARS-CoV-2__MT459881.1__ORF8 protein mRNA gc
aggagaaagcuuaccaugaaguuccugguguuccucggcaucaucaccaccgucgccgccuuccaccaggagugcagccugcaguccugcacgcagcaccagcccuacgugguggacgacccgugccccauccacuucuacagcaagugguacauccgcgucggggcccggaaguccgcgccccugaucgagcucugcguggacgaggccggcagcaagucccccauccaguacaucgacaucgggaacuacaccgugagcugccugccguucaccaucaacugccaggagcccaagcugggcucccucgucgugcgcugcagcuucuacggggacuuccuggaguaccacgacgugcgggucgugcuggacuucaucugaggacuaguuauaagacugacuagcccgaugggccucccaacgggcccuccuccccuccuugcaccgagauuaauaaaaaaaaaaaaaaaaaaaaaaaaaaaaaaaaaaaaaaaaaaaaaaaaaaaaaaaaaaaaaaaaugcaucccccccccccccccccccccccccccccccaaaggcucuuuucagagccaccagaauu

SEQ ID NO: 22723 - RNA, 583 nt, Artificial Sequence
  SARS-CoV-2__MT461632.1__ORF8 protein mRNA gc
aggagaaagcuuaccaugaaguuccugguguuccucggcaucaucaccaccgucgccgccuuccaccaggagugcagccugcagcugugcacgcagcaccagcccuacgugguggacgacccgugccccauccacuucuacuccaagagcuacauccgcgucggggcccggaaguccgcgccccucaucgagcugugcguggacgaggccggcagcaagucccccauccaguacaucgacaucgggaacuacaccgugagcugccugccguucaccaucaacugccaggagcccaagcucggcucccuggucgugcgcugcagcuucuacgaggacuuccuggaguaccacgacgugcgggucgugcucgacuucaucugaggacuaguuauaagacugacuagcccgaugggccucccaacgggcccuccuccccuccuugcaccgagauuaauaaaaaaaaaaaaaaaaaaaaaaaaaaaaaaaaaaaaaaaaaaaaaaaaaaaaaaaaaaaaaaaaugcaucccccccccccccccccccccccccccccccaaaggcucuuuucagagccaccagaauu

SEQ ID NO: 22724 - RNA, 583 nt, Artificial Sequence
  SARS-CoV-2__MT461664.1__ORF8 protein mRNA gc
aggagaaagcuuaccaugaaguuccugguguuccucggcaucaucaccaccgucgccgccuuccaccaggagugcagccugcaguccugcacgcagcaccagcccuacgugguggacgacccgugccccauccacuucuacagcaagugguacauccgcgucggggcccggaaguccgcgccccugaucgagcucugcguggacgaggccgccagcaagucccccauccaguacaucgacaucggcaacuacaccgugagcugccugccguucaccaucaacugccaggagcccaagcuggggucccucgucgugcgcugcagcuucuacgaggacuuccuggaguaccacgacgugcgggucgugcuggacuucaucugaggacuaguuauaagacugacuagcccgaugggccucccaacgggcccuccuccccuccuugcaccgagauuaauaaaaaaaaaaaaaaaaaaaaaaaaaaaaaaaaaaaaaaaaaaaaaaaaaaaaaaaaaaaaaaaaugcaucccccccccccccccccccccccccccccccaaaggcucuuuucagagccaccagaauu

SEQ ID NO: 22725 - RNA, 583 nt, Artificial Sequence
  SARS-CoV-2__MT451177.1__ORF8 protein mRNA gc
aggagaaagcuuaccaugaaguuccugguguuccucggcaucaucaccaccgucgccgccuuccaccaggagugcagccugcaguccugcacgcagcaccagcccuacgugguggacgacccgugccccauccacuucuacagcaagugguacauccgcgucggggcccggaaguccgcgccccugaucgagcucugcguggacgaggccggcagcaagucccccauccaguacaucgacaucgggaacuacaccgugagcugccugccguucaccaucaacugccaggagcccaagcugggcucccucgucgugcgcugcagcuucuacgaggacuuccuggaguaccacgacuuccgggugguccuggacuucaucugaggacuaguuauaagacugacuagcccgaugggccucccaacgggcccuccuccccuccuugcaccgagauuaauaaaaaaaaaaaaaaaaaaaaaaaaaaaaaaaaaaaaaaaaaaaaaaaaaaaaaaaaaaaaaaaaugcaucccccccccccccccccccccccccccccccaaaggcucuuuucagagccaccagaauu

SEQ ID NO: 22726 - RNA, 583 nt, Artificial Sequence
  SARS-CoV-2__MT451592.1__ORF8 protein mRNA gc
aggagaaagcuuaccaugaaguuccugguguuccucgucaucaucaccaccguggccgccuuccaccaggagugcagccugcaguccugcacgcagcaccagcccuacguggucgacgacccgugccccauccacuucuacagcaagugguacauccgcgugggcgcccggaaguccgcgccccugaucgagcucugcguggacgaggccgggagcaagucccccauccaguacaucgacaucggcaacuacaccgucagcugccugccguucaccaucaacugccaggagcccaagcuggggucccucguggugcgcugcagcuucuacgaggacuuccuggaguaccacgacguccggguggugcuggacuucaucugaggacuaguuauaagacugacuagcccgaugggccucccaacgggcccuccuccccuccuugcaccgagauuaauaaaaaaaaaaaaaaaaaaaaaaaaaaaaaaaaaaaaaaaaaaaaaaaaaaaaaaaaaaaaaaaaugcaucccccccccccccccccccccccccccccccaaaggcucuuuucagagccaccagaauu

SEQ ID NO: 22727 - RNA, 583 nt, Artificial Sequence
  SARS-CoV-2__MT252757.1__ORF8 protein mRNA gc
aggagaaagcuuaccaugaaguuccugguguuccucggcaucaucaccaccgucgccgccuuccaccaggagugcagccugcaguccugcacgcagcaccagcccuacgugguggacgacccgugccccauccacuucuacagcaagugguacauccgcgucggggcccggaaguccgcgccccugaucgagcucugcguggacgaggccggcagcaagucccccauccaguacaucgacaucgggaacuacaccgugagcugcuccccguucaccaucaacugccaggagcccaagcugggcagccuggucgugcgcugcuccuucuacgaggacuuccucgaguaccaggacgugcgggucgugcuggacuucaucugaggacuaguuauaagacugacuagcccgaugggccucccaacgggcccuccuccccuccuugcaccgagauuaauaaaaaaaaaaaaaaaaaaaaaaaaaaaaaaaaaaaaaaaaaaaaaaaaaaaaaaaaaaaaaaaaugcaucccccccccccccccccccccccccccccccaaaggcucuuuucagagccaccagaauu

SEQ ID NO: 22728 - RNA, 583 nt, Artificial Sequence
  SARS-CoV-2__MT358654.1__ORF8 protein mRNA gc
aggagaaagcuuaccaugaaguuccugguguuccucggcaucaucaccaccgucgccgccuuccaccaggagugcagccugcaguccugcacgcagcaccagcccuacgugguggacgacccgugccccauccacuucuacagcaagugguacauccgcgucggggcccggaaguccgcgccccugaucgagcucugcguggacgaggccggcagcaagucccccauccaguacaucgacaucgggaacuacaccgugagcugccugccguucaccaucaacugccaggagcccaagcugggcucccucguccugcgcugcagcuucuacgaggacuuccuggaguaccacgacgugcgggugguccucgacuucaucugaggacuaguuauaagacugacuagcccgaugggccucccaacgggcccuccuccccuccuugcaccgagauuaauaaaaaaaaaaaaaaaaaaaaaaaaaaaaaaaaaaaaaaaaaaaaaaaaaaaaaaaaaaaaaaaaugcaucccccccccccccccccccccccccccccccaaaggcucuuuucagagccaccagaauu

SEQ ID NO: 22729 - DNA, 23 bp, Artificial Sequence
  Primer 2019-nCoV_sgE-forward
cgatctcttgtagatctgttctc

SEQ ID NO: 22730 - DNA, 22 bp, Artificial Sequence
  Primer 2019-nCoV_sgE-reverse
atattgcagcagtacgcacaca

SEQ ID NO: 22731 - DNA, 26 bp, Artificial Sequence
  Primer 2019-nCoV_sgE-probe
acactagccatccttactgcgcttcg

SEQ ID NO: 22732 - protein, 1273 aa, Artificial Sequence
  SARS-CoV-2/Wuhan/WIV05/2019__EPI_ISL_402128 spike protein (1-1273)(K986P_V987P_F817P_A892P_A899P_A942P)
MFVFLVLLPLVSSQCVNLTTRTQLPPAYTNSFTRGVYYPDKVFRSSVLHSTQDLFLPFFSNVTWFHAIHVSGTNGTKRFDNPVLPFNDGVYFASTEKSNIIRGWIFGTTLDSKTQSLLIVNNATNVVIKVCEFQFCNDPFLGVYYHKNNKSWMESEFRVYSSANNCTFEYVSQPFLMDLEGKQGNFKNLREFVFKNIDGYFKIYSKHTPINLVRDLPQGFSALEPLVDLPIGINITRFQTLLALHRSYLTPGDSSSGWTAGAAAYYVGYLQPRTFLLKYNENGTITDAVDCALDPLSETKCTLKSFTVEKGIYQTSNFRVQPTESIVRFPNITNLCPFGEVFNATRFASVYAWNRKRISNCVADYSVLYNSASFSTFKCYGVSPTKLNDLCFTNVYADSFVIRGDEVRQIAPGQTGKIADYNYKLPDDFTGCVIAWNSNNLDSKVGGNYNYLYRLFRKSNLKPFERDISTEIYQAGSTPCNGVEGFNCYFPLQSYGFQPTNGVGYQPYRVVVLSFELLHAPATVCGPKKSTNLVKNKCVNFNFNGLTGTGVLTESNKKFLPFQQFGRDIADTTDAVRDPQTLEILDITPCSFGGVSVITPGTNTSNQVAVLYQDVNCTEVPVAIHADQLTPTWRVYSTGSNVFQTRAGCLIGAEHVNNSYECDIPIGAGICASYQTQTNSPRRARSVASQSIIAYTMSLGAENSVAYSNNSIAIPTNFTISVTTEILPVSMTKTSVDCTMYICGDSTECSNLLLQYGSFCTQLNRALTGIAVEQDKNTQEVFAQVKQIYKTPPIKDFGGFNFSQILPDPSKPSKRSPIEDLLFNKVTLADAGFIKQYGDCLGDIAARDLICAQKFNGLTVLPPLLTDEMIAQYTSALLAGTITSGWTFGAGPALQIPFPMQMAYRFNGIGVTQNVLYENQKLIANQFNSAIGKIQDSLSSTPSALGKLQDVVNQNAQALNTLVKQLSSNFGAISSVLNDILSRLDPPEAEVQIDRLITGRLQSLQTYVTQQLIRAAEIRASANLAATKMSECVLGQSKRVDFCGKGYHLMSFPQSAPHGVVFLHVTYVPAQEKNFTTAPAICHDGKAHFPREGVFVSNGTHWFVTQRNFYEPQIITTDNTFVSGNCDVVIGIVNNTVYDPLQPELDSFKEELDKYFKNHTSPDVDLGDISGINASVVNIQKEIDRLNEVAKNLNESLIDLQELGKYEQYIKWPWYIWLGFIAGLIAIVMVTIMLCCMTSCCSCLKGCCSCGSCCKFDEDDSEPVLKGVKLHYT

SEQ ID NO: 22733 - protein, 383 aa, Artificial Sequence
  SARS-CoV-2/Wuhan/WIV05/2019__EPI_ISL_402128 spike protein (1-15,334-528) Ferritin construct
MFVFLVLLPLVSSQCNLCPFGEVFNATRFASVYAWNRKRISNCVADYSVLYNSASFSTFKCYGVSPTKLNDLCFTNVYADSFVIRGDEVRQIAPGQTGKIADYNYKLPDDFTGCVIAWNSNNLDSKVGGNYNYLYRLFRKSNLKPFERDISTEIYQAGSTPCNGVEGFNCYFPLQSYGFQPTNGVGYQPYRVVVLSFELLHAPATVCGPKGGGGSGGGGSDIIKLLNEQVNKEMQSSNLYMSMSSWCYTHSLDGAGLFLFDHAAEEYEHAKKLIIFLNENNVPVQLTSISAPEHKFEGLTQIFQKAYEHEQHISESINNIVDHAIKSKDHATFNFLQWYVAEQHEEEVLFKDILDKIELIGNENHGLYLADQYVKGIAKSRKS

SEQ ID NO: 22734 - protein, 249 aa, Artificial Sequence
  SARS-CoV-2/Wuhan/WIV05/2019__EPI_ISL_402128 spike protein (334-528) Foldon construct
MPMGSLQPLATLYLLGMLVASVLANLCPFGEVFNATRFASVYAWNRKRISNCVADYSVLYNSASFSTFKCYGVSPTKLNDLCFTNVYADSFVIRGDEVRQIAPGQTGKIADYNYKLPDDFTGCVIAWNSNNLDSKVGGNYNYLYRLFRKSNLKPFERDISTEIYQAGSTPCNGVEGFNCYFPLQSYGFQPTNGVGYQPYRVVVLSFELLHAPATVCGPKGSGGYIPEAPRDGQAYVRKDGEWVLLSTFL

SEQ ID NO: 22735 - protein, 375 aa, Artificial Sequence
  SARS-CoV-2/Wuhan/WIV05/2019__EPI_ISL_402128 spike protein (1-15,334-528) LumSynth construct
MFVFLVLLPLVSSQCNLCPFGEVFNATRFASVYAWNRKRISNCVADYSVLYNSASFSTFKCYGVSPTKLNDLCFTNVYADSFVIRGDEVRQIAPGQTGKIADYNYKLPDDFTGCVIAWNSNNLDSKVGGNYNYLYRLFRKSNLKPFERDISTEIYQAGSTPCNGVEGFNCYFPLQSYGFQPTNGVGYQPYRVVVLSFELLHAPATVCGPKGGGGSGGGGSGGQIYEGKLTAEGLRFGIVASRFNHALVDRLVEGAIDAIVRHGGREEDITLVRVPGSWEIPVAAGELARKEDIDAVIAIGVLIRGATPHFDYIASEVSKGLADLSLELRKPITFGVITADTLEQAIERAGTKHGNKGWEAALSAIEMANLFKSLR

SEQ ID NO: 22736 - protein, 362 aa, Artificial Sequence
  SARS-CoV-2/Wuhan/WIV05/2019__EPI_ISL_402128 spike protein (334-528) LumSynth construct
MQIYEGKLTAEGLRFGIVASRFNHALVDRLVEGAIDAIVRHGGREEDITLVRVPGSWEIPVAAGELARKEDIDAVIAIGVLIRGATPHFDYIASEVSKGLADLSLELRKPITFGVITADTLEQAIERAGTKHGNKGWEAALSAIEMANLFKSLRGGGGSGGGGSGGGNLCPFGEVFNATRFASVYAWNRKRISNCVADYSVLYNSASFSTFKCYGVSPTKLNDLCFTNVYADSFVIRGDEVRQIAPGQTGKIADYNYKLPDDFTGCVIAWNSNNLDSKVGGNYNYLYRLFRKSNLKPFERDISTEIYQAGSTPCNGVEGFNCYFPLQSYGFQPTNGVGYQPYRVVVLSFELLHAPATVCGPK

SEQ ID NO: 22737 - protein, 1273 aa, Artificial Sequence; identical to SEQ ID NO: 9
  SARS-CoV-2/Wuhan/WIV05/2019__EPI_ISL_402128 spike protein (1-1273)(D614G)

SEQ ID NO: 22738 - protein, 1273 aa, Artificial Sequence; identical to SEQ ID NO: 18
  SARS-CoV-2/Wuhan/WIV05/2019__EPI_ISL_402128 spike protein (1-1273)(K986P_V987P_ D614G)

SEQ ID NO: 22739 - protein, 1273 aa, Artificial Sequence
  SARS-CoV-2/Wuhan/WIV05/2019__EPI_ISL_402128 spike protein (1-1273)(A222V_D614G)
MFVFLVLLPLVSSQCVNLTTRTQLPPAYTNSFTRGVYYPDKVFRSSVLHSTQDLFLPFFSNVTWFHAIHVSGTNGTKRFDNPVLPFNDGVYFASTEKSNIIRGWIFGTTLDSKTQSLLIVNNATNVVIKVCEFQFCNDPFLGVYYHKNNKSWMESEFRVYSSANNCTFEYVSQPFLMDLEGKQGNFKNLREFVFKNIDGYFKIYSKHTPINLVRDLPQGFSVLEPLVDLPIGINITRFQTLLALHRSYLTPGDSSSGWTAGAAAYYVGYLQPRTFLLKYNENGTITDAVDCALDPLSETKCTLKSFTVEKGIYQTSNFRVQPTESIVRFPNITNLCPFGEVFNATRFASVYAWNRKRISNCVADYSVLYNSASFSTFKCYGVSPTKLNDLCFTNVYADSFVIRGDEVRQIAPGQTGKIADYNYKLPDDFTGCVIAWNSNNLDSKVGGNYNYLYRLFRKSNLKPFERDISTEIYQAGSTPCNGVEGFNCYFPLQSYGFQPTNGVGYQPYRVVVLSFELLHAPATVCGPKKSTNLVKNKCVNFNFNGLTGTGVLTESNKKFLPFQQFGRDIADTTDAVRDPQTLEILDITPCSFGGVSVITPGTNTSNQVAVLYQGVNCTEVPVAIHADQLTPTWRVYSTGSNVFQTRAGCLIGAEHVNNSYECDIPIGAGICASYQTQTNSPRRARSVASQSIIAYTMSLGAENSVAYSNNSIAIPTNFTISVTTEILPVSMTKTSVDCTMYICGDSTECSNLLLQYGSFCTQLNRALTGIAVEQDKNTQEVFAQVKQIYKTPPIKDFGGFNFSQILPDPSKPSKRSFIEDLLFNKVTLADAGFIKQYGDCLGDIAARDLICAQKFNGLTVLPPLLTDEMIAQYTSALLAGTITSGWTFGAGAALQIPFAMQMAYRFNGIGVTQNVLYENQKLIANQFNSAIGKIQDSLSSTASALGKLQDVVNQNAQALNTLVKQLSSNFGAISSVLNDILSRLDKVEAEVQIDRLITGRLQSLQTYVTQQLIRAAEIRASANLAATKMSECVLGQSKRVDFCGKGYHLMSFPQSAPHGVVFLHVTYVPAQEKNFTTAPAICHDGKAHFPREGVFVSNGTHWFVTQRNFYEPQIITTDNTFVSGNCDVVIGIVNNTVYDPLQPELDSFKEELDKYFKNHTSPDVDLGDISGINASVVNIQKEIDRLNEVAKNLNESLIDLQELGKYEQYIKWPWYIWLGFIAGLIAIVMVTIMLCCMTSCCSCLKGCCSCGSCCKFDEDDSEPVLKGVKLHYT

SEQ ID NO: 22740 - protein, 1273 aa, Artificial Sequence
  SARS-CoV-2/Wuhan/WIV05/2019__EPI_ISL_402128 spike protein (1-1273)(K986P_V987P_A222V_D614G)
MFVFLVLLPLVSSQCVNLTTRTQLPPAYTNSFTRGVYYPDKVFRSSVLHSTQDLFLPFFSNVTWFHAIHVSGTNGTKRFDNPVLPFNDGVYFASTEKSNIIRGWIFGTTLDSKTQSLLIVNNATNVVIKVCEFQFCNDPFLGVYYHKNNKSWMESEFRVYSSANNCTFEYVSQPFLMDLEGKQGNFKNLREFVFKNIDGYFKIYSKHTPINLVRDLPQGFSVLEPLVDLPIGINITRFQTLLALHRSYLTPGDSSSGWTAGAAAYYVGYLQPRTFLLKYNENGTITDAVDCALDPLSETKCTLKSFTVEKGIYQTSNFRVQPTESIVRFPNITNLCPFGEVFNATRFASVYAWNRKRISNCVADYSVLYNSASFSTFKCYGVSPTKLNDLCFTNVYADSFVIRGDEVRQIAPGQTGKIADYNYKLPDDFTGCVIAWNSNNLDSKVGGNYNYLYRLFRKSNLKPFERDISTEIYQAGSTPCNGVEGFNCYFPLQSYGFQPTNGVGYQPYRVVVLSFELLHAPATVCGPKKSTNLVKNKCVNFNFNGLTGTGVLTESNKKFLPFQQFGRDIADTTDAVRDPQTLEILDITPCSFGGVSVITPGTNTSNQVAVLYQGVNCTEVPVAIHADQLTPTWRVYSTGSNVFQTRAGCLIGAEHVNNSYECDIPIGAGICASYQTQTNSPRRARSVASQSIIAYTMSLGAENSVAYSNNSIAIPTNFTISVTTEILPVSMTKTSVDCTMYICGDSTECSNLLLQYGSFCTQLNRALTGIAVEQDKNTQEVFAQVKQIYKTPPIKDFGGFNFSQILPDPSKPSKRSFIEDLLFNKVTLADAGFIKQYGDCLGDIAARDLICAQKFNGLTVLPPLLTDEMIAQYTSALLAGTITSGWTFGAGAALQIPFAMQMAYRFNGIGVTQNVLYENQKLIANQFNSAIGKIQDSLSSTASALGKLQDVVNQNAQALNTLVKQLSSNFGAISSVLNDILSRLDPPEAEVQIDRLITGRLQSLQTYVTQQLIRAAEIRASANLAATKMSECVLGQSKRVDFCGKGYHLMSFPQSAPHGVVFLHVTYVPAQEKNFTTAPAICHDGKAHFPREGVFVSNGTHWFVTQRNFYEPQIITTDNTFVSGNCDVVIGIVNNTVYDPLQPELDSFKEELDKYFKNHTSPDVDLGDISGINASVVNIQKEIDRLNEVAKNLNESLIDLQELGKYEQYIKWPWYIWLGFIAGLIAIVMVTIMLCCMTSCCSCLKGCCSCGSCCKFDEDDSEPVLKGVKLHYT

SEQ ID NO: 22741 - protein, 1273 aa, Artificial Sequence
  SARS-CoV-2/Wuhan/WIV05/2019__EPI_ISL_402128 spike protein (1-1273)(N439K_D614G)
MFVFLVLLPLVSSQCVNLTTRTQLPPAYTNSFTRGVYYPDKVFRSSVLHSTQDLFLPFFSNVTWFHAIHVSGTNGTKRFDNPVLPFNDGVYFASTEKSNIIRGWIFGTTLDSKTQSLLIVNNATNVVIKVCEFQFCNDPFLGVYYHKNNKSWMESEFRVYSSANNCTFEYVSQPFLMDLEGKQGNFKNLREFVFKNIDGYFKIYSKHTPINLVRDLPQGFSALEPLVDLPIGINITRFQTLLALHRSYLTPGDSSSGWTAGAAAYYVGYLQPRTFLLKYNENGTITDAVDCALDPLSETKCTLKSFTVEKGIYQTSNFRVQPTESIVRFPNITNLCPFGEVFNATRFASVYAWNRKRISNCVADYSVLYNSASFSTFKCYGVSPTKLNDLCFTNVYADSFVIRGDEVRQIAPGQTGKIADYNYKLPDDFTGCVIAWNSKNLDSKVGGNYNYLYRLFRKSNLKPFERDISTEIYQAGSTPCNGVEGFNCYFPLQSYGFQPTNGVGYQPYRVVVLSFELLHAPATVCGPKKSTNLVKNKCVNFNFNGLTGTGVLTESNKKFLPFQQFGRDIADTTDAVRDPQTLEILDITPCSFGGVSVITPGTNTSNQVAVLYQGVNCTEVPVAIHADQLTPTWRVYSTGSNVFQTRAGCLIGAEHVNNSYECDIPIGAGICASYQTQTNSPRRARSVASQSIIAYTMSLGAENSVAYSNNSIAIPTNFTISVTTEILPVSMTKTSVDCTMYICGDSTECSNLLLQYGSFCTQLNRALTGIAVEQDKNTQEVFAQVKQIYKTPPIKDFGGFNFSQILPDPSKPSKRSFIEDLLFNKVTLADAGFIKQYGDCLGDIAARDLICAQKFNGLTVLPPLLTDEMIAQYTSALLAGTITSGWTFGAGAALQIPFAMQMAYRFNGIGVTQNVLYENQKLIANQFNSAIGKIQDSLSSTASALGKLQDVVNQNAQALNTLVKQLSSNFGAISSVLNDILSRLDKVEAEVQIDRLITGRLQSLQTYVTQQLIRAAEIRASANLAATKMSECVLGQSKRVDFCGKGYHLMSFPQSAPHGVVFLHVTYVPAQEKNFTTAPAICHDGKAHFPREGVFVSNGTHWFVTQRNFYEPQIITTDNTFVSGNCDVVIGIVNNTVYDPLQPELDSFKEELDKYFKNHTSPDVDLGDISGINASVVNIQKEIDRLNEVAKNLNESLIDLQELGKYEQYIKWPWYIWLGFIAGLIAIVMVTIMLCCMTSCCSCLKGCCSCGSCCKFDEDDSEPVLKGVKLHYT

SEQ ID NO: 22742 - protein, 1273 aa, Artificial Sequence
  SARS-CoV-2/Wuhan/WIV05/2019__EPI_ISL_402128 spike protein (1-1273)(K986P_V987P_N439K_D614G)
MFVFLVLLPLVSSQCVNLTTRTQLPPAYTNSFTRGVYYPDKVFRSSVLHSTQDLFLPFFSNVTWFHAIHVSGTNGTKRFDNPVLPFNDGVYFASTEKSNIIRGWIFGTTLDSKTQSLLIVNNATNVVIKVCEFQFCNDPFLGVYYHKNNKSWMESEFRVYSSANNCTFEYVSQPFLMDLEGKQGNFKNLREFVFKNIDGYFKIYSKHTPINLVRDLPQGFSALEPLVDLPIGINITRFQTLLALHRSYLTPGDSSSGWTAGAAAYYVGYLQPRTFLLKYNENGTITDAVDCALDPLSETKCTLKSFTVEKGIYQTSNFRVQPTESIVRFPNITNLCPFGEVFNATRFASVYAWNRKRISNCVADYSVLYNSASFSTFKCYGVSPTKLNDLCFTNVYADSFVIRGDEVRQIAPGQTGKIADYNYKLPDDFTGCVIAWNSKNLDSKVGGNYNYLYRLFRKSNLKPFERDISTEIYQAGSTPCNGVEGFNCYFPLQSYGFQPTNGVGYQPYRVVVLSFELLHAPATVCGPKKSTNLVKNKCVNFNFNGLTGTGVLTESNKKFLPFQQFGRDIADTTDAVRDPQTLEILDITPCSFGGVSVITPGTNTSNQVAVLYQGVNCTEVPVAIHADQLTPTWRVYSTGSNVFQTRAGCLIGAEHVNNSYECDIPIGAGICASYQTQTNSPRRARSVASQSIIAYTMSLGAENSVAYSNNSIAIPTNFTISVTTEILPVSMTKTSVDCTMYICGDSTECSNLLLQYGSFCTQLNRALTGIAVEQDKNTQEVFAQVKQIYKTPPIKDFGGFNFSQILPDPSKPSKRSFIEDLLFNKVTLADAGFIKQYGDCLGDIAARDLICAQKFNGLTVLPPLLTDEMIAQYTSALLAGTITSGWTFGAGAALQIPFAMQMAYRFNGIGVTQNVLYENQKLIANQFNSAIGKIQDSLSSTASALGKLQDVVNQNAQALNTLVKQLSSNFGAISSVLNDILSRLDPPEAEVQIDRLITGRLQSLQTYVTQQLIRAAEIRASANLAATKMSECVLGQSKRVDFCGKGYHLMSFPQSAPHGVVFLHVTYVPAQEKNFTTAPAICHDGKAHFPREGVFVSNGTHWFVTQRNFYEPQIITTDNTFVSGNCDVVIGIVNNTVYDPLQPELDSFKEELDKYFKNHTSPDVDLGDISGINASVVNIQKEIDRLNEVAKNLNESLIDLQELGKYEQYIKWPWYIWLGFIAGLIAIVMVTIMLCCMTSCCSCLKGCCSCGSCCKFDEDDSEPVLKGVKLHYT

SEQ ID NO: 22743 - protein, 1273 aa, Artificial Sequence
  SARS-CoV-2/Wuhan/WIV05/2019__EPI_ISL_402128 spike protein (1-1273)(S477N_D614G)
MFVFLVLLPLVSSQCVNLTTRTQLPPAYTNSFTRGVYYPDKVFRSSVLHSTQDLFLPFFSNVTWFHAIHVSGTNGTKRFDNPVLPFNDGVYFASTEKSNIIRGWIFGTTLDSKTQSLLIVNNATNVVIKVCEFQFCNDPFLGVYYHKNNKSWMESEFRVYSSANNCTFEYVSQPFLMDLEGKQGNFKNLREFVFKNIDGYFKIYSKHTPINLVRDLPQGFSALEPLVDLPIGINITRFQTLLALHRSYLTPGDSSSGWTAGAAAYYVGYLQPRTFLLKYNENGTITDAVDCALDPLSETKCTLKSFTVEKGIYQTSNFRVQPTESIVRFPNITNLCPFGEVFNATRFASVYAWNRKRISNCVADYSVLYNSASFSTFKCYGVSPTKLNDLCFTNVYADSFVIRGDEVRQIAPGQTGKIADYNYKLPDDFTGCVIAWNSNNLDSKVGGNYNYLYRLFRKSNLKPFERDISTEIYQAGNTPCNGVEGFNCYFPLQSYGFQPTNGVGYQPYRVVVLSFELLHAPATVCGPKKSTNLVKNKCVNFNFNGLTGTGVLTESNKKFLPFQQFGRDIADTTDAVRDPQTLEILDITPCSFGGVSVITPGTNTSNQVAVLYQGVNCTEVPVAIHADQLTPTWRVYSTGSNVFQTRAGCLIGAEHVNNSYECDIPIGAGICASYQTQTNSPRRARSVASQSIIAYTMSLGAENSVAYSNNSIAIPTNFTISVTTEILPVSMTKTSVDCTMYICGDSTECSNLLLQYGSFCTQLNRALTGIAVEQDKNTQEVFAQVKQIYKTPPIKDFGGFNFSQILPDPSKPSKRSFIEDLLFNKVTLADAGFIKQYGDCLGDIAARDLICAQKFNGLTVLPPLLTDEMIAQYTSALLAGTITSGWTFGAGAALQIPFAMQMAYRFNGIGVTQNVLYENQKLIANQFNSAIGKIQDSLSSTASALGKLQDVVNQNAQALNTLVKQLSSNFGAISSVLNDILSRLDKVEAEVQIDRLITGRLQSLQTYVTQQLIRAAEIRASANLAATKMSECVLGQSKRVDFCGKGYHLMSFPQSAPHGVVFLHVTYVPAQEKNFTTAPAICHDGKAHFPREGVFVSNGTHWFVTQRNFYEPQIITTDNTFVSGNCDVVIGIVNNTVYDPLQPELDSFKEELDKYFKNHTSPDVDLGDISGINASVVNIQKEIDRLNEVAKNLNESLIDLQELGKYEQYIKWPWYIWLGFIAGLIAIVMVTIMLCCMTSCCSCLKGCCSCGSCCKFDEDDSEPVLKGVKLHYT

SEQ ID NO: 22744 - protein, 1273 aa, Artificial Sequence
  SARS-CoV-2/Wuhan/WIV05/2019__EPI_ISL_402128 spike protein (1-1273)(K986P_V987P_S477N_D614G)
MFVFLVLLPLVSSQCVNLTTRTQLPPAYTNSFTRGVYYPDKVFRSSVLHSTQDLFLPFFSNVTWFHAIHVSGTNGTKRFDNPVLPFNDGVYFASTEKSNIIRGWIFGTTLDSKTQSLLIVNNATNVVIKVCEFQFCNDPFLGVYYHKNNKSWMESEFRVYSSANNCTFEYVSQPFLMDLEGKQGNFKNLREFVFKNIDGYFKIYSKHTPINLVRDLPQGFSALEPLVDLPIGINITRFQTLLALHRSYLTPGDSSSGWTAGAAAYYVGYLQPRTFLLKYNENGTITDAVDCALDPLSETKCTLKSFTVEKGIYQTSNFRVQPTESIVRFPNITNLCPFGEVFNATRFASVYAWNRKRISNCVADYSVLYNSASFSTFKCYGVSPTKLNDLCFTNVYADSFVIRGDEVRQIAPGQTGKIADYNYKLPDDFTGCVIAWNSNNLDSKVGGNYNYLYRLFRKSNLKPFERDISTEIYQAGNTPCNGVEGFNCYFPLQSYGFQPTNGVGYQPYRVVVLSFELLHAPATVCGPKKSTNLVKNKCVNFNFNGLTGTGVLTESNKKFLPFQQFGRDIADTTDAVRDPQTLEILDITPCSFGGVSVITPGTNTSNQVAVLYQGVNCTEVPVAIHADQLTPTWRVYSTGSNVFQTRAGCLIGAEHVNNSYECDIPIGAGICASYQTQTNSPRRARSVASQSIIAYTMSLGAENSVAYSNNSIAIPTNFTISVTTEILPVSMTKTSVDCTMYICGDSTECSNLLLQYGSFCTQLNRALTGIAVEQDKNTQEVFAQVKQIYKTPPIKDFGGFNFSQILPDPSKPSKRSFIEDLLFNKVTLADAGFIKQYGDCLGDIAARDLICAQKFNGLTVLPPLLTDEMIAQYTSALLAGTITSGWTFGAGAALQIPFAMQMAYRFNGIGVTQNVLYENQKLIANQFNSAIGKIQDSLSSTASALGKLQDVVNQNAQALNTLVKQLSSNFGAISSVLNDILSRLDPPEAEVQIDRLITGRLQSLQTYVTQQLIRAAEIRASANLAATKMSECVLGQSKRVDFCGKGYHLMSFPQSAPHGVVFLHVTYVPAQEKNFTTAPAICHDGKAHFPREGVFVSNGTHWFVTQRNFYEPQIITTDNTFVSGNCDVVIGIVNNTVYDPLQPELDSFKEELDKYFKNHTSPDVDLGDISGINASVVNIQKEIDRLNEVAKNLNESLIDLQELGKYEQYIKWPWYIWLGFIAGLIAIVMVTIMLCCMTSCCSCLKGCCSCGSCCKFDEDDSEPVLKGVKLHYT

SEQ ID NO: 22745 - protein, 1273 aa, Artificial Sequence
  SARS-CoV-2/Wuhan/WIV05/2019__EPI_ISL_402128 spike protein (1-1273)(N501Y_D614G)
MFVFLVLLPLVSSQCVNLTTRTQLPPAYTNSFTRGVYYPDKVFRSSVLHSTQDLFLPFFSNVTWFHAIHVSGTNGTKRFDNPVLPFNDGVYFASTEKSNIIRGWIFGTTLDSKTQSLLIVNNATNVVIKVCEFQFCNDPFLGVYYHKNNKSWMESEFRVYSSANNCTFEYVSQPFLMDLEGKQGNFKNLREFVFKNIDGYFKIYSKHTPINLVRDLPQGFSALEPLVDLPIGINITRFQTLLALHRSYLTPGDSSSGWTAGAAAYYVGYLQPRTFLLKYNENGTITDAVDCALDPLSETKCTLKSFTVEKGIYQTSNFRVQPTESIVRFPNITNLCPFGEVFNATRFASVYAWNRKRISNCVADYSVLYNSASFSTFKCYGVSPTKLNDLCFTNVYADSFVIRGDEVRQIAPGQTGKIADYNYKLPDDFTGCVIAWNSNNLDSKVGGNYNYLYRLFRKSNLKPFERDISTEIYQAGSTPCNGVEGFNCYFPLQSYGFQPTYGVGYQPYRVVVLSFELLHAPATVCGPKKSTNLVKNKCVNFNFNGLTGTGVLTESNKKFLPFQQFGRDIADTTDAVRDPQTLEILDITPCSFGGVSVITPGTNTSNQVAVLYQGVNCTEVPVAIHADQLTPTWRVYSTGSNVFQTRAGCLIGAEHVNNSYECDIPIGAGICASYQTQTNSPRRARSVASQSIIAYTMSLGAENSVAYSNNSIAIPTNFTISVTTEILPVSMTKTSVDCTMYICGDSTECSNLLLQYGSFCTQLNRALTGIAVEQDKNTQEVFAQVKQIYKTPPIKDFGGFNFSQILPDPSKPSKRSFIEDLLFNKVTLADAGFIKQYGDCLGDIAARDLICAQKFNGLTVLPPLLTDEMIAQYTSALLAGTITSGWTFGAGAALQIPFAMQMAYRFNGIGVTQNVLYENQKLIANQFNSAIGKIQDSLSSTASALGKLQDVVNQNAQALNTLVKQLSSNFGAISSVLNDILSRLDKVEAEVQIDRLITGRLQSLQTYVTQQLIRAAEIRASANLAATKMSECVLGQSKRVDFCGKGYHLMSFPQSAPHGVVFLHVTYVPAQEKNFTTAPAICHDGKAHFPREGVFVSNGTHWFVTQRNFYEPQIITTDNTFVSGNCDVVIGIVNNTVYDPLQPELDSFKEELDKYFKNHTSPDVDLGDISGINASVVNIQKEIDRLNEVAKNLNESLIDLQELGKYEQYIKWPWYIWLGFIAGLIAIVMVTIMLCCMTSCCSCLKGCCSCGSCCKFDEDDSEPVLKGVKLHYT

SEQ ID NO: 22746 - protein, 1273 aa, Artificial Sequence
  SARS-CoV-2/Wuhan/WIV05/2019__EPI_ISL_402128 spike protein (1-1273)(K986P_V987P_N501Y_D614G)
MFVFLVLLPLVSSQCVNLTTRTQLPPAYTNSFTRGVYYPDKVFRSSVLHSTQDLFLPFFSNVTWFHAIHVSGTNGTKRFDNPVLPFNDGVYFASTEKSNIIRGWIFGTTLDSKTQSLLIVNNATNVVIKVCEFQFCNDPFLGVYYHKNNKSWMESEFRVYSSANNCTFEYVSQPFLMDLEGKQGNFKNLREFVFKNIDGYFKIYSKHTPINLVRDLPQGFSALEPLVDLPIGINITRFQTLLALHRSYLTPGDSSSGWTAGAAAYYVGYLQPRTFLLKYNENGTITDAVDCALDPLSETKCTLKSFTVEKGIYQTSNFRVQPTESIVRFPNITNLCPFGEVFNATRFASVYAWNRKRISNCVADYSVLYNSASFSTFKCYGVSPTKLNDLCFTNVYADSFVIRGDEVRQIAPGQTGKIADYNYKLPDDFTGCVIAWNSNNLDSKVGGNYNYLYRLFRKSNLKPFERDISTEIYQAGSTPCNGVEGFNCYFPLQSYGFQPTYGVGYQPYRVVVLSFELLHAPATVCGPKKSTNLVKNKCVNFNFNGLTGTGVLTESNKKFLPFQQFGRDIADTTDAVRDPQTLEILDITPCSFGGVSVITPGTNTSNQVAVLYQGVNCTEVPVAIHADQLTPTWRVYSTGSNVFQTRAGCLIGAEHVNNSYECDIPIGAGICASYQTQTNSPRRARSVASQSIIAYTMSLGAENSVAYSNNSIAIPTNFTISVTTEILPVSMTKTSVDCTMYICGDSTECSNLLLQYGSFCTQLNRALTGIAVEQDKNTQEVFAQVKQIYKTPPIKDFGGFNFSQILPDPSKPSKRSFIEDLLFNKVTLADAGFIKQYGDCLGDIAARDLICAQKFNGLTVLPPLLTDEMIAQYTSALLAGTITSGWTFGAGAALQIPFAMQMAYRFNGIGVTQNVLYENQKLIANQFNSAIGKIQDSLSSTASALGKLQDVVNQNAQALNTLVKQLSSNFGAISSVLNDILSRLDPPEAEVQIDRLITGRLQSLQTYVTQQLIRAAEIRASANLAATKMSECVLGQSKRVDFCGKGYHLMSFPQSAPHGVVFLHVTYVPAQEKNFTTAPAICHDGKAHFPREGVFVSNGTHWFVTQRNFYEPQIITTDNTFVSGNCDVVIGIVNNTVYDPLQPELDSFKEELDKYFKNHTSPDVDLGDISGINASVVNIQKEIDRLNEVAKNLNESLIDLQELGKYEQYIKWPWYIWLGFIAGLIAIVMVTIMLCCMTSCCSCLKGCCSCGSCCKFDEDDSEPVLKGVKLHYT

SEQ ID NO: 22747 - protein, 1271 aa, Artificial Sequence
  SARS-CoV-2/Wuhan/WIV05/2019__EPI_ISL_402128 spike protein (1-1273)(H69del_V70del_D614G)
MFVFLVLLPLVSSQCVNLTTRTQLPPAYTNSFTRGVYYPDKVFRSSVLHSTQDLFLPFFSNVTWFHAISGTNGTKRFDNPVLPFNDGVYFASTEKSNIIRGWIFGTTLDSKTQSLLIVNNATNVVIKVCEFQFCNDPFLGVYYHKNNKSWMESEFRVYSSANNCTFEYVSQPFLMDLEGKQGNFKNLREFVFKNIDGYFKIYSKHTPINLVRDLPQGFSALEPLVDLPIGINITRFQTLLALHRSYLTPGDSSSGWTAGAAAYYVGYLQPRTFLLKYNENGTITDAVDCALDPLSETKCTLKSFTVEKGIYQTSNFRVQPTESIVRFPNITNLCPFGEVFNATRFASVYAWNRKRISNCVADYSVLYNSASFSTFKCYGVSPTKLNDLCFTNVYADSFVIRGDEVRQIAPGQTGKIADYNYKLPDDFTGCVIAWNSNNLDSKVGGNYNYLYRLFRKSNLKPFERDISTEIYQAGSTPCNGVEGFNCYFPLQSYGFQPTNGVGYQPYRVVVLSFELLHAPATVCGPKKSTNLVKNKCVNFNFNGLTGTGVLTESNKKFLPFQQFGRDIADTTDAVRDPQTLEILDITPCSFGGVSVITPGTNTSNQVAVLYQGVNCTEVPVAIHADQLTPTWRVYSTGSNVFQTRAGCLIGAEHVNNSYECDIPIGAGICASYQTQTNSPRRARSVASQSIIAYTMSLGAENSVAYSNNSIAIPTNFTISVTTEILPVSMTKTSVDCTMYICGDSTECSNLLLQYGSFCTQLNRALTGIAVEQDKNTQEVFAQVKQIYKTPPIKDFGGFNFSQILPDPSKPSKRSFIEDLLFNKVTLADAGFIKQYGDCLGDIAARDLICAQKFNGLTVLPPLLTDEMIAQYTSALLAGTITSGWTFGAGAALQIPFAMQMAYRFNGIGVTQNVLYENQKLIANQFNSAIGKIQDSLSSTASALGKLQDVVNQNAQALNTLVKQLSSNFGAISSVLNDILSRLDKVEAEVQIDRLITGRLQSLQTYVTQQLIRAAEIRASANLAATKMSECVLGQSKRVDFCGKGYHLMSFPQSAPHGVVFLHVTYVPAQEKNFTTAPAICHDGKAHFPREGVFVSNGTHWFVTQRNFYEPQIITTDNTFVSGNCDVVIGIVNNTVYDPLQPELDSFKEELDKYFKNHTSPDVDLGDISGINASVVNIQKEIDRLNEVAKNLNESLIDLQELGKYEQYIKWPWYIWLGFIAGLIAIVMVTIMLCCMTSCCSCLKGCCSCGSCCKFDEDDSEPVLKGVKLHYT

SEQ ID NO: 22748 - protein, 1271 aa, Artificial Sequence
  SARS-CoV-2/Wuhan/WIV05/2019__EPI_ISL_402128 spike protein (1-1273)(K986P_V987P_H69del_V70del_D614G)
MFVFLVLLPLVSSQCVNLTTRTQLPPAYTNSFTRGVYYPDKVFRSSVLHSTQDLFLPFFSNVTWFHAISGTNGTKRFDNPVLPFNDGVYFASTEKSNIIRGWIFGTTLDSKTQSLLIVNNATNVVIKVCEFQFCNDPFLGVYYHKNNKSWMESEFRVYSSANNCTFEYVSQPFLMDLEGKQGNFKNLREFVFKNIDGYFKIYSKHTPINLVRDLPQGFSALEPLVDLPIGINITRFQTLLALHRSYLTPGDSSSGWTAGAAAYYVGYLQPRTFLLKYNENGTITDAVDCALDPLSETKCTLKSFTVEKGIYQTSNFRVQPTESIVRFPNITNLCPFGEVFNATRFASVYAWNRKRISNCVADYSVLYNSASFSTFKCYGVSPTKLNDLCFTNVYADSFVIRGDEVRQIAPGQTGKIADYNYKLPDDFTGCVIAWNSNNLDSKVGGNYNYLYRLFRKSNLKPFERDISTEIYQAGSTPCNGVEGFNCYFPLQSYGFQPTNGVGYQPYRVVVLSFELLHAPATVCGPKKSTNLVKNKCVNFNFNGLTGTGVLTESNKKFLPFQQFGRDIADTTDAVRDPQTLEILDITPCSFGGVSVITPGTNTSNQVAVLYQGVNCTEVPVAIHADQLTPTWRVYSTGSNVFQTRAGCLIGAEHVNNSYECDIPIGAGICASYQTQTNSPRRARSVASQSIIAYTMSLGAENSVAYSNNSIAIPTNFTISVTTEILPVSMTKTSVDCTMYICGDSTECSNLLLQYGSFCTQLNRALTGIAVEQDKNTQEVFAQVKQIYKTPPIKDFGGFNFSQILPDPSKPSKRSFIEDLLFNKVTLADAGFIKQYGDCLGDIAARDLICAQKFNGLTVLPPLLTDEMIAQYTSALLAGTITSGWTFGAGAALQIPFAMQMAYRFNGIGVTQNVLYENQKLIANQFNSAIGKIQDSLSSTASALGKLQDVVNQNAQALNTLVKQLSSNFGAISSVLNDILSRLDPPEAEVQIDRLITGRLQSLQTYVTQQLIRAAEIRASANLAATKMSECVLGQSKRVDFCGKGYHLMSFPQSAPHGVVFLHVTYVPAQEKNFTTAPAICHDGKAHFPREGVFVSNGTHWFVTQRNFYEPQIITTDNTFVSGNCDVVIGIVNNTVYDPLQPELDSFKEELDKYFKNHTSPDVDLGDISGINASVVNIQKEIDRLNEVAKNLNESLIDLQELGKYEQYIKWPWYIWLGFIAGLIAIVMVTIMLCCMTSCCSCLKGCCSCGSCCKFDEDDSEPVLKGVKLHYT

SEQ ID NO: 22749 - protein, 1273 aa, Artificial Sequence
  SARS-CoV-2/Wuhan/WIV05/2019__EPI_ISL_402128 spike protein (1-1273)(Y453F_D614G)
MFVFLVLLPLVSSQCVNLTTRTQLPPAYTNSFTRGVYYPDKVFRSSVLHSTQDLFLPFFSNVTWFHAIHVSGTNGTKRFDNPVLPFNDGVYFASTEKSNIIRGWIFGTTLDSKTQSLLIVNNATNVVIKVCEFQFCNDPFLGVYYHKNNKSWMESEFRVYSSANNCTFEYVSQPFLMDLEGKQGNFKNLREFVFKNIDGYFKIYSKHTPINLVRDLPQGFSALEPLVDLPIGINITRFQTLLALHRSYLTPGDSSSGWTAGAAAYYVGYLQPRTFLLKYNENGTITDAVDCALDPLSETKCTLKSFTVEKGIYQTSNFRVQPTESIVRFPNITNLCPFGEVFNATRFASVYAWNRKRISNCVADYSVLYNSASFSTFKCYGVSPTKLNDLCFTNVYADSFVIRGDEVRQIAPGQTGKIADYNYKLPDDFTGCVIAWNSNNLDSKVGGNYNYLFRLFRKSNLKPFERDISTEIYQAGSTPCNGVEGFNCYFPLQSYGFQPTNGVGYQPYRVVVLSFELLHAPATVCGPKKSTNLVKNKCVNFNFNGLTGTGVLTESNKKFLPFQQFGRDIADTTDAVRDPQTLEILDITPCSFGGVSVITPGTNTSNQVAVLYQGVNCTEVPVAIHADQLTPTWRVYSTGSNVFQTRAGCLIGAEHVNNSYECDIPIGAGICASYQTQTNSPRRARSVASQSIIAYTMSLGAENSVAYSNNSIAIPTNFTISVTTEILPVSMTKTSVDCTMYICGDSTECSNLLLQYGSFCTQLNRALTGIAVEQDKNTQEVFAQVKQIYKTPPIKDFGGFNFSQILPDPSKPSKRSFIEDLLFNKVTLADAGFIKQYGDCLGDIAARDLICAQKFNGLTVLPPLLTDEMIAQYTSALLAGTITSGWTFGAGAALQIPFAMQMAYRFNGIGVTQNVLYENQKLIANQFNSAIGKIQDSLSSTASALGKLQDVVNQNAQALNTLVKQLSSNFGAISSVLNDILSRLDKVEAEVQIDRLITGRLQSLQTYVTQQLIRAAEIRASANLAATKMSECVLGQSKRVDFCGKGYHLMSFPQSAPHGVVFLHVTYVPAQEKNFTTAPAICHDGKAHFPREGVFVSNGTHWFVTQRNFYEPQIITTDNTFVSGNCDVVIGIVNNTVYDPLQPELDSFKEELDKYFKNHTSPDVDLGDISGINASVVNIQKEIDRLNEVAKNLNESLIDLQELGKYEQYIKWPWYIWLGFIAGLIAIVMVTIMLCCMTSCCSCLKGCCSCGSCCKFDEDDSEPVLKGVKLHYT

SEQ ID NO: 22750 - protein, 1273 aa, Artificial Sequence
  SARS-CoV-2/Wuhan/WIV05/2019__EPI_ISL_402128 spike protein (1-1273)(K986P_V987P_Y453F_D614G)
MFVFLVLLPLVSSQCVNLTTRTQLPPAYTNSFTRGVYYPDKVFRSSVLHSTQDLFLPFFSNVTWFHAIHVSGTNGTKRFDNPVLPFNDGVYFASTEKSNIIRGWIFGTTLDSKTQSLLIVNNATNVVIKVCEFQFCNDPFLGVYYHKNNKSWMESEFRVYSSANNCTFEYVSQPFLMDLEGKQGNFKNLREFVFKNIDGYFKIYSKHTPINLVRDLPQGFSALEPLVDLPIGINITRFQTLLALHRSYLTPGDSSSGWTAGAAAYYVGYLQPRTFLLKYNENGTITDAVDCALDPLSETKCTLKSFTVEKGIYQTSNFRVQPTESIVRFPNITNLCPFGEVFNATRFASVYAWNRKRISNCVADYSVLYNSASFSTFKCYGVSPTKLNDLCFTNVYADSFVIRGDEVRQIAPGQTGKIADYNYKLPDDFTGCVIAWNSNNLDSKVGGNYNYLFRLFRKSNLKPFERDISTEIYQAGSTPCNGVEGFNCYFPLQSYGFQPTNGVGYQPYRVVVLSFELLHAPATVCGPKKSTNLVKNKCVNFNFNGLTGTGVLTESNKKFLPFQQFGRDIADTTDAVRDPQTLEILDITPCSFGGVSVITPGTNTSNQVAVLYQGVNCTEVPVAIHADQLTPTWRVYSTGSNVFQTRAGCLIGAEHVNNSYECDIPIGAGICASYQTQTNSPRRARSVASQSIIAYTMSLGAENSVAYSNNSIAIPTNFTISVTTEILPVSMTKTSVDCTMYICGDSTECSNLLLQYGSFCTQLNRALTGIAVEQDKNTQEVFAQVKQIYKTPPIKDFGGFNFSQILPDPSKPSKRSFIEDLLFNKVTLADAGFIKQYGDCLGDIAARDLICAQKFNGLTVLPPLLTDEMIAQYTSALLAGTITSGWTFGAGAALQIPFAMQMAYRFNGIGVTQNVLYENQKLIANQFNSAIGKIQDSLSSTASALGKLQDVVNQNAQALNTLVKQLSSNFGAISSVLNDILSRLDPPEAEVQIDRLITGRLQSLQTYVTQQLIRAAEIRASANLAATKMSECVLGQSKRVDFCGKGYHLMSFPQSAPHGVVFLHVTYVPAQEKNFTTAPAICHDGKAHFPREGVFVSNGTHWFVTQRNFYEPQIITTDNTFVSGNCDVVIGIVNNTVYDPLQPELDSFKEELDKYFKNHTSPDVDLGDISGINASVVNIQKEIDRLNEVAKNLNESLIDLQELGKYEQYIKWPWYIWLGFIAGLIAIVMVTIMLCCMTSCCSCLKGCCSCGSCCKFDEDDSEPVLKGVKLHYT

SEQ ID NO: 22751 - protein, 1273 aa, Artificial Sequence
  SARS-CoV-2/Wuhan/WIV05/2019__EPI_ISL_402128 spike protein (1-1273)(D614G_I692V)
MFVFLVLLPLVSSQCVNLTTRTQLPPAYTNSFTRGVYYPDKVFRSSVLHSTQDLFLPFFSNVTWFHAIHVSGTNGTKRFDNPVLPFNDGVYFASTEKSNIIRGWIFGTTLDSKTQSLLIVNNATNVVIKVCEFQFCNDPFLGVYYHKNNKSWMESEFRVYSSANNCTFEYVSQPFLMDLEGKQGNFKNLREFVFKNIDGYFKIYSKHTPINLVRDLPQGFSALEPLVDLPIGINITRFQTLLALHRSYLTPGDSSSGWTAGAAAYYVGYLQPRTFLLKYNENGTITDAVDCALDPLSETKCTLKSFTVEKGIYQTSNFRVQPTESIVRFPNITNLCPFGEVFNATRFASVYAWNRKRISNCVADYSVLYNSASFSTFKCYGVSPTKLNDLCFTNVYADSFVIRGDEVRQIAPGQTGKIADYNYKLPDDFTGCVIAWNSNNLDSKVGGNYNYLYRLFRKSNLKPFERDISTEIYQAGSTPCNGVEGFNCYFPLQSYGFQPTNGVGYQPYRVVVLSFELLHAPATVCGPKKSTNLVKNKCVNFNFNGLTGTGVLTESNKKFLPFQQFGRDIADTTDAVRDPQTLEILDITPCSFGGVSVITPGTNTSNQVAVLYQGVNCTEVPVAIHADQLTPTWRVYSTGSNVFQTRAGCLIGAEHVNNSYECDIPIGAGICASYQTQTNSPRRARSVASQSVIAYTMSLGAENSVAYSNNSIAIPTNFTISVTTEILPVSMTKTSVDCTMYICGDSTECSNLLLQYGSFCTQLNRALTGIAVEQDKNTQEVFAQVKQIYKTPPIKDFGGFNFSQILPDPSKPSKRSFIEDLLFNKVTLADAGFIKQYGDCLGDIAARDLICAQKFNGLTVLPPLLTDEMIAQYTSALLAGTITSGWTFGAGAALQIPFAMQMAYRFNGIGVTQNVLYENQKLIANQFNSAIGKIQDSLSSTASALGKLQDVVNQNAQALNTLVKQLSSNFGAISSVLNDILSRLDKVEAEVQIDRLITGRLQSLQTYVTQQLIRAAEIRASANLAATKMSECVLGQSKRVDFCGKGYHLMSFPQSAPHGVVFLHVTYVPAQEKNFTTAPAICHDGKAHFPREGVFVSNGTHWFVTQRNFYEPQIITTDNTFVSGNCDVVIGIVNNTVYDPLQPELDSFKEELDKYFKNHTSPDVDLGDISGINASVVNIQKEIDRLNEVAKNLNESLIDLQELGKYEQYIKWPWYIWLGFIAGLIAIVMVTIMLCCMTSCCSCLKGCCSCGSCCKFDEDDSEPVLKGVKLHYT

SEQ ID NO: 22752 - protein, 1273 aa, Artificial Sequence
  SARS-CoV-2/Wuhan/WIV05/2019__EPI_ISL_402128 spike protein (1-1273)(K986P_V987P_D614G_I692V)
MFVFLVLLPLVSSQCVNLTTRTQLPPAYTNSFTRGVYYPDKVFRSSVLHSTQDLFLPFFSNVTWFHAIHVSGTNGTKRFDNPVLPFNDGVYFASTEKSNIIRGWIFGTTLDSKTQSLLIVNNATNVVIKVCEFQFCNDPFLGVYYHKNNKSWMESEFRVYSSANNCTFEYVSQPFLMDLEGKQGNFKNLREFVFKNIDGYFKIYSKHTPINLVRDLPQGFSALEPLVDLPIGINITRFQTLLALHRSYLTPGDSSSGWTAGAAAYYVGYLQPRTFLLKYNENGTITDAVDCALDPLSETKCTLKSFTVEKGIYQTSNFRVQPTESIVRFPNITNLCPFGEVFNATRFASVYAWNRKRISNCVADYSVLYNSASFSTFKCYGVSPTKLNDLCFTNVYADSFVIRGDEVRQIAPGQTGKIADYNYKLPDDFTGCVIAWNSNNLDSKVGGNYNYLYRLFRKSNLKPFERDISTEIYQAGSTPCNGVEGFNCYFPLQSYGFQPTNGVGYQPYRVVVLSFELLHAPATVCGPKKSTNLVKNKCVNFNFNGLTGTGVLTESNKKFLPFQQFGRDIADTTDAVRDPQTLEILDITPCSFGGVSVITPGTNTSNQVAVLYQGVNCTEVPVAIHADQLTPTWRVYSTGSNVFQTRAGCLIGAEHVNNSYECDIPIGAGICASYQTQTNSPRRARSVASQSVIAYTMSLGAENSVAYSNNSIAIPTNFTISVTTEILPVSMTKTSVDCTMYICGDSTECSNLLLQYGSFCTQLNRALTGIAVEQDKNTQEVFAQVKQIYKTPPIKDFGGFNFSQILPDPSKPSKRSFIEDLLFNKVTLADAGFIKQYGDCLGDIAARDLICAQKFNGLTVLPPLLTDEMIAQYTSALLAGTITSGWTFGAGAALQIPFAMQMAYRFNGIGVTQNVLYENQKLIANQFNSAIGKIQDSLSSTASALGKLQDVVNQNAQALNTLVKQLSSNFGAISSVLNDILSRLDPPEAEVQIDRLITGRLQSLQTYVTQQLIRAAEIRASANLAATKMSECVLGQSKRVDFCGKGYHLMSFPQSAPHGVVFLHVTYVPAQEKNFTTAPAICHDGKAHFPREGVFVSNGTHWFVTQRNFYEPQIITTDNTFVSGNCDVVIGIVNNTVYDPLQPELDSFKEELDKYFKNHTSPDVDLGDISGINASVVNIQKEIDRLNEVAKNLNESLIDLQELGKYEQYIKWPWYIWLGFIAGLIAIVMVTIMLCCMTSCCSCLKGCCSCGSCCKFDEDDSEPVLKGVKLHYT

SEQ ID NO: 22753 - protein, 1273 aa, Artificial Sequence; identical to SEQ ID NO: 327
  SARS-CoV-2/Wuhan/WIV05/2019__EPI_ISL_402128 spike protein (1-1273)(D614G_M1229I)

SEQ ID NO: 22754 - protein, 1273 aa, Artificial Sequence; identical to SEQ ID NO: 394
  SARS-CoV-2/Wuhan/WIV05/2019__EPI_ISL_402128 spike protein (1-1273)(K986P_V987P_D614G_M1229I)

SEQ ID NO: 22755 - protein, 1271 aa, Artificial Sequence
  SARS-CoV-2/Wuhan/WIV05/2019__EPI_ISL_402128 spike protein (1-1273)(H69del_V70del_A222V_Y453F_S477N_D614G_I692V)
MFVFLVLLPLVSSQCVNLTTRTQLPPAYTNSFTRGVYYPDKVFRSSVLHSTQDLFLPFFSNVTWFHAISGTNGTKRFDNPVLPFNDGVYFASTEKSNIIRGWIFGTTLDSKTQSLLIVNNATNVVIKVCEFQFCNDPFLGVYYHKNNKSWMESEFRVYSSANNCTFEYVSQPFLMDLEGKQGNFKNLREFVFKNIDGYFKIYSKHTPINLVRDLPQGFSVLEPLVDLPIGINITRFQTLLALHRSYLTPGDSSSGWTAGAAAYYVGYLQPRTFLLKYNENGTITDAVDCALDPLSETKCTLKSFTVEKGIYQTSNFRVQPTESIVRFPNITNLCPFGEVFNATRFASVYAWNRKRISNCVADYSVLYNSASFSTFKCYGVSPTKLNDLCFTNVYADSFVIRGDEVRQIAPGQTGKIADYNYKLPDDFTGCVIAWNSNNLDSKVGGNYNYLFRLFRKSNLKPFERDISTEIYQAGNTPCNGVEGFNCYFPLQSYGFQPTNGVGYQPYRVVVLSFELLHAPATVCGPKKSTNLVKNKCVNFNFNGLTGTGVLTESNKKFLPFQQFGRDIADTTDAVRDPQTLEILDITPCSFGGVSVITPGTNTSNQVAVLYQGVNCTEVPVAIHADQLTPTWRVYSTGSNVFQTRAGCLIGAEHVNNSYECDIPIGAGICASYQTQTNSPRRARSVASQSVIAYTMSLGAENSVAYSNNSIAIPTNFTISVTTEILPVSMTKTSVDCTMYICGDSTECSNLLLQYGSFCTQLNRALTGIAVEQDKNTQEVFAQVKQIYKTPPIKDFGGFNFSQILPDPSKPSKRSFIEDLLFNKVTLADAGFIKQYGDCLGDIAARDLICAQKFNGLTVLPPLLTDEMIAQYTSALLAGTITSGWTFGAGAALQIPFAMQMAYRFNGIGVTQNVLYENQKLIANQFNSAIGKIQDSLSSTASALGKLQDVVNQNAQALNTLVKQLSSNFGAISSVLNDILSRLDKVEAEVQIDRLITGRLQSLQTYVTQQLIRAAEIRASANLAATKMSECVLGQSKRVDFCGKGYHLMSFPQSAPHGVVFLHVTYVPAQEKNFTTAPAICHDGKAHFPREGVFVSNGTHWFVTQRNFYEPQIITTDNTFVSGNCDVVIGIVNNTVYDPLQPELDSFKEELDKYFKNHTSPDVDLGDISGINASVVNIQKEIDRLNEVAKNLNESLIDLQELGKYEQYIKWPWYIWLGFIAGLIAIVMVTIMLCCMTSCCSCLKGCCSCGSCCKFDEDDSEPVLKGVKLHYT

SEQ ID NO: 22756 - protein, 1271 aa, Artificial Sequence
  SARS-CoV-2/Wuhan/WIV05/2019__EPI_ISL_402128 spike protein (1-1273)(K986P_V987P_H69del_V70del_A222V_Y453F_S477N_D614G_I692V)
MFVFLVLLPLVSSQCVNLTTRTQLPPAYTNSFTRGVYYPDKVFRSSVLHSTQDLFLPFFSNVTWFHAISGTNGTKRFDNPVLPFNDGVYFASTEKSNIIRGWIFGTTLDSKTQSLLIVNNATNVVIKVCEFQFCNDPFLGVYYHKNNKSWMESEFRVYSSANNCTFEYVSQPFLMDLEGKQGNFKNLREFVFKNIDGYFKIYSKHTPINLVRDLPQGFSVLEPLVDLPIGINITRFQTLLALHRSYLTPGDSSSGWTAGAAAYYVGYLQPRTFLLKYNENGTITDAVDCALDPLSETKCTLKSFTVEKGIYQTSNFRVQPTESIVRFPNITNLCPFGEVFNATRFASVYAWNRKRISNCVADYSVLYNSASFSTFKCYGVSPTKLNDLCFTNVYADSFVIRGDEVRQIAPGQTGKIADYNYKLPDDFTGCVIAWNSNNLDSKVGGNYNYLFRLFRKSNLKPFERDISTEIYQAGNTPCNGVEGFNCYFPLQSYGFQPTNGVGYQPYRVVVLSFELLHAPATVCGPKKSTNLVKNKCVNFNFNGLTGTGVLTESNKKFLPFQQFGRDIADTTDAVRDPQTLEILDITPCSFGGVSVITPGTNTSNQVAVLYQGVNCTEVPVAIHADQLTPTWRVYSTGSNVFQTRAGCLIGAEHVNNSYECDIPIGAGICASYQTQTNSPRRARSVASQSVIAYTMSLGAENSVAYSNNSIAIPTNFTISVTTEILPVSMTKTSVDCTMYICGDSTECSNLLLQYGSFCTQLNRALTGIAVEQDKNTQEVFAQVKQIYKTPPIKDFGGFNFSQILPDPSKPSKRSFIEDLLFNKVTLADAGFIKQYGDCLGDIAARDLICAQKFNGLTVLPPLLTDEMIAQYTSALLAGTITSGWTFGAGAALQIPFAMQMAYRFNGIGVTQNVLYENQKLIANQFNSAIGKIQDSLSSTASALGKLQDVVNQNAQALNTLVKQLSSNFGAISSVLNDILSRLDPPEAEVQIDRLITGRLQSLQTYVTQQLIRAAEIRASANLAATKMSECVLGQSKRVDFCGKGYHLMSFPQSAPHGVVFLHVTYVPAQEKNFTTAPAICHDGKAHFPREGVFVSNGTHWFVTQRNFYEPQIITTDNTFVSGNCDVVIGIVNNTVYDPLQPELDSFKEELDKYFKNHTSPDVDLGDISGINASVVNIQKEIDRLNEVAKNLNESLIDLQELGKYEQYIKWPWYIWLGFIAGLIAIVMVTIMLCCMTSCCSCLKGCCSCGSCCKFDEDDSEPVLKGVKLHYT

SEQ ID NO: 22757 - protein, 1271 aa, Artificial Sequence
  SARS-CoV-2/Wuhan/WIV05/2019__EPI_ISL_402128 spike protein (1-1273)(H69del_V70del_Y453F_D614G_I692V_M1229I)
MFVFLVLLPLVSSQCVNLTTRTQLPPAYTNSFTRGVYYPDKVFRSSVLHSTQDLFLPFFSNVTWFHAISGTNGTKRFDNPVLPFNDGVYFASTEKSNIIRGWIFGTTLDSKTQSLLIVNNATNVVIKVCEFQFCNDPFLGVYYHKNNKSWMESEFRVYSSANNCTFEYVSQPFLMDLEGKQGNFKNLREFVFKNIDGYFKIYSKHTPINLVRDLPQGFSALEPLVDLPIGINITRFQTLLALHRSYLTPGDSSSGWTAGAAAYYVGYLQPRTFLLKYNENGTITDAVDCALDPLSETKCTLKSFTVEKGIYQTSNFRVQPTESIVRFPNITNLCPFGEVFNATRFASVYAWNRKRISNCVADYSVLYNSASFSTFKCYGVSPTKLNDLCFTNVYADSFVIRGDEVRQIAPGQTGKIADYNYKLPDDFTGCVIAWNSNNLDSKVGGNYNYLFRLFRKSNLKPFERDISTEIYQAGSTPCNGVEGFNCYFPLQSYGFQPTNGVGYQPYRVVVLSFELLHAPATVCGPKKSTNLVKNKCVNFNFNGLTGTGVLTESNKKFLPFQQFGRDIADTTDAVRDPQTLEILDITPCSFGGVSVITPGTNTSNQVAVLYQGVNCTEVPVAIHADQLTPTWRVYSTGSNVFQTRAGCLIGAEHVNNSYECDIPIGAGICASYQTQTNSPRRARSVASQSVIAYTMSLGAENSVAYSNNSIAIPTNFTISVTTEILPVSMTKTSVDCTMYICGDSTECSNLLLQYGSFCTQLNRALTGIAVEQDKNTQEVFAQVKQIYKTPPIKDFGGFNFSQILPDPSKPSKRSFIEDLLFNKVTLADAGFIKQYGDCLGDIAARDLICAQKFNGLTVLPPLLTDEMIAQYTSALLAGTITSGWTFGAGAALQIPFAMQMAYRFNGIGVTQNVLYENQKLIANQFNSAIGKIQDSLSSTASALGKLQDVVNQNAQALNTLVKQLSSNFGAISSVLNDILSRLDKVEAEVQIDRLITGRLQSLQTYVTQQLIRAAEIRASANLAATKMSECVLGQSKRVDFCGKGYHLMSFPQSAPHGVVFLHVTYVPAQEKNFTTAPAICHDGKAHFPREGVFVSNGTHWFVTQRNFYEPQIITTDNTFVSGNCDVVIGIVNNTVYDPLQPELDSFKEELDKYFKNHTSPDVDLGDISGINASVVNIQKEIDRLNEVAKNLNESLIDLQELGKYEQYIKWPWYIWLGFIAGLIAIVIVTIMLCCMTSCCSCLKGCCSCGSCCKFDEDDSEPVLKGVKLHYT

SEQ ID NO: 22758 - protein, 1271 aa, Artificial Sequence
  SARS-CoV-2/Wuhan/WIV05/2019__EPI_ISL_402128 spike protein (1-1273)(K986P_V987P_H69del_V70del_Y453F_D614G_I692V_M1229I)
MFVFLVLLPLVSSQCVNLTTRTQLPPAYTNSFTRGVYYPDKVFRSSVLHSTQDLFLPFFSNVTWFHAISGTNGTKRFDNPVLPFNDGVYFASTEKSNIIRGWIFGTTLDSKTQSLLIVNNATNVVIKVCEFQFCNDPFLGVYYHKNNKSWMESEFRVYSSANNCTFEYVSQPFLMDLEGKQGNFKNLREFVFKNIDGYFKIYSKHTPINLVRDLPQGFSALEPLVDLPIGINITRFQTLLALHRSYLTPGDSSSGWTAGAAAYYVGYLQPRTFLLKYNENGTITDAVDCALDPLSETKCTLKSFTVEKGIYQTSNFRVQPTESIVRFPNITNLCPFGEVFNATRFASVYAWNRKRISNCVADYSVLYNSASFSTFKCYGVSPTKLNDLCFTNVYADSFVIRGDEVRQIAPGQTGKIADYNYKLPDDFTGCVIAWNSNNLDSKVGGNYNYLFRLFRKSNLKPFERDISTEIYQAGSTPCNGVEGFNCYFPLQSYGFQPTNGVGYQPYRVVVLSFELLHAPATVCGPKKSTNLVKNKCVNFNFNGLTGTGVLTESNKKFLPFQQFGRDIADTTDAVRDPQTLEILDITPCSFGGVSVITPGTNTSNQVAVLYQGVNCTEVPVAIHADQLTPTWRVYSTGSNVFQTRAGCLIGAEHVNNSYECDIPIGAGICASYQTQTNSPRRARSVASQSVIAYTMSLGAENSVAYSNNSIAIPTNFTISVTTEILPVSMTKTSVDCTMYICGDSTECSNLLLQYGSFCTQLNRALTGIAVEQDKNTQEVFAQVKQIYKTPPIKDFGGFNFSQILPDPSKPSKRSFIEDLLFNKVTLADAGFIKQYGDCLGDIAARDLICAQKFNGLTVLPPLLTDEMIAQYTSALLAGTITSGWTFGAGAALQIPFAMQMAYRFNGIGVTQNVLYENQKLIANQFNSAIGKIQDSLSSTASALGKLQDVVNQNAQALNTLVKQLSSNFGAISSVLNDILSRLDPPEAEVQIDRLITGRLQSLQTYVTQQLIRAAEIRASANLAATKMSECVLGQSKRVDFCGKGYHLMSFPQSAPHGVVFLHVTYVPAQEKNFTTAPAICHDGKAHFPREGVFVSNGTHWFVTQRNFYEPQIITTDNTFVSGNCDVVIGIVNNTVYDPLQPELDSFKEELDKYFKNHTSPDVDLGDISGINASVVNIQKEIDRLNEVAKNLNESLIDLQELGKYEQYIKWPWYIWLGFIAGLIAIVIVTIMLCCMTSCCSCLKGCCSCGSCCKFDEDDSEPVLKGVKLHYT

SEQ ID NO: 22759 - RNA, 3822 nt, Artificial Sequence
  SARS-CoV-2/Wuhan/WIV05/2019__EPI_ISL_402128 spike protein CDS gc (1-1273)(K986P_V987P_F817P_A892P_A899P_A942P)
auguucguguuccugguccuccugccccuggugagcucccagugcgugaaccucaccacccgcacgcagcugccgcccgccuacaccaacagcuucacccggggcgucuacuaccccgacaagguguuccgcuccagcgugcugcacuccacccaggaccucuuccugcccuucuucagcaacgucacgugguuccacgccauccacguguccgggaccaacggcaccaagcgguucgacaacccggugcugcccuucaacgacggggucuacuucgcgagcaccgagaaguccaacaucauccgcggcuggaucuucgggacgacccucgacagcaagacccagucccugcugaucgugaacaacgccaccaacguggucaucaaggugugcgaguuccaguucugcaacgaccccuuccucggcguguacuaccacaagaacaacaagagcuggauggaguccgaguuccgggucuacagcuccgccaacaacugcacguucgaguacgugagccagcccuuccugauggaccuggagggcaagcaggggaacuucaagaaccuccgcgaguucguguucaagaacaucgacggcuacuucaagaucuacuccaagcacaccccgaucaaccugguccgggaccugccccagggguucagcgcccucgagccccugguggaccugcccaucggcaucaacaucacccgcuuccagacccuccuggcccugcaccgguccuaccucacgccgggggacagcagcuccggcuggaccgcgggcgccgccgccuacuacgugggguaccugcagccccgcaccuuccugcucaaguacaacgagaacggcaccaucacggacgcggucgacugcgcccuggacccccugagcgagaccaagugcacccucaaguccuucaccguggagaaggggaucuaccagacgagcaacuuccgggugcagcccaccgaguccaucguccgcuucccgaacaucaccaaccugugccccuucggcgagguguucaacgccacccgguucgccagcgucuacgccuggaaccgcaagcggaucuccaacugcguggcggacuacagcgugcuguacaacuccgccagcuucuccacguucaagugcuacggcgucagccccaccaagcucaacgaccugugcuucaccaacguguacgccgacuccuucgugauccgcggggacgagguccggcagaucgcccccggccagaccgggaagaucgccgacuacaacuacaagcugccggacgacuucacgggcugcgugaucgcguggaacagcaacaaccucgacuccaaggucgggggcaacuacaacuaccuguaccgccuguuccgcaagagcaaccucaagcccuucgagcgggacaucuccaccgagaucuaccaggccggcagcacccccugcaacgggguggagggcuucaacugcuacuucccccugcaguccuacggguuccagccgaccaacggcgugggguaccagcccuaccggguggucgugcugagcuucgagcuccugcacgcccccgccacggugugcggccccaagaaguccaccaaccuggucaagaacaagugcgugaacuucaacuucaacggccucaccgggaccggcgugcugaccgagagcaacaagaaguuccugccguuccagcaguucgggcgcgacaucgccgacacgaccgacgcgguccgcgacccccagacccuggagauccucgacaucacccccugcagcuucggcgggguguccgugaucacgccgggcaccaacaccagcaaccaggucgccgugcuguaccaggacgugaacugcaccgagguccccguggccauccacgccgaccagcugacgcccaccuggcggguguacuccaccggcagcaacgucuuccagacccgcgccgggugccucaucggcgcggagcacgugaacaacuccuacgagugcgacauccccaucggggccggcaucugcgccagcuaccagacgcagaccaacuccccgcggcgcgcccggagcguggcgucccagagcaucaucgccuacaccaugucccugggcgccgagaacagcgucgccuacuccaacaacagcaucgccauccccaccaacuucacgaucuccgugaccaccgagauccugcccgugagcaugaccaagacgagcgucgacugcaccauguacaucugcggggacuccaccgagugcagcaaccuccugcugcaguacggcuccuucugcacccagcucaaccgcgcgcugacggggaucgccguggagcaggacaagaacacccaggagguguucgcccaggucaagcagaucuacaagacgcccccgaucaaggacuucggcggguucaacuucagccagauccugcccgaccccuccaagcccagcaagcggucccccaucgaggaccuccuguucaacaaggugacccuggccgacgccggcuucaucaagcaguacggcgacugccucggggacaucgcggcccgcgaccugaucugcgcccagaaguucaacggccugaccgugcucccgccccugcugaccgacgagaugaucgcccaguacaccagcgcccuccuggcggggaccaucacguccggcuggaccuucggggccggccccgcccugcagauccccuucccgaugcagauggccuaccgguucaacggcaucggggucacccagaacgugcucuacgagaaccagaagcugaucgccaaccaguucaacagcgccaucggcaagauccaggacucccugagcuccacccccagcgcgcucgggaagcugcaggacguggucaaccagaacgcccaggcccugaacacgcucgugaagcagcuguccagcaacuucggcgccaucuccagcgugcugaacgacauccucucccgccuggacccgcccgaggccgaggugcagaucgaccggcugaucaccgggcgccuccagagccugcagaccuacgugacccagcagcugauccgggcggccgagauccgcgccagcgccaaccucgccgcgaccaagauguccgagugcguccugggccagagcaagcggguggacuucugcggcaagggguaccaccugauguccuucccccagagcgccccgcacggcguggucuuccuccacgugacguacguccccgcccaggagaagaacuucaccaccgcccccgcgaucugccacgacgggaaggcccacuucccccgcgagggcguguucguguccaacgggacccacugguucgucacgcagcggaacuucuacgagccgcagaucaucaccaccgacaacaccuucgugagcggcaacugcgacguggucaucggcaucgugaacaacacgguguacgacccccugcagcccgagcuggacuccuucaaggaggagcucgacaaguacuucaagaaccacaccagccccgacgucgaccugggggacaucuccggcaucaacgccagcguggugaacauccagaaggagaucgaccgccugaacgaggucgccaagaaccucaacgagucccugaucgaccugcaggagcucgggaaguacgagcaguacaucaaguggccgugguacaucuggcugggcuucaucgccggccugaucgcgaucgugauggugaccaucaugcucugcugcaugaccagcugcugcuccugccugaaggggugcugcagcugcggcuccugcugcaaguucgacgaggacgacagcgagcccguccugaagggggugaagcuccacuacacguga

SEQ ID NO: 22760 - RNA, 1152 nt, Artificial Sequence
  SARS-CoV-2/Wuhan/WIV05/2019__EPI_ISL_402128 spike protein CDS gc (1-15,334-528) Ferritin construct
auguucguguuccugguccuccugccccuggugagcucccagugcaaccugugccccuucggcgagguguucaacgccacccgguucgccagcgucuacgccuggaaccgcaagcggaucuccaacugcguggcggacuacagcgugcuguacaacuccgccagcuucuccacguucaagugcuacggcgucagccccaccaagcucaacgaccugugcuucaccaacguguacgccgacuccuucgugauccgcggggacgagguccggcagaucgcccccggccagaccgggaagaucgccgacuacaacuacaagcugccggacgacuucacgggcugcgugaucgcguggaacagcaacaaccucgacuccaaggucgggggcaacuacaacuaccuguaccgccuguuccgcaagagcaaccucaagcccuucgagcgggacaucuccaccgagaucuaccaggccggcagcacccccugcaacgggguggagggcuucaacugcuacuucccccugcaguccuacggguuccagccgaccaacggcgugggguaccagcccuaccggguggucgugcugagcuucgagcuccugcacgcccccgccacggugugcggccccaagggcggggguggaagcggcggggguggaagugacaucaucaagcuccugaacgagcaggucaacaaggagaugcaguccagcaaccuguacauguccaugagcuccuggugcuacacccacagccucgacggcgccgggcuguuccuguucgaccacgccgcggaggaguacgagcacgccaagaagcucaucaucuuccugaacgagaacaacgugcccgugcagcugaccuccaucagcgccccggagcacaaguucgagggccucacgcagaucuuccagaaggccuacgagcacgagcagcacaucuccgagagcaucaacaacaucguggaccacgccaucaaguccaaggaccacgcgaccuucaacuuccugcagugguacgucgccgagcagcacgaggaggaggugcuguucaaggacauccucgacaagaucgagcugaucgggaacgagaaccacggccuguaccucgccgaccaguacgugaaggggaucgccaagagccgcaaguccuga

SEQ ID NO: 22761 - RNA, 750 nt, Artificial Sequence
  SARS-CoV-2/Wuhan/WIV05/2019__EPI_ISL_402128 spike protein CDS gc (334-528) Foldon construct
augcccaugggcagccugcagccgcucgccacccuguaccugcucgggaugcugguggccuccguccuggcgaaccugugccccuucggcgagguguucaacgccacccgguucgccagcgucuacgccuggaaccgcaagcggaucuccaacugcguggcggacuacagcgugcuguacaacuccgccagcuucuccacguucaagugcuacggcgucagccccaccaagcucaacgaccugugcuucaccaacguguacgccgacuccuucgugauccgcggggacgagguccggcagaucgcccccggccagaccgggaagaucgccgacuacaacuacaagcugccggacgacuucacgggcugcgugaucgcguggaacagcaacaaccucgacuccaaggucgggggcaacuacaacuaccuguaccgccuguuccgcaagagcaaccucaagcccuucgagcgggacaucuccaccgagaucuaccaggccggcagcacccccugcaacgggguggagggcuucaacugcuacuucccccugcaguccuacggguuccagccgaccaacggcgugggguaccagcccuaccggguggucgugcugagcuucgagcuccugcacgcccccgccacggugugcggccccaagggcagcggcggguacauccccgaggccccgcgcgacggccaggccuacgugcggaaggacggcgaguggguccugcugagcaccuuccucuga

SEQ ID NO: 22762 - RNA, 1128 nt, Artificial Sequence
  SARS-CoV-2/Wuhan/WIV05/2019__EPI_ISL_402128 spike protein CDS gc (1-15,334-528) LumSynth construct
auguucguguuccugguccuccugccccuggugagcucccagugcaaccugugccccuucggcgagguguucaacgccacccgguucgccagcgucuacgccuggaaccgcaagcggaucuccaacugcguggcggacuacagcgugcuguacaacuccgccagcuucuccacguucaagugcuacggcgucagccccaccaagcucaacgaccugugcuucaccaacguguacgccgacuccuucgugauccgcggggacgagguccggcagaucgcccccggccagaccgggaagaucgccgacuacaacuacaagcugccggacgacuucacgggcugcgugaucgcguggaacagcaacaaccucgacuccaaggucgggggcaacuacaacuaccuguaccgccuguuccgcaagagcaaccucaagcccuucgagcgggacaucuccaccgagaucuaccaggccggcagcacccccugcaacgggguggagggcuucaacugcuacuucccccugcaguccuacggguuccagccgaccaacggcgugggguaccagcccuaccggguggucgugcugagcuucgagcuccugcacgcccccgccacggugugcggccccaagggcggcggcggcuccggaggcggagguagcgggggacagaucuacgagggcaagcugaccgccgaggggcuccgcuucggcaucguggccagccgguucaaccacgcgcuggucgaccgccugguggagggggccaucgacgccaucgugcggcacggcgggcgcgaggaggacaucacccucguccgggugcccggcuccugggagaucccgguggccgccggcgagcuggcccgcaaggaggacaucgacgcggucaucgccaucggggugcugauccggggcgccacgccccacuucgacuacaucgccagcgagguguccaaggggcucgcggaccugagccuggagcuccgcaagcccaucaccuucggcgucaucaccgccgacacccuggagcaggccaucgagcgggccgggacgaagcacggcaacaagggcugggaggccgcgcuguccgccaucgagauggccaaccucuucaagagccugcgcuga

SEQ ID NO: 22763 - RNA, 1089 nt, Artificial Sequence
  SARS-CoV-2/Wuhan/WIV05/2019__EPI_ISL_402128 spike protein CDS gc (334-528) LumSynth construct
augcagaucuacgagggcaagcugaccgccgaggggcuccgcuucggcaucguggccagccgguucaaccacgcgcuggucgaccgccugguggagggggccaucgacgccaucgugcggcacggcgggcgcgaggaggacaucacccucguccgggugcccggcuccugggagaucccgguggccgccggcgagcuggcccgcaaggaggacaucgacgcggucaucgccaucggggugcugauccggggcgccacgccccacuucgacuacaucgccagcgagguguccaaggggcucgcggaccugagccuggagcuccgcaagcccaucaccuucggcgucaucaccgccgacacccuggagcaggccaucgagcgggccgggacgaagcacggcaacaagggcugggaggccgcgcuguccgccaucgagauggccaaccucuucaagagccugcgcggcgggggcgggagcggcgggggcggcuccgggggcgggaaccugugccccuucggcgagguguucaacgccacccgguucgccagcgucuacgccuggaaccgcaagcggaucuccaacugcguggcggacuacagcgugcuguacaacuccgccagcuucuccacguucaagugcuacggcgucagccccaccaagcucaacgaccugugcuucaccaacguguacgccgacuccuucgugauccgcggggacgagguccggcagaucgcccccggccagaccgggaagaucgccgacuacaacuacaagcugccggacgacuucacgggcugcgugaucgcguggaacagcaacaaccucgacuccaaggucgggggcaacuacaacuaccuguaccgccuguuccgcaagagcaaccucaagcccuucgagcgggacaucuccaccgagaucuaccaggccggcagcacccccugcaacgggguggagggcuucaacugcuacuucccccugcaguccuacggguuccagccgaccaacggcgugggguaccagcccuaccggguggucgugcugagcuucgagcuccugcacgcccccgccacggugugcggccccaaguga

SEQ ID NO: 22764 - RNA, 3822 nt, Artificial Sequence
  SARS-CoV-2/Wuhan/WIV05/2019__EPI_ISL_402128 spike protein CDS gc (1-1273)(D614G)
auguucguguuccugguccuccugccccuggugagcucccagugcgugaaccucaccacccgcacgcagcugccgcccgccuacaccaacagcuucacccggggcgucuacuaccccgacaagguguuccgcuccagcgugcugcacuccacccaggaccucuuccugcccuucuucagcaacgucacgugguuccacgccauccacguguccgggaccaacggcaccaagcgguucgacaacccggugcugcccuucaacgacggggucuacuucgcgagcaccgagaaguccaacaucauccgcggcuggaucuucgggacgacccucgacagcaagacccagucccugcugaucgugaacaacgccaccaacguggucaucaaggugugcgaguuccaguucugcaacgaccccuuccucggcguguacuaccacaagaacaacaagagcuggauggaguccgaguuccgggucuacagcuccgccaacaacugcacguucgaguacgugagccagcccuuccugauggaccuggagggcaagcaggggaacuucaagaaccuccgcgaguucguguucaagaacaucgacggcuacuucaagaucuacuccaagcacaccccgaucaaccugguccgggaccugccccagggguucagcgcccucgagccccugguggaccugcccaucggcaucaacaucacccgcuuccagacccuccuggcccugcaccgguccuaccucacgccgggggacagcagcuccggcuggaccgcgggcgccgccgccuacuacgugggguaccugcagccccgcaccuuccugcucaaguacaacgagaacggcaccaucacggacgcggucgacugcgcccuggacccccugagcgagaccaagugcacccucaaguccuucaccguggagaaggggaucuaccagacgagcaacuuccgggugcagcccaccgaguccaucguccgcuucccgaacaucaccaaccugugccccuucggcgagguguucaacgccacccgguucgccagcgucuacgccuggaaccgcaagcggaucuccaacugcguggcggacuacagcgugcuguacaacuccgccagcuucuccacguucaagugcuacggcgucagccccaccaagcucaacgaccugugcuucaccaacguguacgccgacuccuucgugauccgcggggacgagguccggcagaucgcccccggccagaccgggaagaucgccgacuacaacuacaagcugccggacgacuucacgggcugcgugaucgcguggaacagcaacaaccucgacuccaaggucgggggcaacuacaacuaccuguaccgccuguuccgcaagagcaaccucaagcccuucgagcgggacaucuccaccgagaucuaccaggccggcagcacccccugcaacgggguggagggcuucaacugcuacuucccccugcaguccuacggguuccagccgaccaacggcgugggguaccagcccuaccggguggucgugcugagcuucgagcuccugcacgcccccgccacggugugcggccccaagaaguccaccaaccuggucaagaacaagugcgugaacuucaacuucaacggccucaccgggaccggcgugcugaccgagagcaacaagaaguuccugccguuccagcaguucgggcgcgacaucgccgacacgaccgacgcgguccgcgacccccagacccuggagauccucgacaucacccccugcagcuucggcgggguguccgugaucacgccgggcaccaacaccagcaaccaggucgccgugcuguaccagggcgugaacugcaccgagguccccguggccauccacgccgaccagcugacgcccaccuggcggguguacuccaccggcagcaacgucuuccagacccgcgccgggugccucaucggcgcggagcacgugaacaacuccuacgagugcgacauccccaucggggccggcaucugcgccagcuaccagacgcagaccaacuccccgcggcgcgcccggagcguggcgucccagagcaucaucgccuacaccaugucccugggcgccgagaacagcgucgccuacuccaacaacagcaucgccauccccaccaacuucacgaucuccgugaccaccgagauccugcccgugagcaugaccaagacgagcgucgacugcaccauguacaucugcggggacuccaccgagugcagcaaccuccugcugcaguacggcuccuucugcacccagcucaaccgcgcgcugacggggaucgccguggagcaggacaagaacacccaggagguguucgcccaggucaagcagaucuacaagacgcccccgaucaaggacuucggcggguucaacuucagccagauccugcccgaccccuccaagcccagcaagcgguccuucaucgaggaccuccuguucaacaaggugacccuggccgacgccggcuucaucaagcaguacggcgacugccucggggacaucgcggcccgcgaccugaucugcgcccagaaguucaacggccugaccgugcucccgccccugcugaccgacgagaugaucgcccaguacaccagcgcccuccuggcggggaccaucacguccggcuggaccuucggggccggcgccgcccugcagauccccuucgcgaugcagauggccuaccgguucaacggcaucggggucacccagaacgugcucuacgagaaccagaagcugaucgccaaccaguucaacagcgccaucggcaagauccaggacucccugagcuccaccgccagcgcgcucgggaagcugcaggacguggucaaccagaacgcccaggcccugaacacgcucgugaagcagcuguccagcaacuucggcgccaucuccagcgugcugaacgacauccucucccgccuggacaaggucgaggccgaggugcagaucgaccggcugaucaccgggcgccuccagagccugcagaccuacgugacccagcagcugauccgggcggccgagauccgcgccagcgccaaccucgccgcgaccaagauguccgagugcguccugggccagagcaagcggguggacuucugcggcaagggguaccaccugauguccuucccccagagcgccccgcacggcguggucuuccuccacgugacguacguccccgcccaggagaagaacuucaccaccgcccccgcgaucugccacgacgggaaggcccacuucccccgcgagggcguguucguguccaacgggacccacugguucgucacgcagcggaacuucuacgagccgcagaucaucaccaccgacaacaccuucgugagcggcaacugcgacguggucaucggcaucgugaacaacacgguguacgacccccugcagcccgagcuggacuccuucaaggaggagcucgacaaguacuucaagaaccacaccagccccgacgucgaccugggggacaucuccggcaucaacgccagcguggugaacauccagaaggagaucgaccgccugaacgaggucgccaagaaccucaacgagucccugaucgaccugcaggagcucgggaaguacgagcaguacaucaaguggccgugguacaucuggcugggcuucaucgccggccugaucgcgaucgugauggugaccaucaugcucugcugcaugaccagcugcugcuccugccugaaggggugcugcagcugcggcuccugcugcaaguucgacgaggacgacagcgagcccguccugaagggggugaagcuccacuacacguga

SEQ ID NO: 22765 - RNA, 3822 nt, Artificial Sequence
  SARS-CoV-2/Wuhan/WIV05/2019__EPI_ISL_402128 spike protein CDS gc (1-1273)(K986P_V987P_ D614G)
auguucguguuccugguccuccugccccuggugagcucccagugcgugaaccucaccacccgcacgcagcugccgcccgccuacaccaacagcuucacccggggcgucuacuaccccgacaagguguuccgcuccagcgugcugcacuccacccaggaccucuuccugcccuucuucagcaacgucacgugguuccacgccauccacguguccgggaccaacggcaccaagcgguucgacaacccggugcugcccuucaacgacggggucuacuucgcgagcaccgagaaguccaacaucauccgcggcuggaucuucgggacgacccucgacagcaagacccagucccugcugaucgugaacaacgccaccaacguggucaucaaggugugcgaguuccaguucugcaacgaccccuuccucggcguguacuaccacaagaacaacaagagcuggauggaguccgaguuccgggucuacagcuccgccaacaacugcacguucgaguacgugagccagcccuuccugauggaccuggagggcaagcaggggaacuucaagaaccuccgcgaguucguguucaagaacaucgacggcuacuucaagaucuacuccaagcacaccccgaucaaccugguccgggaccugccccagggguucagcgcccucgagccccugguggaccugcccaucggcaucaacaucacccgcuuccagacccuccuggcccugcaccgguccuaccucacgccgggggacagcagcuccggcuggaccgcgggcgccgccgccuacuacgugggguaccugcagccccgcaccuuccugcucaaguacaacgagaacggcaccaucacggacgcggucgacugcgcccuggacccccugagcgagaccaagugcacccucaaguccuucaccguggagaaggggaucuaccagacgagcaacuuccgggugcagcccaccgaguccaucguccgcuucccgaacaucaccaaccugugccccuucggcgagguguucaacgccacccgguucgccagcgucuacgccuggaaccgcaagcggaucuccaacugcguggcggacuacagcgugcuguacaacuccgccagcuucuccacguucaagugcuacggcgucagccccaccaagcucaacgaccugugcuucaccaacguguacgccgacuccuucgugauccgcggggacgagguccggcagaucgcccccggccagaccgggaagaucgccgacuacaacuacaagcugccggacgacuucacgggcugcgugaucgcguggaacagcaacaaccucgacuccaaggucgggggcaacuacaacuaccuguaccgccuguuccgcaagagcaaccucaagcccuucgagcgggacaucuccaccgagaucuaccaggccggcagcacccccugcaacgggguggagggcuucaacugcuacuucccccugcaguccuacggguuccagccgaccaacggcgugggguaccagcccuaccggguggucgugcugagcuucgagcuccugcacgcccccgccacggugugcggccccaagaaguccaccaaccuggucaagaacaagugcgugaacuucaacuucaacggccucaccgggaccggcgugcugaccgagagcaacaagaaguuccugccguuccagcaguucgggcgcgacaucgccgacacgaccgacgcgguccgcgacccccagacccuggagauccucgacaucacccccugcagcuucggcgggguguccgugaucacgccgggcaccaacaccagcaaccaggucgccgugcuguaccagggcgugaacugcaccgagguccccguggccauccacgccgaccagcugacgcccaccuggcggguguacuccaccggcagcaacgucuuccagacccgcgccgggugccucaucggcgcggagcacgugaacaacuccuacgagugcgacauccccaucggggccggcaucugcgccagcuaccagacgcagaccaacuccccgcggcgcgcccggagcguggcgucccagagcaucaucgccuacaccaugucccugggcgccgagaacagcgucgccuacuccaacaacagcaucgccauccccaccaacuucacgaucuccgugaccaccgagauccugcccgugagcaugaccaagacgagcgucgacugcaccauguacaucugcggggacuccaccgagugcagcaaccuccugcugcaguacggcuccuucugcacccagcucaaccgcgcgcugacggggaucgccguggagcaggacaagaacacccaggagguguucgcccaggucaagcagaucuacaagacgcccccgaucaaggacuucggcggguucaacuucagccagauccugcccgaccccuccaagcccagcaagcgguccuucaucgaggaccuccuguucaacaaggugacccuggccgacgccggcuucaucaagcaguacggcgacugccucggggacaucgcggcccgcgaccugaucugcgcccagaaguucaacggccugaccgugcucccgccccugcugaccgacgagaugaucgcccaguacaccagcgcccuccuggcggggaccaucacguccggcuggaccuucggggccggcgccgcccugcagauccccuucgcgaugcagauggccuaccgguucaacggcaucggggucacccagaacgugcucuacgagaaccagaagcugaucgccaaccaguucaacagcgccaucggcaagauccaggacucccugagcuccaccgccagcgcgcucgggaagcugcaggacguggucaaccagaacgcccaggcccugaacacgcucgugaagcagcuguccagcaacuucggcgccaucuccagcgugcugaacgacauccucucccgccuggacccgcccgaggccgaggugcagaucgaccggcugaucaccgggcgccuccagagccugcagaccuacgugacccagcagcugauccgggcggccgagauccgcgccagcgccaaccucgccgcgaccaagauguccgagugcguccugggccagagcaagcggguggacuucugcggcaagggguaccaccugauguccuucccccagagcgccccgcacggcguggucuuccuccacgugacguacguccccgcccaggagaagaacuucaccaccgcccccgcgaucugccacgacgggaaggcccacuucccccgcgagggcguguucguguccaacgggacccacugguucgucacgcagcggaacuucuacgagccgcagaucaucaccaccgacaacaccuucgugagcggcaacugcgacguggucaucggcaucgugaacaacacgguguacgacccccugcagcccgagcuggacuccuucaaggaggagcucgacaaguacuucaagaaccacaccagccccgacgucgaccugggggacaucuccggcaucaacgccagcguggugaacauccagaaggagaucgaccgccugaacgaggucgccaagaaccucaacgagucccugaucgaccugcaggagcucgggaaguacgagcaguacaucaaguggccgugguacaucuggcugggcuucaucgccggccugaucgcgaucgugauggugaccaucaugcucugcugcaugaccagcugcugcuccugccugaaggggugcugcagcugcggcuccugcugcaaguucgacgaggacgacagcgagcccguccugaagggggugaagcuccacuacacguga

SEQ ID NO: 22766 - RNA, 3822 nt, Artificial Sequence
  SARS-CoV-2/Wuhan/WIV05/2019__EPI_ISL_402128 spike protein CDS gc (1-1273)(A222V_D614G)
auguucguguuccugguccuccugccccuggugagcucccagugcgugaaccucaccacccgcacgcagcugccgcccgccuacaccaacagcuucacccggggcgucuacuaccccgacaagguguuccgcuccagcgugcugcacuccacccaggaccucuuccugcccuucuucagcaacgucacgugguuccacgccauccacguguccgggaccaacggcaccaagcgguucgacaacccggugcugcccuucaacgacggggucuacuucgcgagcaccgagaaguccaacaucauccgcggcuggaucuucgggacgacccucgacagcaagacccagucccugcugaucgugaacaacgccaccaacguggucaucaaggugugcgaguuccaguucugcaacgaccccuuccucggcguguacuaccacaagaacaacaagagcuggauggaguccgaguuccgggucuacagcuccgccaacaacugcacguucgaguacgugagccagcccuuccugauggaccuggagggcaagcaggggaacuucaagaaccuccgcgaguucguguucaagaacaucgacggcuacuucaagaucuacuccaagcacaccccgaucaaccugguccgggaccugccccagggguucagcguccucgagccccugguggaccugcccaucggcaucaacaucacccgcuuccagacccuccuggcccugcaccgguccuaccucacgccgggggacagcagcuccggcuggaccgcgggcgccgccgccuacuacgugggguaccugcagccccgcaccuuccugcucaaguacaacgagaacggcaccaucacggacgcggucgacugcgcccuggacccccugagcgagaccaagugcacccucaaguccuucaccguggagaaggggaucuaccagacgagcaacuuccgggugcagcccaccgaguccaucguccgcuucccgaacaucaccaaccugugccccuucggcgagguguucaacgccacccgguucgccagcgucuacgccuggaaccgcaagcggaucuccaacugcguggcggacuacagcgugcuguacaacuccgccagcuucuccacguucaagugcuacggcgucagccccaccaagcucaacgaccugugcuucaccaacguguacgccgacuccuucgugauccgcggggacgagguccggcagaucgcccccggccagaccgggaagaucgccgacuacaacuacaagcugccggacgacuucacgggcugcgugaucgcguggaacagcaacaaccucgacuccaaggucgggggcaacuacaacuaccuguaccgccuguuccgcaagagcaaccucaagcccuucgagcgggacaucuccaccgagaucuaccaggccggcagcacccccugcaacgggguggagggcuucaacugcuacuucccccugcaguccuacggguuccagccgaccaacggcgugggguaccagcccuaccggguggucgugcugagcuucgagcuccugcacgcccccgccacggugugcggccccaagaaguccaccaaccuggucaagaacaagugcgugaacuucaacuucaacggccucaccgggaccggcgugcugaccgagagcaacaagaaguuccugccguuccagcaguucgggcgcgacaucgccgacacgaccgacgcgguccgcgacccccagacccuggagauccucgacaucacccccugcagcuucggcgggguguccgugaucacgccgggcaccaacaccagcaaccaggucgccgugcuguaccagggcgugaacugcaccgagguccccguggccauccacgccgaccagcugacgcccaccuggcggguguacuccaccggcagcaacgucuuccagacccgcgccgggugccucaucggcgcggagcacgugaacaacuccuacgagugcgacauccccaucggggccggcaucugcgccagcuaccagacgcagaccaacuccccgcggcgcgcccggagcguggcgucccagagcaucaucgccuacaccaugucccugggcgccgagaacagcgucgccuacuccaacaacagcaucgccauccccaccaacuucacgaucuccgugaccaccgagauccugcccgugagcaugaccaagacgagcgucgacugcaccauguacaucugcggggacuccaccgagugcagcaaccuccugcugcaguacggcuccuucugcacccagcucaaccgcgcgcugacggggaucgccguggagcaggacaagaacacccaggagguguucgcccaggucaagcagaucuacaagacgcccccgaucaaggacuucggcggguucaacuucagccagauccugcccgaccccuccaagcccagcaagcgguccuucaucgaggaccuccuguucaacaaggugacccuggccgacgccggcuucaucaagcaguacggcgacugccucggggacaucgcggcccgcgaccugaucugcgcccagaaguucaacggccugaccgugcucccgccccugcugaccgacgagaugaucgcccaguacaccagcgcccuccuggcggggaccaucacguccggcuggaccuucggggccggcgccgcccugcagauccccuucgcgaugcagauggccuaccgguucaacggcaucggggucacccagaacgugcucuacgagaaccagaagcugaucgccaaccaguucaacagcgccaucggcaagauccaggacucccugagcuccaccgccagcgcgcucgggaagcugcaggacguggucaaccagaacgcccaggcccugaacacgcucgugaagcagcuguccagcaacuucggcgccaucuccagcgugcugaacgacauccucucccgccuggacaaggucgaggccgaggugcagaucgaccggcugaucaccgggcgccuccagagccugcagaccuacgugacccagcagcugauccgggcggccgagauccgcgccagcgccaaccucgccgcgaccaagauguccgagugcguccugggccagagcaagcggguggacuucugcggcaagggguaccaccugauguccuucccccagagcgccccgcacggcguggucuuccuccacgugacguacguccccgcccaggagaagaacuucaccaccgcccccgcgaucugccacgacgggaaggcccacuucccccgcgagggcguguucguguccaacgggacccacugguucgucacgcagcggaacuucuacgagccgcagaucaucaccaccgacaacaccuucgugagcggcaacugcgacguggucaucggcaucgugaacaacacgguguacgacccccugcagcccgagcuggacuccuucaaggaggagcucgacaaguacuucaagaaccacaccagccccgacgucgaccugggggacaucuccggcaucaacgccagcguggugaacauccagaaggagaucgaccgccugaacgaggucgccaagaaccucaacgagucccugaucgaccugcaggagcucgggaaguacgagcaguacaucaaguggccgugguacaucuggcugggcuucaucgccggccugaucgcgaucgugauggugaccaucaugcucugcugcaugaccagcugcugcuccugccugaaggggugcugcagcugcggcuccugcugcaaguucgacgaggacgacagcgagcccguccugaagggggugaagcuccacuacacguga

SEQ ID NO: 22767 - RNA, 3822 nt, Artificial Sequence
  SARS-CoV-2/Wuhan/WIV05/2019__EPI_ISL_402128 spike protein CDS gc (1-1273)(K986P_V987P_A222V_D614G)
auguucguguuccugguccuccugccccuggugagcucccagugcgugaaccucaccacccgcacgcagcugccgcccgccuacaccaacagcuucacccggggcgucuacuaccccgacaagguguuccgcuccagcgugcugcacuccacccaggaccucuuccugcccuucuucagcaacgucacgugguuccacgccauccacguguccgggaccaacggcaccaagcgguucgacaacccggugcugcccuucaacgacggggucuacuucgcgagcaccgagaaguccaacaucauccgcggcuggaucuucgggacgacccucgacagcaagacccagucccugcugaucgugaacaacgccaccaacguggucaucaaggugugcgaguuccaguucugcaacgaccccuuccucggcguguacuaccacaagaacaacaagagcuggauggaguccgaguuccgggucuacagcuccgccaacaacugcacguucgaguacgugagccagcccuuccugauggaccuggagggcaagcaggggaacuucaagaaccuccgcgaguucguguucaagaacaucgacggcuacuucaagaucuacuccaagcacaccccgaucaaccugguccgggaccugccccagggguucagcguccucgagccccugguggaccugcccaucggcaucaacaucacccgcuuccagacccuccuggcccugcaccgguccuaccucacgccgggggacagcagcuccggcuggaccgcgggcgccgccgccuacuacgugggguaccugcagccccgcaccuuccugcucaaguacaacgagaacggcaccaucacggacgcggucgacugcgcccuggacccccugagcgagaccaagugcacccucaaguccuucaccguggagaaggggaucuaccagacgagcaacuuccgggugcagcccaccgaguccaucguccgcuucccgaacaucaccaaccugugccccuucggcgagguguucaacgccacccgguucgccagcgucuacgccuggaaccgcaagcggaucuccaacugcguggcggacuacagcgugcuguacaacuccgccagcuucuccacguucaagugcuacggcgucagccccaccaagcucaacgaccugugcuucaccaacguguacgccgacuccuucgugauccgcggggacgagguccggcagaucgcccccggccagaccgggaagaucgccgacuacaacuacaagcugccggacgacuucacgggcugcgugaucgcguggaacagcaacaaccucgacuccaaggucgggggcaacuacaacuaccuguaccgccuguuccgcaagagcaaccucaagcccuucgagcgggacaucuccaccgagaucuaccaggccggcagcacccccugcaacgggguggagggcuucaacugcuacuucccccugcaguccuacggguuccagccgaccaacggcgugggguaccagcccuaccggguggucgugcugagcuucgagcuccugcacgcccccgccacggugugcggccccaagaaguccaccaaccuggucaagaacaagugcgugaacuucaacuucaacggccucaccgggaccggcgugcugaccgagagcaacaagaaguuccugccguuccagcaguucgggcgcgacaucgccgacacgaccgacgcgguccgcgacccccagacccuggagauccucgacaucacccccugcagcuucggcgggguguccgugaucacgccgggcaccaacaccagcaaccaggucgccgugcuguaccagggcgugaacugcaccgagguccccguggccauccacgccgaccagcugacgcccaccuggcggguguacuccaccggcagcaacgucuuccagacccgcgccgggugccucaucggcgcggagcacgugaacaacuccuacgagugcgacauccccaucggggccggcaucugcgccagcuaccagacgcagaccaacuccccgcggcgcgcccggagcguggcgucccagagcaucaucgccuacaccaugucccugggcgccgagaacagcgucgccuacuccaacaacagcaucgccauccccaccaacuucacgaucuccgugaccaccgagauccugcccgugagcaugaccaagacgagcgucgacugcaccauguacaucugcggggacuccaccgagugcagcaaccuccugcugcaguacggcuccuucugcacccagcucaaccgcgcgcugacggggaucgccguggagcaggacaagaacacccaggagguguucgcccaggucaagcagaucuacaagacgcccccgaucaaggacuucggcggguucaacuucagccagauccugcccgaccccuccaagcccagcaagcgguccuucaucgaggaccuccuguucaacaaggugacccuggccgacgccggcuucaucaagcaguacggcgacugccucggggacaucgcggcccgcgaccugaucugcgcccagaaguucaacggccugaccgugcucccgccccugcugaccgacgagaugaucgcccaguacaccagcgcccuccuggcggggaccaucacguccggcuggaccuucggggccggcgccgcccugcagauccccuucgcgaugcagauggccuaccgguucaacggcaucggggucacccagaacgugcucuacgagaaccagaagcugaucgccaaccaguucaacagcgccaucggcaagauccaggacucccugagcuccaccgccagcgcgcucgggaagcugcaggacguggucaaccagaacgcccaggcccugaacacgcucgugaagcagcuguccagcaacuucggcgccaucuccagcgugcugaacgacauccucucccgccuggacccgcccgaggccgaggugcagaucgaccggcugaucaccgggcgccuccagagccugcagaccuacgugacccagcagcugauccgggcggccgagauccgcgccagcgccaaccucgccgcgaccaagauguccgagugcguccugggccagagcaagcggguggacuucugcggcaagggguaccaccugauguccuucccccagagcgccccgcacggcguggucuuccuccacgugacguacguccccgcccaggagaagaacuucaccaccgcccccgcgaucugccacgacgggaaggcccacuucccccgcgagggcguguucguguccaacgggacccacugguucgucacgcagcggaacuucuacgagccgcagaucaucaccaccgacaacaccuucgugagcggcaacugcgacguggucaucggcaucgugaacaacacgguguacgacccccugcagcccgagcuggacuccuucaaggaggagcucgacaaguacuucaagaaccacaccagccccgacgucgaccugggggacaucuccggcaucaacgccagcguggugaacauccagaaggagaucgaccgccugaacgaggucgccaagaaccucaacgagucccugaucgaccugcaggagcucgggaaguacgagcaguacaucaaguggccgugguacaucuggcugggcuucaucgccggccugaucgcgaucgugauggugaccaucaugcucugcugcaugaccagcugcugcuccugccugaaggggugcugcagcugcggcuccugcugcaaguucgacgaggacgacagcgagcccguccugaagggggugaagcuccacuacacguga

SEQ ID NO: 22768 - RNA, 3822 nt, Artificial Sequence
  SARS-CoV-2/Wuhan/WIV05/2019__EPI_ISL_402128 spike protein CDS gc (1-1273)(N439K_D614G)
auguucguguuccugguccuccugccccuggugagcucccagugcgugaaccucaccacccgcacgcagcugccgcccgccuacaccaacagcuucacccggggcgucuacuaccccgacaagguguuccgcuccagcgugcugcacuccacccaggaccucuuccugcccuucuucagcaacgucacgugguuccacgccauccacguguccgggaccaacggcaccaagcgguucgacaacccggugcugcccuucaacgacggggucuacuucgcgagcaccgagaaguccaacaucauccgcggcuggaucuucgggacgacccucgacagcaagacccagucccugcugaucgugaacaacgccaccaacguggucaucaaggugugcgaguuccaguucugcaacgaccccuuccucggcguguacuaccacaagaacaacaagagcuggauggaguccgaguuccgggucuacagcuccgccaacaacugcacguucgaguacgugagccagcccuuccugauggaccuggagggcaagcaggggaacuucaagaaccuccgcgaguucguguucaagaacaucgacggcuacuucaagaucuacuccaagcacaccccgaucaaccugguccgggaccugccccagggguucagcgcccucgagccccugguggaccugcccaucggcaucaacaucacccgcuuccagacccuccuggcccugcaccgguccuaccucacgccgggggacagcagcuccggcuggaccgcgggcgccgccgccuacuacgugggguaccugcagccccgcaccuuccugcucaaguacaacgagaacggcaccaucacggacgcggucgacugcgcccuggacccccugagcgagaccaagugcacccucaaguccuucaccguggagaaggggaucuaccagacgagcaacuuccgggugcagcccaccgaguccaucguccgcuucccgaacaucaccaaccugugccccuucggcgagguguucaacgccacccgguucgccagcgucuacgccuggaaccgcaagcggaucuccaacugcguggcggacuacagcgugcuguacaacuccgccagcuucuccacguucaagugcuacggcgucagccccaccaagcucaacgaccugugcuucaccaacguguacgccgacuccuucgugauccgcggggacgagguccggcagaucgcccccggccagaccgggaagaucgccgacuacaacuacaagcugccggacgacuucacgggcugcgugaucgcguggaacagcaagaaccucgacuccaaggucgggggcaacuacaacuaccuguaccgccuguuccgcaagagcaaccucaagcccuucgagcgggacaucuccaccgagaucuaccaggccggcagcacccccugcaacgggguggagggcuucaacugcuacuucccccugcaguccuacggguuccagccgaccaacggcgugggguaccagcccuaccggguggucgugcugagcuucgagcuccugcacgcccccgccacggugugcggccccaagaaguccaccaaccuggucaagaacaagugcgugaacuucaacuucaacggccucaccgggaccggcgugcugaccgagagcaacaagaaguuccugccguuccagcaguucgggcgcgacaucgccgacacgaccgacgcgguccgcgacccccagacccuggagauccucgacaucacccccugcagcuucggcgggguguccgugaucacgccgggcaccaacaccagcaaccaggucgccgugcuguaccagggcgugaacugcaccgagguccccguggccauccacgccgaccagcugacgcccaccuggcggguguacuccaccggcagcaacgucuuccagacccgcgccgggugccucaucggcgcggagcacgugaacaacuccuacgagugcgacauccccaucggggccggcaucugcgccagcuaccagacgcagaccaacuccccgcggcgcgcccggagcguggcgucccagagcaucaucgccuacaccaugucccugggcgccgagaacagcgucgccuacuccaacaacagcaucgccauccccaccaacuucacgaucuccgugaccaccgagauccugcccgugagcaugaccaagacgagcgucgacugcaccauguacaucugcggggacuccaccgagugcagcaaccuccugcugcaguacggcuccuucugcacccagcucaaccgcgcgcugacggggaucgccguggagcaggacaagaacacccaggagguguucgcccaggucaagcagaucuacaagacgcccccgaucaaggacuucggcggguucaacuucagccagauccugcccgaccccuccaagcccagcaagcgguccuucaucgaggaccuccuguucaacaaggugacccuggccgacgccggcuucaucaagcaguacggcgacugccucggggacaucgcggcccgcgaccugaucugcgcccagaaguucaacggccugaccgugcucccgccccugcugaccgacgagaugaucgcccaguacaccagcgcccuccuggcggggaccaucacguccggcuggaccuucggggccggcgccgcccugcagauccccuucgcgaugcagauggccuaccgguucaacggcaucggggucacccagaacgugcucuacgagaaccagaagcugaucgccaaccaguucaacagcgccaucggcaagauccaggacucccugagcuccaccgccagcgcgcucgggaagcugcaggacguggucaaccagaacgcccaggcccugaacacgcucgugaagcagcuguccagcaacuucggcgccaucuccagcgugcugaacgacauccucucccgccuggacaaggucgaggccgaggugcagaucgaccggcugaucaccgggcgccuccagagccugcagaccuacgugacccagcagcugauccgggcggccgagauccgcgccagcgccaaccucgccgcgaccaagauguccgagugcguccugggccagagcaagcggguggacuucugcggcaagggguaccaccugauguccuucccccagagcgccccgcacggcguggucuuccuccacgugacguacguccccgcccaggagaagaacuucaccaccgcccccgcgaucugccacgacgggaaggcccacuucccccgcgagggcguguucguguccaacgggacccacugguucgucacgcagcggaacuucuacgagccgcagaucaucaccaccgacaacaccuucgugagcggcaacugcgacguggucaucggcaucgugaacaacacgguguacgacccccugcagcccgagcuggacuccuucaaggaggagcucgacaaguacuucaagaaccacaccagccccgacgucgaccugggggacaucuccggcaucaacgccagcguggugaacauccagaaggagaucgaccgccugaacgaggucgccaagaaccucaacgagucccugaucgaccugcaggagcucgggaaguacgagcaguacaucaaguggccgugguacaucuggcugggcuucaucgccggccugaucgcgaucgugauggugaccaucaugcucugcugcaugaccagcugcugcuccugccugaaggggugcugcagcugcggcuccugcugcaaguucgacgaggacgacagcgagcccguccugaagggggugaagcuccacuacacguga

SEQ ID NO: 22769 - RNA, 3822 nt, Artificial Sequence
  SARS-CoV-2/Wuhan/WIV05/2019__EPI_ISL_402128 spike protein CDS gc (1-1273)(K986P_V987P_N439K_D614G)
auguucguguuccugguccuccugccccuggugagcucccagugcgugaaccucaccacccgcacgcagcugccgcccgccuacaccaacagcuucacccggggcgucuacuaccccgacaagguguuccgcuccagcgugcugcacuccacccaggaccucuuccugcccuucuucagcaacgucacgugguuccacgccauccacguguccgggaccaacggcaccaagcgguucgacaacccggugcugcccuucaacgacggggucuacuucgcgagcaccgagaaguccaacaucauccgcggcuggaucuucgggacgacccucgacagcaagacccagucccugcugaucgugaacaacgccaccaacguggucaucaaggugugcgaguuccaguucugcaacgaccccuuccucggcguguacuaccacaagaacaacaagagcuggauggaguccgaguuccgggucuacagcuccgccaacaacugcacguucgaguacgugagccagcccuuccugauggaccuggagggcaagcaggggaacuucaagaaccuccgcgaguucguguucaagaacaucgacggcuacuucaagaucuacuccaagcacaccccgaucaaccugguccgggaccugccccagggguucagcgcccucgagccccugguggaccugcccaucggcaucaacaucacccgcuuccagacccuccuggcccugcaccgguccuaccucacgccgggggacagcagcuccggcuggaccgcgggcgccgccgccuacuacgugggguaccugcagccccgcaccuuccugcucaaguacaacgagaacggcaccaucacggacgcggucgacugcgcccuggacccccugagcgagaccaagugcacccucaaguccuucaccguggagaaggggaucuaccagacgagcaacuuccgggugcagcccaccgaguccaucguccgcuucccgaacaucaccaaccugugccccuucggcgagguguucaacgccacccgguucgccagcgucuacgccuggaaccgcaagcggaucuccaacugcguggcggacuacagcgugcuguacaacuccgccagcuucuccacguucaagugcuacggcgucagccccaccaagcucaacgaccugugcuucaccaacguguacgccgacuccuucgugauccgcggggacgagguccggcagaucgcccccggccagaccgggaagaucgccgacuacaacuacaagcugccggacgacuucacgggcugcgugaucgcguggaacagcaagaaccucgacuccaaggucgggggcaacuacaacuaccuguaccgccuguuccgcaagagcaaccucaagcccuucgagcgggacaucuccaccgagaucuaccaggccggcagcacccccugcaacgggguggagggcuucaacugcuacuucccccugcaguccuacggguuccagccgaccaacggcgugggguaccagcccuaccggguggucgugcugagcuucgagcuccugcacgcccccgccacggugugcggccccaagaaguccaccaaccuggucaagaacaagugcgugaacuucaacuucaacggccucaccgggaccggcgugcugaccgagagcaacaagaaguuccugccguuccagcaguucgggcgcgacaucgccgacacgaccgacgcgguccgcgacccccagacccuggagauccucgacaucacccccugcagcuucggcgggguguccgugaucacgccgggcaccaacaccagcaaccaggucgccgugcuguaccagggcgugaacugcaccgagguccccguggccauccacgccgaccagcugacgcccaccuggcggguguacuccaccggcagcaacgucuuccagacccgcgccgggugccucaucggcgcggagcacgugaacaacuccuacgagugcgacauccccaucggggccggcaucugcgccagcuaccagacgcagaccaacuccccgcggcgcgcccggagcguggcgucccagagcaucaucgccuacaccaugucccugggcgccgagaacagcgucgccuacuccaacaacagcaucgccauccccaccaacuucacgaucuccgugaccaccgagauccugcccgugagcaugaccaagacgagcgucgacugcaccauguacaucugcggggacuccaccgagugcagcaaccuccugcugcaguacggcuccuucugcacccagcucaaccgcgcgcugacggggaucgccguggagcaggacaagaacacccaggagguguucgcccaggucaagcagaucuacaagacgcccccgaucaaggacuucggcggguucaacuucagccagauccugcccgaccccuccaagcccagcaagcgguccuucaucgaggaccuccuguucaacaaggugacccuggccgacgccggcuucaucaagcaguacggcgacugccucggggacaucgcggcccgcgaccugaucugcgcccagaaguucaacggccugaccgugcucccgccccugcugaccgacgagaugaucgcccaguacaccagcgcccuccuggcggggaccaucacguccggcuggaccuucggggccggcgccgcccugcagauccccuucgcgaugcagauggccuaccgguucaacggcaucggggucacccagaacgugcucuacgagaaccagaagcugaucgccaaccaguucaacagcgccaucggcaagauccaggacucccugagcuccaccgccagcgcgcucgggaagcugcaggacguggucaaccagaacgcccaggcccugaacacgcucgugaagcagcuguccagcaacuucggcgccaucuccagcgugcugaacgacauccucucccgccuggacccgcccgaggccgaggugcagaucgaccggcugaucaccgggcgccuccagagccugcagaccuacgugacccagcagcugauccgggcggccgagauccgcgccagcgccaaccucgccgcgaccaagauguccgagugcguccugggccagagcaagcggguggacuucugcggcaagggguaccaccugauguccuucccccagagcgccccgcacggcguggucuuccuccacgugacguacguccccgcccaggagaagaacuucaccaccgcccccgcgaucugccacgacgggaaggcccacuucccccgcgagggcguguucguguccaacgggacccacugguucgucacgcagcggaacuucuacgagccgcagaucaucaccaccgacaacaccuucgugagcggcaacugcgacguggucaucggcaucgugaacaacacgguguacgacccccugcagcccgagcuggacuccuucaaggaggagcucgacaaguacuucaagaaccacaccagccccgacgucgaccugggggacaucuccggcaucaacgccagcguggugaacauccagaaggagaucgaccgccugaacgaggucgccaagaaccucaacgagucccugaucgaccugcaggagcucgggaaguacgagcaguacaucaaguggccgugguacaucuggcugggcuucaucgccggccugaucgcgaucgugauggugaccaucaugcucugcugcaugaccagcugcugcuccugccugaaggggugcugcagcugcggcuccugcugcaaguucgacgaggacgacagcgagcccguccugaagggggugaagcuccacuacacguga

SEQ ID NO: 22770 - RNA, 3822 nt, Artificial Sequence
  SARS-CoV-2/Wuhan/WIV05/2019__EPI_ISL_402128 spike protein CDS gc (1-1273)(S477N_D614G)
auguucguguuccugguccuccugccccuggugagcucccagugcgugaaccucaccacccgcacgcagcugccgcccgccuacaccaacagcuucacccggggcgucuacuaccccgacaagguguuccgcuccagcgugcugcacuccacccaggaccucuuccugcccuucuucagcaacgucacgugguuccacgccauccacguguccgggaccaacggcaccaagcgguucgacaacccggugcugcccuucaacgacggggucuacuucgcgagcaccgagaaguccaacaucauccgcggcuggaucuucgggacgacccucgacagcaagacccagucccugcugaucgugaacaacgccaccaacguggucaucaaggugugcgaguuccaguucugcaacgaccccuuccucggcguguacuaccacaagaacaacaagagcuggauggaguccgaguuccgggucuacagcuccgccaacaacugcacguucgaguacgugagccagcccuuccugauggaccuggagggcaagcaggggaacuucaagaaccuccgcgaguucguguucaagaacaucgacggcuacuucaagaucuacuccaagcacaccccgaucaaccugguccgggaccugccccagggguucagcgcccucgagccccugguggaccugcccaucggcaucaacaucacccgcuuccagacccuccuggcccugcaccgguccuaccucacgccgggggacagcagcuccggcuggaccgcgggcgccgccgccuacuacgugggguaccugcagccccgcaccuuccugcucaaguacaacgagaacggcaccaucacggacgcggucgacugcgcccuggacccccugagcgagaccaagugcacccucaaguccuucaccguggagaaggggaucuaccagacgagcaacuuccgggugcagcccaccgaguccaucguccgcuucccgaacaucaccaaccugugccccuucggcgagguguucaacgccacccgguucgccagcgucuacgccuggaaccgcaagcggaucuccaacugcguggcggacuacagcgugcuguacaacuccgccagcuucuccacguucaagugcuacggcgucagccccaccaagcucaacgaccugugcuucaccaacguguacgccgacuccuucgugauccgcggggacgagguccggcagaucgcccccggccagaccgggaagaucgccgacuacaacuacaagcugccggacgacuucacgggcugcgugaucgcguggaacagcaacaaccucgacuccaaggucgggggcaacuacaacuaccuguaccgccuguuccgcaagagcaaccucaagcccuucgagcgggacaucuccaccgagaucuaccaggccggcaacacccccugcaacgggguggagggcuucaacugcuacuucccccugcaguccuacggguuccagccgaccaacggcgugggguaccagcccuaccggguggucgugcugagcuucgagcuccugcacgcccccgccacggugugcggccccaagaaguccaccaaccuggucaagaacaagugcgugaacuucaacuucaacggccucaccgggaccggcgugcugaccgagagcaacaagaaguuccugccguuccagcaguucgggcgcgacaucgccgacacgaccgacgcgguccgcgacccccagacccuggagauccucgacaucacccccugcagcuucggcgggguguccgugaucacgccgggcaccaacaccagcaaccaggucgccgugcuguaccagggcgugaacugcaccgagguccccguggccauccacgccgaccagcugacgcccaccuggcggguguacuccaccggcagcaacgucuuccagacccgcgccgggugccucaucggcgcggagcacgugaacaacuccuacgagugcgacauccccaucggggccggcaucugcgccagcuaccagacgcagaccaacuccccgcggcgcgcccggagcguggcgucccagagcaucaucgccuacaccaugucccugggcgccgagaacagcgucgccuacuccaacaacagcaucgccauccccaccaacuucacgaucuccgugaccaccgagauccugcccgugagcaugaccaagacgagcgucgacugcaccauguacaucugcggggacuccaccgagugcagcaaccuccugcugcaguacggcuccuucugcacccagcucaaccgcgcgcugacggggaucgccguggagcaggacaagaacacccaggagguguucgcccaggucaagcagaucuacaagacgcccccgaucaaggacuucggcggguucaacuucagccagauccugcccgaccccuccaagcccagcaagcgguccuucaucgaggaccuccuguucaacaaggugacccuggccgacgccggcuucaucaagcaguacggcgacugccucggggacaucgcggcccgcgaccugaucugcgcccagaaguucaacggccugaccgugcucccgccccugcugaccgacgagaugaucgcccaguacaccagcgcccuccuggcggggaccaucacguccggcuggaccuucggggccggcgccgcccugcagauccccuucgcgaugcagauggccuaccgguucaacggcaucggggucacccagaacgugcucuacgagaaccagaagcugaucgccaaccaguucaacagcgccaucggcaagauccaggacucccugagcuccaccgccagcgcgcucgggaagcugcaggacguggucaaccagaacgcccaggcccugaacacgcucgugaagcagcuguccagcaacuucggcgccaucuccagcgugcugaacgacauccucucccgccuggacaaggucgaggccgaggugcagaucgaccggcugaucaccgggcgccuccagagccugcagaccuacgugacccagcagcugauccgggcggccgagauccgcgccagcgccaaccucgccgcgaccaagauguccgagugcguccugggccagagcaagcggguggacuucugcggcaagggguaccaccugauguccuucccccagagcgccccgcacggcguggucuuccuccacgugacguacguccccgcccaggagaagaacuucaccaccgcccccgcgaucugccacgacgggaaggcccacuucccccgcgagggcguguucguguccaacgggacccacugguucgucacgcagcggaacuucuacgagccgcagaucaucaccaccgacaacaccuucgugagcggcaacugcgacguggucaucggcaucgugaacaacacgguguacgacccccugcagcccgagcuggacuccuucaaggaggagcucgacaaguacuucaagaaccacaccagccccgacgucgaccugggggacaucuccggcaucaacgccagcguggugaacauccagaaggagaucgaccgccugaacgaggucgccaagaaccucaacgagucccugaucgaccugcaggagcucgggaaguacgagcaguacaucaaguggccgugguacaucuggcugggcuucaucgccggccugaucgcgaucgugauggugaccaucaugcucugcugcaugaccagcugcugcuccugccugaaggggugcugcagcugcggcuccugcugcaaguucgacgaggacgacagcgagcccguccugaagggggugaagcuccacuacacguga

SEQ ID NO: 22771 - RNA, 3822 nt, Artificial Sequence
  SARS-CoV-2/Wuhan/WIV05/2019__EPI_ISL_402128 spike protein CDS gc (1-1273)(K986P_V987P_S477N_D614G)
auguucguguuccugguccuccugccccuggugagcucccagugcgugaaccucaccacccgcacgcagcugccgcccgccuacaccaacagcuucacccggggcgucuacuaccccgacaagguguuccgcuccagcgugcugcacuccacccaggaccucuuccugcccuucuucagcaacgucacgugguuccacgccauccacguguccgggaccaacggcaccaagcgguucgacaacccggugcugcccuucaacgacggggucuacuucgcgagcaccgagaaguccaacaucauccgcggcuggaucuucgggacgacccucgacagcaagacccagucccugcugaucgugaacaacgccaccaacguggucaucaaggugugcgaguuccaguucugcaacgaccccuuccucggcguguacuaccacaagaacaacaagagcuggauggaguccgaguuccgggucuacagcuccgccaacaacugcacguucgaguacgugagccagcccuuccugauggaccuggagggcaagcaggggaacuucaagaaccuccgcgaguucguguucaagaacaucgacggcuacuucaagaucuacuccaagcacaccccgaucaaccugguccgggaccugccccagggguucagcgcccucgagccccugguggaccugcccaucggcaucaacaucacccgcuuccagacccuccuggcccugcaccgguccuaccucacgccgggggacagcagcuccggcuggaccgcgggcgccgccgccuacuacgugggguaccugcagccccgcaccuuccugcucaaguacaacgagaacggcaccaucacggacgcggucgacugcgcccuggacccccugagcgagaccaagugcacccucaaguccuucaccguggagaaggggaucuaccagacgagcaacuuccgggugcagcccaccgaguccaucguccgcuucccgaacaucaccaaccugugccccuucggcgagguguucaacgccacccgguucgccagcgucuacgccuggaaccgcaagcggaucuccaacugcguggcggacuacagcgugcuguacaacuccgccagcuucuccacguucaagugcuacggcgucagccccaccaagcucaacgaccugugcuucaccaacguguacgccgacuccuucgugauccgcggggacgagguccggcagaucgcccccggccagaccgggaagaucgccgacuacaacuacaagcugccggacgacuucacgggcugcgugaucgcguggaacagcaacaaccucgacuccaaggucgggggcaacuacaacuaccuguaccgccuguuccgcaagagcaaccucaagcccuucgagcgggacaucuccaccgagaucuaccaggccggcaacacccccugcaacgggguggagggcuucaacugcuacuucccccugcaguccuacggguuccagccgaccaacggcgugggguaccagcccuaccggguggucgugcugagcuucgagcuccugcacgcccccgccacggugugcggccccaagaaguccaccaaccuggucaagaacaagugcgugaacuucaacuucaacggccucaccgggaccggcgugcugaccgagagcaacaagaaguuccugccguuccagcaguucgggcgcgacaucgccgacacgaccgacgcgguccgcgacccccagacccuggagauccucgacaucacccccugcagcuucggcgggguguccgugaucacgccgggcaccaacaccagcaaccaggucgccgugcuguaccagggcgugaacugcaccgagguccccguggccauccacgccgaccagcugacgcccaccuggcggguguacuccaccggcagcaacgucuuccagacccgcgccgggugccucaucggcgcggagcacgugaacaacuccuacgagugcgacauccccaucggggccggcaucugcgccagcuaccagacgcagaccaacuccccgcggcgcgcccggagcguggcgucccagagcaucaucgccuacaccaugucccugggcgccgagaacagcgucgccuacuccaacaacagcaucgccauccccaccaacuucacgaucuccgugaccaccgagauccugcccgugagcaugaccaagacgagcgucgacugcaccauguacaucugcggggacuccaccgagugcagcaaccuccugcugcaguacggcuccuucugcacccagcucaaccgcgcgcugacggggaucgccguggagcaggacaagaacacccaggagguguucgcccaggucaagcagaucuacaagacgcccccgaucaaggacuucggcggguucaacuucagccagauccugcccgaccccuccaagcccagcaagcgguccuucaucgaggaccuccuguucaacaaggugacccuggccgacgccggcuucaucaagcaguacggcgacugccucggggacaucgcggcccgcgaccugaucugcgcccagaaguucaacggccugaccgugcucccgccccugcugaccgacgagaugaucgcccaguacaccagcgcccuccuggcggggaccaucacguccggcuggaccuucggggccggcgccgcccugcagauccccuucgcgaugcagauggccuaccgguucaacggcaucggggucacccagaacgugcucuacgagaaccagaagcugaucgccaaccaguucaacagcgccaucggcaagauccaggacucccugagcuccaccgccagcgcgcucgggaagcugcaggacguggucaaccagaacgcccaggcccugaacacgcucgugaagcagcuguccagcaacuucggcgccaucuccagcgugcugaacgacauccucucccgccuggacccgcccgaggccgaggugcagaucgaccggcugaucaccgggcgccuccagagccugcagaccuacgugacccagcagcugauccgggcggccgagauccgcgccagcgccaaccucgccgcgaccaagauguccgagugcguccugggccagagcaagcggguggacuucugcggcaagggguaccaccugauguccuucccccagagcgccccgcacggcguggucuuccuccacgugacguacguccccgcccaggagaagaacuucaccaccgcccccgcgaucugccacgacgggaaggcccacuucccccgcgagggcguguucguguccaacgggacccacugguucgucacgcagcggaacuucuacgagccgcagaucaucaccaccgacaacaccuucgugagcggcaacugcgacguggucaucggcaucgugaacaacacgguguacgacccccugcagcccgagcuggacuccuucaaggaggagcucgacaaguacuucaagaaccacaccagccccgacgucgaccugggggacaucuccggcaucaacgccagcguggugaacauccagaaggagaucgaccgccugaacgaggucgccaagaaccucaacgagucccugaucgaccugcaggagcucgggaaguacgagcaguacaucaaguggccgugguacaucuggcugggcuucaucgccggccugaucgcgaucgugauggugaccaucaugcucugcugcaugaccagcugcugcuccugccugaaggggugcugcagcugcggcuccugcugcaaguucgacgaggacgacagcgagcccguccugaagggggugaagcuccacuacacguga

SEQ ID NO: 22772 - RNA, 3822 nt, Artificial Sequence
  SARS-CoV-2/Wuhan/WIV05/2019__EPI_ISL_402128 spike protein CDS gc (1-1273)(N501Y_D614G)
auguucguguuccugguccuccugccccuggugagcucccagugcgugaaccucaccacccgcacgcagcugccgcccgccuacaccaacagcuucacccggggcgucuacuaccccgacaagguguuccgcuccagcgugcugcacuccacccaggaccucuuccugcccuucuucagcaacgucacgugguuccacgccauccacguguccgggaccaacggcaccaagcgguucgacaacccggugcugcccuucaacgacggggucuacuucgcgagcaccgagaaguccaacaucauccgcggcuggaucuucgggacgacccucgacagcaagacccagucccugcugaucgugaacaacgccaccaacguggucaucaaggugugcgaguuccaguucugcaacgaccccuuccucggcguguacuaccacaagaacaacaagagcuggauggaguccgaguuccgggucuacagcuccgccaacaacugcacguucgaguacgugagccagcccuuccugauggaccuggagggcaagcaggggaacuucaagaaccuccgcgaguucguguucaagaacaucgacggcuacuucaagaucuacuccaagcacaccccgaucaaccugguccgggaccugccccagggguucagcgcccucgagccccugguggaccugcccaucggcaucaacaucacccgcuuccagacccuccuggcccugcaccgguccuaccucacgccgggggacagcagcuccggcuggaccgcgggcgccgccgccuacuacgugggguaccugcagccccgcaccuuccugcucaaguacaacgagaacggcaccaucacggacgcggucgacugcgcccuggacccccugagcgagaccaagugcacccucaaguccuucaccguggagaaggggaucuaccagacgagcaacuuccgggugcagcccaccgaguccaucguccgcuucccgaacaucaccaaccugugccccuucggcgagguguucaacgccacccgguucgccagcgucuacgccuggaaccgcaagcggaucuccaacugcguggcggacuacagcgugcuguacaacuccgccagcuucuccacguucaagugcuacggcgucagccccaccaagcucaacgaccugugcuucaccaacguguacgccgacuccuucgugauccgcggggacgagguccggcagaucgcccccggccagaccgggaagaucgccgacuacaacuacaagcugccggacgacuucacgggcugcgugaucgcguggaacagcaacaaccucgacuccaaggucgggggcaacuacaacuaccuguaccgccuguuccgcaagagcaaccucaagcccuucgagcgggacaucuccaccgagaucuaccaggccggcagcacccccugcaacgggguggagggcuucaacugcuacuucccccugcaguccuacggguuccagccgaccuacggcgugggguaccagcccuaccggguggucgugcugagcuucgagcuccugcacgcccccgccacggugugcggccccaagaaguccaccaaccuggucaagaacaagugcgugaacuucaacuucaacggccucaccgggaccggcgugcugaccgagagcaacaagaaguuccugccguuccagcaguucgggcgcgacaucgccgacacgaccgacgcgguccgcgacccccagacccuggagauccucgacaucacccccugcagcuucggcgggguguccgugaucacgccgggcaccaacaccagcaaccaggucgccgugcuguaccagggcgugaacugcaccgagguccccguggccauccacgccgaccagcugacgcccaccuggcggguguacuccaccggcagcaacgucuuccagacccgcgccgggugccucaucggcgcggagcacgugaacaacuccuacgagugcgacauccccaucggggccggcaucugcgccagcuaccagacgcagaccaacuccccgcggcgcgcccggagcguggcgucccagagcaucaucgccuacaccaugucccugggcgccgagaacagcgucgccuacuccaacaacagcaucgccauccccaccaacuucacgaucuccgugaccaccgagauccugcccgugagcaugaccaagacgagcgucgacugcaccauguacaucugcggggacuccaccgagugcagcaaccuccugcugcaguacggcuccuucugcacccagcucaaccgcgcgcugacggggaucgccguggagcaggacaagaacacccaggagguguucgcccaggucaagcagaucuacaagacgcccccgaucaaggacuucggcggguucaacuucagccagauccugcccgaccccuccaagcccagcaagcgguccuucaucgaggaccuccuguucaacaaggugacccuggccgacgccggcuucaucaagcaguacggcgacugccucggggacaucgcggcccgcgaccugaucugcgcccagaaguucaacggccugaccgugcucccgccccugcugaccgacgagaugaucgcccaguacaccagcgcccuccuggcggggaccaucacguccggcuggaccuucggggccggcgccgcccugcagauccccuucgcgaugcagauggccuaccgguucaacggcaucggggucacccagaacgugcucuacgagaaccagaagcugaucgccaaccaguucaacagcgccaucggcaagauccaggacucccugagcuccaccgccagcgcgcucgggaagcugcaggacguggucaaccagaacgcccaggcccugaacacgcucgugaagcagcuguccagcaacuucggcgccaucuccagcgugcugaacgacauccucucccgccuggacaaggucgaggccgaggugcagaucgaccggcugaucaccgggcgccuccagagccugcagaccuacgugacccagcagcugauccgggcggccgagauccgcgccagcgccaaccucgccgcgaccaagauguccgagugcguccugggccagagcaagcggguggacuucugcggcaagggguaccaccugauguccuucccccagagcgccccgcacggcguggucuuccuccacgugacguacguccccgcccaggagaagaacuucaccaccgcccccgcgaucugccacgacgggaaggcccacuucccccgcgagggcguguucguguccaacgggacccacugguucgucacgcagcggaacuucuacgagccgcagaucaucaccaccgacaacaccuucgugagcggcaacugcgacguggucaucggcaucgugaacaacacgguguacgacccccugcagcccgagcuggacuccuucaaggaggagcucgacaaguacuucaagaaccacaccagccccgacgucgaccugggggacaucuccggcaucaacgccagcguggugaacauccagaaggagaucgaccgccugaacgaggucgccaagaaccucaacgagucccugaucgaccugcaggagcucgggaaguacgagcaguacaucaaguggccgugguacaucuggcugggcuucaucgccggccugaucgcgaucgugauggugaccaucaugcucugcugcaugaccagcugcugcuccugccugaaggggugcugcagcugcggcuccugcugcaaguucgacgaggacgacagcgagcccguccugaagggggugaagcuccacuacacguga

SEQ ID NO: 22773 - RNA, 3822 nt, Artificial Sequence
  SARS-CoV-2/Wuhan/WIV05/2019__EPI_ISL_402128 spike protein CDS gc (1-1273)(K986P_V987P_N501Y_D614G)
auguucguguuccugguccuccugccccuggugagcucccagugcgugaaccucaccacccgcacgcagcugccgcccgccuacaccaacagcuucacccggggcgucuacuaccccgacaagguguuccgcuccagcgugcugcacuccacccaggaccucuuccugcccuucuucagcaacgucacgugguuccacgccauccacguguccgggaccaacggcaccaagcgguucgacaacccggugcugcccuucaacgacggggucuacuucgcgagcaccgagaaguccaacaucauccgcggcuggaucuucgggacgacccucgacagcaagacccagucccugcugaucgugaacaacgccaccaacguggucaucaaggugugcgaguuccaguucugcaacgaccccuuccucggcguguacuaccacaagaacaacaagagcuggauggaguccgaguuccgggucuacagcuccgccaacaacugcacguucgaguacgugagccagcccuuccugauggaccuggagggcaagcaggggaacuucaagaaccuccgcgaguucguguucaagaacaucgacggcuacuucaagaucuacuccaagcacaccccgaucaaccugguccgggaccugccccagggguucagcgcccucgagccccugguggaccugcccaucggcaucaacaucacccgcuuccagacccuccuggcccugcaccgguccuaccucacgccgggggacagcagcuccggcuggaccgcgggcgccgccgccuacuacgugggguaccugcagccccgcaccuuccugcucaaguacaacgagaacggcaccaucacggacgcggucgacugcgcccuggacccccugagcgagaccaagugcacccucaaguccuucaccguggagaaggggaucuaccagacgagcaacuuccgggugcagcccaccgaguccaucguccgcuucccgaacaucaccaaccugugccccuucggcgagguguucaacgccacccgguucgccagcgucuacgccuggaaccgcaagcggaucuccaacugcguggcggacuacagcgugcuguacaacuccgccagcuucuccacguucaagugcuacggcgucagccccaccaagcucaacgaccugugcuucaccaacguguacgccgacuccuucgugauccgcggggacgagguccggcagaucgcccccggccagaccgggaagaucgccgacuacaacuacaagcugccggacgacuucacgggcugcgugaucgcguggaacagcaacaaccucgacuccaaggucgggggcaacuacaacuaccuguaccgccuguuccgcaagagcaaccucaagcccuucgagcgggacaucuccaccgagaucuaccaggccggcagcacccccugcaacgggguggagggcuucaacugcuacuucccccugcaguccuacggguuccagccgaccuacggcgugggguaccagcccuaccggguggucgugcugagcuucgagcuccugcacgcccccgccacggugugcggccccaagaaguccaccaaccuggucaagaacaagugcgugaacuucaacuucaacggccucaccgggaccggcgugcugaccgagagcaacaagaaguuccugccguuccagcaguucgggcgcgacaucgccgacacgaccgacgcgguccgcgacccccagacccuggagauccucgacaucacccccugcagcuucggcgggguguccgugaucacgccgggcaccaacaccagcaaccaggucgccgugcuguaccagggcgugaacugcaccgagguccccguggccauccacgccgaccagcugacgcccaccuggcggguguacuccaccggcagcaacgucuuccagacccgcgccgggugccucaucggcgcggagcacgugaacaacuccuacgagugcgacauccccaucggggccggcaucugcgccagcuaccagacgcagaccaacuccccgcggcgcgcccggagcguggcgucccagagcaucaucgccuacaccaugucccugggcgccgagaacagcgucgccuacuccaacaacagcaucgccauccccaccaacuucacgaucuccgugaccaccgagauccugcccgugagcaugaccaagacgagcgucgacugcaccauguacaucugcggggacuccaccgagugcagcaaccuccugcugcaguacggcuccuucugcacccagcucaaccgcgcgcugacggggaucgccguggagcaggacaagaacacccaggagguguucgcccaggucaagcagaucuacaagacgcccccgaucaaggacuucggcggguucaacuucagccagauccugcccgaccccuccaagcccagcaagcgguccuucaucgaggaccuccuguucaacaaggugacccuggccgacgccggcuucaucaagcaguacggcgacugccucggggacaucgcggcccgcgaccugaucugcgcccagaaguucaacggccugaccgugcucccgccccugcugaccgacgagaugaucgcccaguacaccagcgcccuccuggcggggaccaucacguccggcuggaccuucggggccggcgccgcccugcagauccccuucgcgaugcagauggccuaccgguucaacggcaucggggucacccagaacgugcucuacgagaaccagaagcugaucgccaaccaguucaacagcgccaucggcaagauccaggacucccugagcuccaccgccagcgcgcucgggaagcugcaggacguggucaaccagaacgcccaggcccugaacacgcucgugaagcagcuguccagcaacuucggcgccaucuccagcgugcugaacgacauccucucccgccuggacccgcccgaggccgaggugcagaucgaccggcugaucaccgggcgccuccagagccugcagaccuacgugacccagcagcugauccgggcggccgagauccgcgccagcgccaaccucgccgcgaccaagauguccgagugcguccugggccagagcaagcggguggacuucugcggcaagggguaccaccugauguccuucccccagagcgccccgcacggcguggucuuccuccacgugacguacguccccgcccaggagaagaacuucaccaccgcccccgcgaucugccacgacgggaaggcccacuucccccgcgagggcguguucguguccaacgggacccacugguucgucacgcagcggaacuucuacgagccgcagaucaucaccaccgacaacaccuucgugagcggcaacugcgacguggucaucggcaucgugaacaacacgguguacgacccccugcagcccgagcuggacuccuucaaggaggagcucgacaaguacuucaagaaccacaccagccccgacgucgaccugggggacaucuccggcaucaacgccagcguggugaacauccagaaggagaucgaccgccugaacgaggucgccaagaaccucaacgagucccugaucgaccugcaggagcucgggaaguacgagcaguacaucaaguggccgugguacaucuggcugggcuucaucgccggccugaucgcgaucgugauggugaccaucaugcucugcugcaugaccagcugcugcuccugccugaaggggugcugcagcugcggcuccugcugcaaguucgacgaggacgacagcgagcccguccugaagggggugaagcuccacuacacguga

SEQ ID NO: 22774 - RNA, 3816 nt, Artificial Sequence
  SARS-CoV-2/Wuhan/WIV05/2019__EPI_ISL_402128 spike protein CDS gc (1-1273)(H69del_V70del_D614G)
auguucguguuccugguccuccugccccuggugagcucccagugcgugaaccucaccacccgcacgcagcugccgcccgccuacaccaacagcuucacccggggcgucuacuaccccgacaagguguuccgcuccagcgugcugcacuccacccaggaccucuuccugcccuucuucagcaacgucacgugguuccacgccaucuccgggaccaacggcaccaagcgguucgacaacccggugcugcccuucaacgacggggucuacuucgcgagcaccgagaaguccaacaucauccgcggcuggaucuucgggacgacccucgacagcaagacccagucccugcugaucgugaacaacgccaccaacguggucaucaaggugugcgaguuccaguucugcaacgaccccuuccucggcguguacuaccacaagaacaacaagagcuggauggaguccgaguuccgggucuacagcuccgccaacaacugcacguucgaguacgugagccagcccuuccugauggaccuggagggcaagcaggggaacuucaagaaccuccgcgaguucguguucaagaacaucgacggcuacuucaagaucuacuccaagcacaccccgaucaaccugguccgggaccugccccagggguucagcgcccucgagccccugguggaccugcccaucggcaucaacaucacccgcuuccagacccuccuggcccugcaccgguccuaccucacgccgggggacagcagcuccggcuggaccgcgggcgccgccgccuacuacgugggguaccugcagccccgcaccuuccugcucaaguacaacgagaacggcaccaucacggacgcggucgacugcgcccuggacccccugagcgagaccaagugcacccucaaguccuucaccguggagaaggggaucuaccagacgagcaacuuccgggugcagcccaccgaguccaucguccgcuucccgaacaucaccaaccugugccccuucggcgagguguucaacgccacccgguucgccagcgucuacgccuggaaccgcaagcggaucuccaacugcguggcggacuacagcgugcuguacaacuccgccagcuucuccacguucaagugcuacggcgucagccccaccaagcucaacgaccugugcuucaccaacguguacgccgacuccuucgugauccgcggggacgagguccggcagaucgcccccggccagaccgggaagaucgccgacuacaacuacaagcugccggacgacuucacgggcugcgugaucgcguggaacagcaacaaccucgacuccaaggucgggggcaacuacaacuaccuguaccgccuguuccgcaagagcaaccucaagcccuucgagcgggacaucuccaccgagaucuaccaggccggcagcacccccugcaacgggguggagggcuucaacugcuacuucccccugcaguccuacggguuccagccgaccaacggcgugggguaccagcccuaccggguggucgugcugagcuucgagcuccugcacgcccccgccacggugugcggccccaagaaguccaccaaccuggucaagaacaagugcgugaacuucaacuucaacggccucaccgggaccggcgugcugaccgagagcaacaagaaguuccugccguuccagcaguucgggcgcgacaucgccgacacgaccgacgcgguccgcgacccccagacccuggagauccucgacaucacccccugcagcuucggcgggguguccgugaucacgccgggcaccaacaccagcaaccaggucgccgugcuguaccagggcgugaacugcaccgagguccccguggccauccacgccgaccagcugacgcccaccuggcggguguacuccaccggcagcaacgucuuccagacccgcgccgggugccucaucggcgcggagcacgugaacaacuccuacgagugcgacauccccaucggggccggcaucugcgccagcuaccagacgcagaccaacuccccgcggcgcgcccggagcguggcgucccagagcaucaucgccuacaccaugucccugggcgccgagaacagcgucgccuacuccaacaacagcaucgccauccccaccaacuucacgaucuccgugaccaccgagauccugcccgugagcaugaccaagacgagcgucgacugcaccauguacaucugcggggacuccaccgagugcagcaaccuccugcugcaguacggcuccuucugcacccagcucaaccgcgcgcugacggggaucgccguggagcaggacaagaacacccaggagguguucgcccaggucaagcagaucuacaagacgcccccgaucaaggacuucggcggguucaacuucagccagauccugcccgaccccuccaagcccagcaagcgguccuucaucgaggaccuccuguucaacaaggugacccuggccgacgccggcuucaucaagcaguacggcgacugccucggggacaucgcggcccgcgaccugaucugcgcccagaaguucaacggccugaccgugcucccgccccugcugaccgacgagaugaucgcccaguacaccagcgcccuccuggcggggaccaucacguccggcuggaccuucggggccggcgccgcccugcagauccccuucgcgaugcagauggccuaccgguucaacggcaucggggucacccagaacgugcucuacgagaaccagaagcugaucgccaaccaguucaacagcgccaucggcaagauccaggacucccugagcuccaccgccagcgcgcucgggaagcugcaggacguggucaaccagaacgcccaggcccugaacacgcucgugaagcagcuguccagcaacuucggcgccaucuccagcgugcugaacgacauccucucccgccuggacaaggucgaggccgaggugcagaucgaccggcugaucaccgggcgccuccagagccugcagaccuacgugacccagcagcugauccgggcggccgagauccgcgccagcgccaaccucgccgcgaccaagauguccgagugcguccugggccagagcaagcggguggacuucugcggcaagggguaccaccugauguccuucccccagagcgccccgcacggcguggucuuccuccacgugacguacguccccgcccaggagaagaacuucaccaccgcccccgcgaucugccacgacgggaaggcccacuucccccgcgagggcguguucguguccaacgggacccacugguucgucacgcagcggaacuucuacgagccgcagaucaucaccaccgacaacaccuucgugagcggcaacugcgacguggucaucggcaucgugaacaacacgguguacgacccccugcagcccgagcuggacuccuucaaggaggagcucgacaaguacuucaagaaccacaccagccccgacgucgaccugggggacaucuccggcaucaacgccagcguggugaacauccagaaggagaucgaccgccugaacgaggucgccaagaaccucaacgagucccugaucgaccugcaggagcucgggaaguacgagcaguacaucaaguggccgugguacaucuggcugggcuucaucgccggccugaucgcgaucgugauggugaccaucaugcucugcugcaugaccagcugcugcuccugccugaaggggugcugcagcugcggcuccugcugcaaguucgacgaggacgacagcgagcccguccugaagggggugaagcuccacuacacguga

SEQ ID NO: 22775 - RNA, 3816 nt, Artificial Sequence
  SARS-CoV-2/Wuhan/WIV05/2019__EPI_ISL_402128 spike protein CDS gc (1-1273)(K986P_V987P_H69del_V70del_D614G)
auguucguguuccugguccuccugccccuggugagcucccagugcgugaaccucaccacccgcacgcagcugccgcccgccuacaccaacagcuucacccggggcgucuacuaccccgacaagguguuccgcuccagcgugcugcacuccacccaggaccucuuccugcccuucuucagcaacgucacgugguuccacgccaucuccgggaccaacggcaccaagcgguucgacaacccggugcugcccuucaacgacggggucuacuucgcgagcaccgagaaguccaacaucauccgcggcuggaucuucgggacgacccucgacagcaagacccagucccugcugaucgugaacaacgccaccaacguggucaucaaggugugcgaguuccaguucugcaacgaccccuuccucggcguguacuaccacaagaacaacaagagcuggauggaguccgaguuccgggucuacagcuccgccaacaacugcacguucgaguacgugagccagcccuuccugauggaccuggagggcaagcaggggaacuucaagaaccuccgcgaguucguguucaagaacaucgacggcuacuucaagaucuacuccaagcacaccccgaucaaccugguccgggaccugccccagggguucagcgcccucgagccccugguggaccugcccaucggcaucaacaucacccgcuuccagacccuccuggcccugcaccgguccuaccucacgccgggggacagcagcuccggcuggaccgcgggcgccgccgccuacuacgugggguaccugcagccccgcaccuuccugcucaaguacaacgagaacggcaccaucacggacgcggucgacugcgcccuggacccccugagcgagaccaagugcacccucaaguccuucaccguggagaaggggaucuaccagacgagcaacuuccgggugcagcccaccgaguccaucguccgcuucccgaacaucaccaaccugugccccuucggcgagguguucaacgccacccgguucgccagcgucuacgccuggaaccgcaagcggaucuccaacugcguggcggacuacagcgugcuguacaacuccgccagcuucuccacguucaagugcuacggcgucagccccaccaagcucaacgaccugugcuucaccaacguguacgccgacuccuucgugauccgcggggacgagguccggcagaucgcccccggccagaccgggaagaucgccgacuacaacuacaagcugccggacgacuucacgggcugcgugaucgcguggaacagcaacaaccucgacuccaaggucgggggcaacuacaacuaccuguaccgccuguuccgcaagagcaaccucaagcccuucgagcgggacaucuccaccgagaucuaccaggccggcagcacccccugcaacgggguggagggcuucaacugcuacuucccccugcaguccuacggguuccagccgaccaacggcgugggguaccagcccuaccggguggucgugcugagcuucgagcuccugcacgcccccgccacggugugcggccccaagaaguccaccaaccuggucaagaacaagugcgugaacuucaacuucaacggccucaccgggaccggcgugcugaccgagagcaacaagaaguuccugccguuccagcaguucgggcgcgacaucgccgacacgaccgacgcgguccgcgacccccagacccuggagauccucgacaucacccccugcagcuucggcgggguguccgugaucacgccgggcaccaacaccagcaaccaggucgccgugcuguaccagggcgugaacugcaccgagguccccguggccauccacgccgaccagcugacgcccaccuggcggguguacuccaccggcagcaacgucuuccagacccgcgccgggugccucaucggcgcggagcacgugaacaacuccuacgagugcgacauccccaucggggccggcaucugcgccagcuaccagacgcagaccaacuccccgcggcgcgcccggagcguggcgucccagagcaucaucgccuacaccaugucccugggcgccgagaacagcgucgccuacuccaacaacagcaucgccauccccaccaacuucacgaucuccgugaccaccgagauccugcccgugagcaugaccaagacgagcgucgacugcaccauguacaucugcggggacuccaccgagugcagcaaccuccugcugcaguacggcuccuucugcacccagcucaaccgcgcgcugacggggaucgccguggagcaggacaagaacacccaggagguguucgcccaggucaagcagaucuacaagacgcccccgaucaaggacuucggcggguucaacuucagccagauccugcccgaccccuccaagcccagcaagcgguccuucaucgaggaccuccuguucaacaaggugacccuggccgacgccggcuucaucaagcaguacggcgacugccucggggacaucgcggcccgcgaccugaucugcgcccagaaguucaacggccugaccgugcucccgccccugcugaccgacgagaugaucgcccaguacaccagcgcccuccuggcggggaccaucacguccggcuggaccuucggggccggcgccgcccugcagauccccuucgcgaugcagauggccuaccgguucaacggcaucggggucacccagaacgugcucuacgagaaccagaagcugaucgccaaccaguucaacagcgccaucggcaagauccaggacucccugagcuccaccgccagcgcgcucgggaagcugcaggacguggucaaccagaacgcccaggcccugaacacgcucgugaagcagcuguccagcaacuucggcgccaucuccagcgugcugaacgacauccucucccgccuggacccgcccgaggccgaggugcagaucgaccggcugaucaccgggcgccuccagagccugcagaccuacgugacccagcagcugauccgggcggccgagauccgcgccagcgccaaccucgccgcgaccaagauguccgagugcguccugggccagagcaagcggguggacuucugcggcaagggguaccaccugauguccuucccccagagcgccccgcacggcguggucuuccuccacgugacguacguccccgcccaggagaagaacuucaccaccgcccccgcgaucugccacgacgggaaggcccacuucccccgcgagggcguguucguguccaacgggacccacugguucgucacgcagcggaacuucuacgagccgcagaucaucaccaccgacaacaccuucgugagcggcaacugcgacguggucaucggcaucgugaacaacacgguguacgacccccugcagcccgagcuggacuccuucaaggaggagcucgacaaguacuucaagaaccacaccagccccgacgucgaccugggggacaucuccggcaucaacgccagcguggugaacauccagaaggagaucgaccgccugaacgaggucgccaagaaccucaacgagucccugaucgaccugcaggagcucgggaaguacgagcaguacaucaaguggccgugguacaucuggcugggcuucaucgccggccugaucgcgaucgugauggugaccaucaugcucugcugcaugaccagcugcugcuccugccugaaggggugcugcagcugcggcuccugcugcaaguucgacgaggacgacagcgagcccguccugaagggggugaagcuccacuacacguga

SEQ ID NO: 22776 - RNA, 3822 nt, Artificial Sequence
  SARS-CoV-2/Wuhan/WIV05/2019__EPI_ISL_402128 spike protein CDS gc (1-1273)(Y453F_D614G)
auguucguguuccugguccuccugccccuggugagcucccagugcgugaaccucaccacccgcacgcagcugccgcccgccuacaccaacagcuucacccggggcgucuacuaccccgacaagguguuccgcuccagcgugcugcacuccacccaggaccucuuccugcccuucuucagcaacgucacgugguuccacgccauccacguguccgggaccaacggcaccaagcgguucgacaacccggugcugcccuucaacgacggggucuacuucgcgagcaccgagaaguccaacaucauccgcggcuggaucuucgggacgacccucgacagcaagacccagucccugcugaucgugaacaacgccaccaacguggucaucaaggugugcgaguuccaguucugcaacgaccccuuccucggcguguacuaccacaagaacaacaagagcuggauggaguccgaguuccgggucuacagcuccgccaacaacugcacguucgaguacgugagccagcccuuccugauggaccuggagggcaagcaggggaacuucaagaaccuccgcgaguucguguucaagaacaucgacggcuacuucaagaucuacuccaagcacaccccgaucaaccugguccgggaccugccccagggguucagcgcccucgagccccugguggaccugcccaucggcaucaacaucacccgcuuccagacccuccuggcccugcaccgguccuaccucacgccgggggacagcagcuccggcuggaccgcgggcgccgccgccuacuacgugggguaccugcagccccgcaccuuccugcucaaguacaacgagaacggcaccaucacggacgcggucgacugcgcccuggacccccugagcgagaccaagugcacccucaaguccuucaccguggagaaggggaucuaccagacgagcaacuuccgggugcagcccaccgaguccaucguccgcuucccgaacaucaccaaccugugccccuucggcgagguguucaacgccacccgguucgccagcgucuacgccuggaaccgcaagcggaucuccaacugcguggcggacuacagcgugcuguacaacuccgccagcuucuccacguucaagugcuacggcgucagccccaccaagcucaacgaccugugcuucaccaacguguacgccgacuccuucgugauccgcggggacgagguccggcagaucgcccccggccagaccgggaagaucgccgacuacaacuacaagcugccggacgacuucacgggcugcgugaucgcguggaacagcaacaaccucgacuccaaggucgggggcaacuacaacuaccuguuccgccuguuccgcaagagcaaccucaagcccuucgagcgggacaucuccaccgagaucuaccaggccggcagcacccccugcaacgggguggagggcuucaacugcuacuucccccugcaguccuacggguuccagccgaccaacggcgugggguaccagcccuaccggguggucgugcugagcuucgagcuccugcacgcccccgccacggugugcggccccaagaaguccaccaaccuggucaagaacaagugcgugaacuucaacuucaacggccucaccgggaccggcgugcugaccgagagcaacaagaaguuccugccguuccagcaguucgggcgcgacaucgccgacacgaccgacgcgguccgcgacccccagacccuggagauccucgacaucacccccugcagcuucggcgggguguccgugaucacgccgggcaccaacaccagcaaccaggucgccgugcuguaccagggcgugaacugcaccgagguccccguggccauccacgccgaccagcugacgcccaccuggcggguguacuccaccggcagcaacgucuuccagacccgcgccgggugccucaucggcgcggagcacgugaacaacuccuacgagugcgacauccccaucggggccggcaucugcgccagcuaccagacgcagaccaacuccccgcggcgcgcccggagcguggcgucccagagcaucaucgccuacaccaugucccugggcgccgagaacagcgucgccuacuccaacaacagcaucgccauccccaccaacuucacgaucuccgugaccaccgagauccugcccgugagcaugaccaagacgagcgucgacugcaccauguacaucugcggggacuccaccgagugcagcaaccuccugcugcaguacggcuccuucugcacccagcucaaccgcgcgcugacggggaucgccguggagcaggacaagaacacccaggagguguucgcccaggucaagcagaucuacaagacgcccccgaucaaggacuucggcggguucaacuucagccagauccugcccgaccccuccaagcccagcaagcgguccuucaucgaggaccuccuguucaacaaggugacccuggccgacgccggcuucaucaagcaguacggcgacugccucggggacaucgcggcccgcgaccugaucugcgcccagaaguucaacggccugaccgugcucccgccccugcugaccgacgagaugaucgcccaguacaccagcgcccuccuggcggggaccaucacguccggcuggaccuucggggccggcgccgcccugcagauccccuucgcgaugcagauggccuaccgguucaacggcaucggggucacccagaacgugcucuacgagaaccagaagcugaucgccaaccaguucaacagcgccaucggcaagauccaggacucccugagcuccaccgccagcgcgcucgggaagcugcaggacguggucaaccagaacgcccaggcccugaacacgcucgugaagcagcuguccagcaacuucggcgccaucuccagcgugcugaacgacauccucucccgccuggacaaggucgaggccgaggugcagaucgaccggcugaucaccgggcgccuccagagccugcagaccuacgugacccagcagcugauccgggcggccgagauccgcgccagcgccaaccucgccgcgaccaagauguccgagugcguccugggccagagcaagcggguggacuucugcggcaagggguaccaccugauguccuucccccagagcgccccgcacggcguggucuuccuccacgugacguacguccccgcccaggagaagaacuucaccaccgcccccgcgaucugccacgacgggaaggcccacuucccccgcgagggcguguucguguccaacgggacccacugguucgucacgcagcggaacuucuacgagccgcagaucaucaccaccgacaacaccuucgugagcggcaacugcgacguggucaucggcaucgugaacaacacgguguacgacccccugcagcccgagcuggacuccuucaaggaggagcucgacaaguacuucaagaaccacaccagccccgacgucgaccugggggacaucuccggcaucaacgccagcguggugaacauccagaaggagaucgaccgccugaacgaggucgccaagaaccucaacgagucccugaucgaccugcaggagcucgggaaguacgagcaguacaucaaguggccgugguacaucuggcugggcuucaucgccggccugaucgcgaucgugauggugaccaucaugcucugcugcaugaccagcugcugcuccugccugaaggggugcugcagcugcggcuccugcugcaaguucgacgaggacgacagcgagcccguccugaagggggugaagcuccacuacacguga

SEQ ID NO: 22777 - RNA, 3822 nt, Artificial Sequence
  SARS-CoV-2/Wuhan/WIV05/2019__EPI_ISL_402128 spike protein CDS gc (1-1273)(K986P_V987P_Y453F_D614G)
auguucguguuccugguccuccugccccuggugagcucccagugcgugaaccucaccacccgcacgcagcugccgcccgccuacaccaacagcuucacccggggcgucuacuaccccgacaagguguuccgcuccagcgugcugcacuccacccaggaccucuuccugcccuucuucagcaacgucacgugguuccacgccauccacguguccgggaccaacggcaccaagcgguucgacaacccggugcugcccuucaacgacggggucuacuucgcgagcaccgagaaguccaacaucauccgcggcuggaucuucgggacgacccucgacagcaagacccagucccugcugaucgugaacaacgccaccaacguggucaucaaggugugcgaguuccaguucugcaacgaccccuuccucggcguguacuaccacaagaacaacaagagcuggauggaguccgaguuccgggucuacagcuccgccaacaacugcacguucgaguacgugagccagcccuuccugauggaccuggagggcaagcaggggaacuucaagaaccuccgcgaguucguguucaagaacaucgacggcuacuucaagaucuacuccaagcacaccccgaucaaccugguccgggaccugccccagggguucagcgcccucgagccccugguggaccugcccaucggcaucaacaucacccgcuuccagacccuccuggcccugcaccgguccuaccucacgccgggggacagcagcuccggcuggaccgcgggcgccgccgccuacuacgugggguaccugcagccccgcaccuuccugcucaaguacaacgagaacggcaccaucacggacgcggucgacugcgcccuggacccccugagcgagaccaagugcacccucaaguccuucaccguggagaaggggaucuaccagacgagcaacuuccgggugcagcccaccgaguccaucguccgcuucccgaacaucaccaaccugugccccuucggcgagguguucaacgccacccgguucgccagcgucuacgccuggaaccgcaagcggaucuccaacugcguggcggacuacagcgugcuguacaacuccgccagcuucuccacguucaagugcuacggcgucagccccaccaagcucaacgaccugugcuucaccaacguguacgccgacuccuucgugauccgcggggacgagguccggcagaucgcccccggccagaccgggaagaucgccgacuacaacuacaagcugccggacgacuucacgggcugcgugaucgcguggaacagcaacaaccucgacuccaaggucgggggcaacuacaacuaccuguuccgccuguuccgcaagagcaaccucaagcccuucgagcgggacaucuccaccgagaucuaccaggccggcagcacccccugcaacgggguggagggcuucaacugcuacuucccccugcaguccuacggguuccagccgaccaacggcgugggguaccagcccuaccggguggucgugcugagcuucgagcuccugcacgcccccgccacggugugcggccccaagaaguccaccaaccuggucaagaacaagugcgugaacuucaacuucaacggccucaccgggaccggcgugcugaccgagagcaacaagaaguuccugccguuccagcaguucgggcgcgacaucgccgacacgaccgacgcgguccgcgacccccagacccuggagauccucgacaucacccccugcagcuucggcgggguguccgugaucacgccgggcaccaacaccagcaaccaggucgccgugcuguaccagggcgugaacugcaccgagguccccguggccauccacgccgaccagcugacgcccaccuggcggguguacuccaccggcagcaacgucuuccagacccgcgccgggugccucaucggcgcggagcacgugaacaacuccuacgagugcgacauccccaucggggccggcaucugcgccagcuaccagacgcagaccaacuccccgcggcgcgcccggagcguggcgucccagagcaucaucgccuacaccaugucccugggcgccgagaacagcgucgccuacuccaacaacagcaucgccauccccaccaacuucacgaucuccgugaccaccgagauccugcccgugagcaugaccaagacgagcgucgacugcaccauguacaucugcggggacuccaccgagugcagcaaccuccugcugcaguacggcuccuucugcacccagcucaaccgcgcgcugacggggaucgccguggagcaggacaagaacacccaggagguguucgcccaggucaagcagaucuacaagacgcccccgaucaaggacuucggcggguucaacuucagccagauccugcccgaccccuccaagcccagcaagcgguccuucaucgaggaccuccuguucaacaaggugacccuggccgacgccggcuucaucaagcaguacggcgacugccucggggacaucgcggcccgcgaccugaucugcgcccagaaguucaacggccugaccgugcucccgccccugcugaccgacgagaugaucgcccaguacaccagcgcccuccuggcggggaccaucacguccggcuggaccuucggggccggcgccgcccugcagauccccuucgcgaugcagauggccuaccgguucaacggcaucggggucacccagaacgugcucuacgagaaccagaagcugaucgccaaccaguucaacagcgccaucggcaagauccaggacucccugagcuccaccgccagcgcgcucgggaagcugcaggacguggucaaccagaacgcccaggcccugaacacgcucgugaagcagcuguccagcaacuucggcgccaucuccagcgugcugaacgacauccucucccgccuggacccgcccgaggccgaggugcagaucgaccggcugaucaccgggcgccuccagagccugcagaccuacgugacccagcagcugauccgggcggccgagauccgcgccagcgccaaccucgccgcgaccaagauguccgagugcguccugggccagagcaagcggguggacuucugcggcaagggguaccaccugauguccuucccccagagcgccccgcacggcguggucuuccuccacgugacguacguccccgcccaggagaagaacuucaccaccgcccccgcgaucugccacgacgggaaggcccacuucccccgcgagggcguguucguguccaacgggacccacugguucgucacgcagcggaacuucuacgagccgcagaucaucaccaccgacaacaccuucgugagcggcaacugcgacguggucaucggcaucgugaacaacacgguguacgacccccugcagcccgagcuggacuccuucaaggaggagcucgacaaguacuucaagaaccacaccagccccgacgucgaccugggggacaucuccggcaucaacgccagcguggugaacauccagaaggagaucgaccgccugaacgaggucgccaagaaccucaacgagucccugaucgaccugcaggagcucgggaaguacgagcaguacaucaaguggccgugguacaucuggcugggcuucaucgccggccugaucgcgaucgugauggugaccaucaugcucugcugcaugaccagcugcugcuccugccugaaggggugcugcagcugcggcuccugcugcaaguucgacgaggacgacagcgagcccguccugaagggggugaagcuccacuacacguga

SEQ ID NO: 22778 - RNA, 3822 nt, Artificial Sequence
  SARS-CoV-2/Wuhan/WIV05/2019__EPI_ISL_402128 spike protein CDS gc (1-1273)(D614G_I692V)
auguucguguuccugguccuccugccccuggugagcucccagugcgugaaccucaccacccgcacgcagcugccgcccgccuacaccaacagcuucacccggggcgucuacuaccccgacaagguguuccgcuccagcgugcugcacuccacccaggaccucuuccugcccuucuucagcaacgucacgugguuccacgccauccacguguccgggaccaacggcaccaagcgguucgacaacccggugcugcccuucaacgacggggucuacuucgcgagcaccgagaaguccaacaucauccgcggcuggaucuucgggacgacccucgacagcaagacccagucccugcugaucgugaacaacgccaccaacguggucaucaaggugugcgaguuccaguucugcaacgaccccuuccucggcguguacuaccacaagaacaacaagagcuggauggaguccgaguuccgggucuacagcuccgccaacaacugcacguucgaguacgugagccagcccuuccugauggaccuggagggcaagcaggggaacuucaagaaccuccgcgaguucguguucaagaacaucgacggcuacuucaagaucuacuccaagcacaccccgaucaaccugguccgggaccugccccagggguucagcgcccucgagccccugguggaccugcccaucggcaucaacaucacccgcuuccagacccuccuggcccugcaccgguccuaccucacgccgggggacagcagcuccggcuggaccgcgggcgccgccgccuacuacgugggguaccugcagccccgcaccuuccugcucaaguacaacgagaacggcaccaucacggacgcggucgacugcgcccuggacccccugagcgagaccaagugcacccucaaguccuucaccguggagaaggggaucuaccagacgagcaacuuccgggugcagcccaccgaguccaucguccgcuucccgaacaucaccaaccugugccccuucggcgagguguucaacgccacccgguucgccagcgucuacgccuggaaccgcaagcggaucuccaacugcguggcggacuacagcgugcuguacaacuccgccagcuucuccacguucaagugcuacggcgucagccccaccaagcucaacgaccugugcuucaccaacguguacgccgacuccuucgugauccgcggggacgagguccggcagaucgcccccggccagaccgggaagaucgccgacuacaacuacaagcugccggacgacuucacgggcugcgugaucgcguggaacagcaacaaccucgacuccaaggucgggggcaacuacaacuaccuguaccgccuguuccgcaagagcaaccucaagcccuucgagcgggacaucuccaccgagaucuaccaggccggcagcacccccugcaacgggguggagggcuucaacugcuacuucccccugcaguccuacggguuccagccgaccaacggcgugggguaccagcccuaccggguggucgugcugagcuucgagcuccugcacgcccccgccacggugugcggccccaagaaguccaccaaccuggucaagaacaagugcgugaacuucaacuucaacggccucaccgggaccggcgugcugaccgagagcaacaagaaguuccugccguuccagcaguucgggcgcgacaucgccgacacgaccgacgcgguccgcgacccccagacccuggagauccucgacaucacccccugcagcuucggcgggguguccgugaucacgccgggcaccaacaccagcaaccaggucgccgugcuguaccagggcgugaacugcaccgagguccccguggccauccacgccgaccagcugacgcccaccuggcggguguacuccaccggcagcaacgucuuccagacccgcgccgggugccucaucggcgcggagcacgugaacaacuccuacgagugcgacauccccaucggggccggcaucugcgccagcuaccagacgcagaccaacuccccgcggcgcgcccggagcguggcgucccagagcgucaucgccuacaccaugucccugggcgccgagaacagcgucgccuacuccaacaacagcaucgccauccccaccaacuucacgaucuccgugaccaccgagauccugcccgugagcaugaccaagacgagcgucgacugcaccauguacaucugcggggacuccaccgagugcagcaaccuccugcugcaguacggcuccuucugcacccagcucaaccgcgcgcugacggggaucgccguggagcaggacaagaacacccaggagguguucgcccaggucaagcagaucuacaagacgcccccgaucaaggacuucggcggguucaacuucagccagauccugcccgaccccuccaagcccagcaagcgguccuucaucgaggaccuccuguucaacaaggugacccuggccgacgccggcuucaucaagcaguacggcgacugccucggggacaucgcggcccgcgaccugaucugcgcccagaaguucaacggccugaccgugcucccgccccugcugaccgacgagaugaucgcccaguacaccagcgcccuccuggcggggaccaucacguccggcuggaccuucggggccggcgccgcccugcagauccccuucgcgaugcagauggccuaccgguucaacggcaucggggucacccagaacgugcucuacgagaaccagaagcugaucgccaaccaguucaacagcgccaucggcaagauccaggacucccugagcuccaccgccagcgcgcucgggaagcugcaggacguggucaaccagaacgcccaggcccugaacacgcucgugaagcagcuguccagcaacuucggcgccaucuccagcgugcugaacgacauccucucccgccuggacaaggucgaggccgaggugcagaucgaccggcugaucaccgggcgccuccagagccugcagaccuacgugacccagcagcugauccgggcggccgagauccgcgccagcgccaaccucgccgcgaccaagauguccgagugcguccugggccagagcaagcggguggacuucugcggcaagggguaccaccugauguccuucccccagagcgccccgcacggcguggucuuccuccacgugacguacguccccgcccaggagaagaacuucaccaccgcccccgcgaucugccacgacgggaaggcccacuucccccgcgagggcguguucguguccaacgggacccacugguucgucacgcagcggaacuucuacgagccgcagaucaucaccaccgacaacaccuucgugagcggcaacugcgacguggucaucggcaucgugaacaacacgguguacgacccccugcagcccgagcuggacuccuucaaggaggagcucgacaaguacuucaagaaccacaccagccccgacgucgaccugggggacaucuccggcaucaacgccagcguggugaacauccagaaggagaucgaccgccugaacgaggucgccaagaaccucaacgagucccugaucgaccugcaggagcucgggaaguacgagcaguacaucaaguggccgugguacaucuggcugggcuucaucgccggccugaucgcgaucgugauggugaccaucaugcucugcugcaugaccagcugcugcuccugccugaaggggugcugcagcugcggcuccugcugcaaguucgacgaggacgacagcgagcccguccugaagggggugaagcuccacuacacguga

SEQ ID NO: 22779 - RNA, 3822 nt, Artificial Sequence
  SARS-CoV-2/Wuhan/WIV05/2019__EPI_ISL_402128 spike protein CDS gc (1-1273)(K986P_V987P_D614G_I692V)
auguucguguuccugguccuccugccccuggugagcucccagugcgugaaccucaccacccgcacgcagcugccgcccgccuacaccaacagcuucacccggggcgucuacuaccccgacaagguguuccgcuccagcgugcugcacuccacccaggaccucuuccugcccuucuucagcaacgucacgugguuccacgccauccacguguccgggaccaacggcaccaagcgguucgacaacccggugcugcccuucaacgacggggucuacuucgcgagcaccgagaaguccaacaucauccgcggcuggaucuucgggacgacccucgacagcaagacccagucccugcugaucgugaacaacgccaccaacguggucaucaaggugugcgaguuccaguucugcaacgaccccuuccucggcguguacuaccacaagaacaacaagagcuggauggaguccgaguuccgggucuacagcuccgccaacaacugcacguucgaguacgugagccagcccuuccugauggaccuggagggcaagcaggggaacuucaagaaccuccgcgaguucguguucaagaacaucgacggcuacuucaagaucuacuccaagcacaccccgaucaaccugguccgggaccugccccagggguucagcgcccucgagccccugguggaccugcccaucggcaucaacaucacccgcuuccagacccuccuggcccugcaccgguccuaccucacgccgggggacagcagcuccggcuggaccgcgggcgccgccgccuacuacgugggguaccugcagccccgcaccuuccugcucaaguacaacgagaacggcaccaucacggacgcggucgacugcgcccuggacccccugagcgagaccaagugcacccucaaguccuucaccguggagaaggggaucuaccagacgagcaacuuccgggugcagcccaccgaguccaucguccgcuucccgaacaucaccaaccugugccccuucggcgagguguucaacgccacccgguucgccagcgucuacgccuggaaccgcaagcggaucuccaacugcguggcggacuacagcgugcuguacaacuccgccagcuucuccacguucaagugcuacggcgucagccccaccaagcucaacgaccugugcuucaccaacguguacgccgacuccuucgugauccgcggggacgagguccggcagaucgcccccggccagaccgggaagaucgccgacuacaacuacaagcugccggacgacuucacgggcugcgugaucgcguggaacagcaacaaccucgacuccaaggucgggggcaacuacaacuaccuguaccgccuguuccgcaagagcaaccucaagcccuucgagcgggacaucuccaccgagaucuaccaggccggcagcacccccugcaacgggguggagggcuucaacugcuacuucccccugcaguccuacggguuccagccgaccaacggcgugggguaccagcccuaccggguggucgugcugagcuucgagcuccugcacgcccccgccacggugugcggccccaagaaguccaccaaccuggucaagaacaagugcgugaacuucaacuucaacggccucaccgggaccggcgugcugaccgagagcaacaagaaguuccugccguuccagcaguucgggcgcgacaucgccgacacgaccgacgcgguccgcgacccccagacccuggagauccucgacaucacccccugcagcuucggcgggguguccgugaucacgccgggcaccaacaccagcaaccaggucgccgugcuguaccagggcgugaacugcaccgagguccccguggccauccacgccgaccagcugacgcccaccuggcggguguacuccaccggcagcaacgucuuccagacccgcgccgggugccucaucggcgcggagcacgugaacaacuccuacgagugcgacauccccaucggggccggcaucugcgccagcuaccagacgcagaccaacuccccgcggcgcgcccggagcguggcgucccagagcgucaucgccuacaccaugucccugggcgccgagaacagcgucgccuacuccaacaacagcaucgccauccccaccaacuucacgaucuccgugaccaccgagauccugcccgugagcaugaccaagacgagcgucgacugcaccauguacaucugcggggacuccaccgagugcagcaaccuccugcugcaguacggcuccuucugcacccagcucaaccgcgcgcugacggggaucgccguggagcaggacaagaacacccaggagguguucgcccaggucaagcagaucuacaagacgcccccgaucaaggacuucggcggguucaacuucagccagauccugcccgaccccuccaagcccagcaagcgguccuucaucgaggaccuccuguucaacaaggugacccuggccgacgccggcuucaucaagcaguacggcgacugccucggggacaucgcggcccgcgaccugaucugcgcccagaaguucaacggccugaccgugcucccgccccugcugaccgacgagaugaucgcccaguacaccagcgcccuccuggcggggaccaucacguccggcuggaccuucggggccggcgccgcccugcagauccccuucgcgaugcagauggccuaccgguucaacggcaucggggucacccagaacgugcucuacgagaaccagaagcugaucgccaaccaguucaacagcgccaucggcaagauccaggacucccugagcuccaccgccagcgcgcucgggaagcugcaggacguggucaaccagaacgcccaggcccugaacacgcucgugaagcagcuguccagcaacuucggcgccaucuccagcgugcugaacgacauccucucccgccuggacccgcccgaggccgaggugcagaucgaccggcugaucaccgggcgccuccagagccugcagaccuacgugacccagcagcugauccgggcggccgagauccgcgccagcgccaaccucgccgcgaccaagauguccgagugcguccugggccagagcaagcggguggacuucugcggcaagggguaccaccugauguccuucccccagagcgccccgcacggcguggucuuccuccacgugacguacguccccgcccaggagaagaacuucaccaccgcccccgcgaucugccacgacgggaaggcccacuucccccgcgagggcguguucguguccaacgggacccacugguucgucacgcagcggaacuucuacgagccgcagaucaucaccaccgacaacaccuucgugagcggcaacugcgacguggucaucggcaucgugaacaacacgguguacgacccccugcagcccgagcuggacuccuucaaggaggagcucgacaaguacuucaagaaccacaccagccccgacgucgaccugggggacaucuccggcaucaacgccagcguggugaacauccagaaggagaucgaccgccugaacgaggucgccaagaaccucaacgagucccugaucgaccugcaggagcucgggaaguacgagcaguacaucaaguggccgugguacaucuggcugggcuucaucgccggccugaucgcgaucgugauggugaccaucaugcucugcugcaugaccagcugcugcuccugccugaaggggugcugcagcugcggcuccugcugcaaguucgacgaggacgacagcgagcccguccugaagggggugaagcuccacuacacguga

SEQ ID NO: 22780 - RNA, 3822 nt, Artificial Sequence
  SARS-CoV-2/Wuhan/WIV05/2019__EPI_ISL_402128 spike protein CDS gc (1-1273)(D614G_M1229I)
auguucguguuccugguccuccugccccuggugagcucccagugcgugaaccucaccacccgcacgcagcugccgcccgccuacaccaacagcuucacccggggcgucuacuaccccgacaagguguuccgcuccagcgugcugcacuccacccaggaccucuuccugcccuucuucagcaacgucacgugguuccacgccauccacguguccgggaccaacggcaccaagcgguucgacaacccggugcugcccuucaacgacggggucuacuucgcgagcaccgagaaguccaacaucauccgcggcuggaucuucgggacgacccucgacagcaagacccagucccugcugaucgugaacaacgccaccaacguggucaucaaggugugcgaguuccaguucugcaacgaccccuuccucggcguguacuaccacaagaacaacaagagcuggauggaguccgaguuccgggucuacagcuccgccaacaacugcacguucgaguacgugagccagcccuuccugauggaccuggagggcaagcaggggaacuucaagaaccuccgcgaguucguguucaagaacaucgacggcuacuucaagaucuacuccaagcacaccccgaucaaccugguccgggaccugccccagggguucagcgcccucgagccccugguggaccugcccaucggcaucaacaucacccgcuuccagacccuccuggcccugcaccgguccuaccucacgccgggggacagcagcuccggcuggaccgcgggcgccgccgccuacuacgugggguaccugcagccccgcaccuuccugcucaaguacaacgagaacggcaccaucacggacgcggucgacugcgcccuggacccccugagcgagaccaagugcacccucaaguccuucaccguggagaaggggaucuaccagacgagcaacuuccgggugcagcccaccgaguccaucguccgcuucccgaacaucaccaaccugugccccuucggcgagguguucaacgccacccgguucgccagcgucuacgccuggaaccgcaagcggaucuccaacugcguggcggacuacagcgugcuguacaacuccgccagcuucuccacguucaagugcuacggcgucagccccaccaagcucaacgaccugugcuucaccaacguguacgccgacuccuucgugauccgcggggacgagguccggcagaucgcccccggccagaccgggaagaucgccgacuacaacuacaagcugccggacgacuucacgggcugcgugaucgcguggaacagcaacaaccucgacuccaaggucgggggcaacuacaacuaccuguaccgccuguuccgcaagagcaaccucaagcccuucgagcgggacaucuccaccgagaucuaccaggccggcagcacccccugcaacgggguggagggcuucaacugcuacuucccccugcaguccuacggguuccagccgaccaacggcgugggguaccagcccuaccggguggucgugcugagcuucgagcuccugcacgcccccgccacggugugcggccccaagaaguccaccaaccuggucaagaacaagugcgugaacuucaacuucaacggccucaccgggaccggcgugcugaccgagagcaacaagaaguuccugccguuccagcaguucgggcgcgacaucgccgacacgaccgacgcgguccgcgacccccagacccuggagauccucgacaucacccccugcagcuucggcgggguguccgugaucacgccgggcaccaacaccagcaaccaggucgccgugcuguaccagggcgugaacugcaccgagguccccguggccauccacgccgaccagcugacgcccaccuggcggguguacuccaccggcagcaacgucuuccagacccgcgccgggugccucaucggcgcggagcacgugaacaacuccuacgagugcgacauccccaucggggccggcaucugcgccagcuaccagacgcagaccaacuccccgcggcgcgcccggagcguggcgucccagagcaucaucgccuacaccaugucccugggcgccgagaacagcgucgccuacuccaacaacagcaucgccauccccaccaacuucacgaucuccgugaccaccgagauccugcccgugagcaugaccaagacgagcgucgacugcaccauguacaucugcggggacuccaccgagugcagcaaccuccugcugcaguacggcuccuucugcacccagcucaaccgcgcgcugacggggaucgccguggagcaggacaagaacacccaggagguguucgcccaggucaagcagaucuacaagacgcccccgaucaaggacuucggcggguucaacuucagccagauccugcccgaccccuccaagcccagcaagcgguccuucaucgaggaccuccuguucaacaaggugacccuggccgacgccggcuucaucaagcaguacggcgacugccucggggacaucgcggcccgcgaccugaucugcgcccagaaguucaacggccugaccgugcucccgccccugcugaccgacgagaugaucgcccaguacaccagcgcccuccuggcggggaccaucacguccggcuggaccuucggggccggcgccgcccugcagauccccuucgcgaugcagauggccuaccgguucaacggcaucggggucacccagaacgugcucuacgagaaccagaagcugaucgccaaccaguucaacagcgccaucggcaagauccaggacucccugagcuccaccgccagcgcgcucgggaagcugcaggacguggucaaccagaacgcccaggcccugaacacgcucgugaagcagcuguccagcaacuucggcgccaucuccagcgugcugaacgacauccucucccgccuggacaaggucgaggccgaggugcagaucgaccggcugaucaccgggcgccuccagagccugcagaccuacgugacccagcagcugauccgggcggccgagauccgcgccagcgccaaccucgccgcgaccaagauguccgagugcguccugggccagagcaagcggguggacuucugcggcaagggguaccaccugauguccuucccccagagcgccccgcacggcguggucuuccuccacgugacguacguccccgcccaggagaagaacuucaccaccgcccccgcgaucugccacgacgggaaggcccacuucccccgcgagggcguguucguguccaacgggacccacugguucgucacgcagcggaacuucuacgagccgcagaucaucaccaccgacaacaccuucgugagcggcaacugcgacguggucaucggcaucgugaacaacacgguguacgacccccugcagcccgagcuggacuccuucaaggaggagcucgacaaguacuucaagaaccacaccagccccgacgucgaccugggggacaucuccggcaucaacgccagcguggugaacauccagaaggagaucgaccgccugaacgaggucgccaagaaccucaacgagucccugaucgaccugcaggagcucgggaaguacgagcaguacaucaaguggccgugguacaucuggcugggcuucaucgccggccugaucgcgaucgugaucgugaccaucaugcucugcugcaugaccagcugcugcuccugccugaaggggugcugcagcugcggcuccugcugcaaguucgacgaggacgacagcgagcccguccugaagggggugaagcuccacuacacguga

SEQ ID NO: 22781 - RNA, 3822 nt, Artificial Sequence
  SARS-CoV-2/Wuhan/WIV05/2019__EPI_ISL_402128 spike protein CDS gc (1-1273)(K986P_V987P_D614G_M1229I)
auguucguguuccugguccuccugccccuggugagcucccagugcgugaaccucaccacccgcacgcagcugccgcccgccuacaccaacagcuucacccggggcgucuacuaccccgacaagguguuccgcuccagcgugcugcacuccacccaggaccucuuccugcccuucuucagcaacgucacgugguuccacgccauccacguguccgggaccaacggcaccaagcgguucgacaacccggugcugcccuucaacgacggggucuacuucgcgagcaccgagaaguccaacaucauccgcggcuggaucuucgggacgacccucgacagcaagacccagucccugcugaucgugaacaacgccaccaacguggucaucaaggugugcgaguuccaguucugcaacgaccccuuccucggcguguacuaccacaagaacaacaagagcuggauggaguccgaguuccgggucuacagcuccgccaacaacugcacguucgaguacgugagccagcccuuccugauggaccuggagggcaagcaggggaacuucaagaaccuccgcgaguucguguucaagaacaucgacggcuacuucaagaucuacuccaagcacaccccgaucaaccugguccgggaccugccccagggguucagcgcccucgagccccugguggaccugcccaucggcaucaacaucacccgcuuccagacccuccuggcccugcaccgguccuaccucacgccgggggacagcagcuccggcuggaccgcgggcgccgccgccuacuacgugggguaccugcagccccgcaccuuccugcucaaguacaacgagaacggcaccaucacggacgcggucgacugcgcccuggacccccugagcgagaccaagugcacccucaaguccuucaccguggagaaggggaucuaccagacgagcaacuuccgggugcagcccaccgaguccaucguccgcuucccgaacaucaccaaccugugccccuucggcgagguguucaacgccacccgguucgccagcgucuacgccuggaaccgcaagcggaucuccaacugcguggcggacuacagcgugcuguacaacuccgccagcuucuccacguucaagugcuacggcgucagccccaccaagcucaacgaccugugcuucaccaacguguacgccgacuccuucgugauccgcggggacgagguccggcagaucgcccccggccagaccgggaagaucgccgacuacaacuacaagcugccggacgacuucacgggcugcgugaucgcguggaacagcaacaaccucgacuccaaggucgggggcaacuacaacuaccuguaccgccuguuccgcaagagcaaccucaagcccuucgagcgggacaucuccaccgagaucuaccaggccggcagcacccccugcaacgggguggagggcuucaacugcuacuucccccugcaguccuacggguuccagccgaccaacggcgugggguaccagcccuaccggguggucgugcugagcuucgagcuccugcacgcccccgccacggugugcggccccaagaaguccaccaaccuggucaagaacaagugcgugaacuucaacuucaacggccucaccgggaccggcgugcugaccgagagcaacaagaaguuccugccguuccagcaguucgggcgcgacaucgccgacacgaccgacgcgguccgcgacccccagacccuggagauccucgacaucacccccugcagcuucggcgggguguccgugaucacgccgggcaccaacaccagcaaccaggucgccgugcuguaccagggcgugaacugcaccgagguccccguggccauccacgccgaccagcugacgcccaccuggcggguguacuccaccggcagcaacgucuuccagacccgcgccgggugccucaucggcgcggagcacgugaacaacuccuacgagugcgacauccccaucggggccggcaucugcgccagcuaccagacgcagaccaacuccccgcggcgcgcccggagcguggcgucccagagcaucaucgccuacaccaugucccugggcgccgagaacagcgucgccuacuccaacaacagcaucgccauccccaccaacuucacgaucuccgugaccaccgagauccugcccgugagcaugaccaagacgagcgucgacugcaccauguacaucugcggggacuccaccgagugcagcaaccuccugcugcaguacggcuccuucugcacccagcucaaccgcgcgcugacggggaucgccguggagcaggacaagaacacccaggagguguucgcccaggucaagcagaucuacaagacgcccccgaucaaggacuucggcggguucaacuucagccagauccugcccgaccccuccaagcccagcaagcgguccuucaucgaggaccuccuguucaacaaggugacccuggccgacgccggcuucaucaagcaguacggcgacugccucggggacaucgcggcccgcgaccugaucugcgcccagaaguucaacggccugaccgugcucccgccccugcugaccgacgagaugaucgcccaguacaccagcgcccuccuggcggggaccaucacguccggcuggaccuucggggccggcgccgcccugcagauccccuucgcgaugcagauggccuaccgguucaacggcaucggggucacccagaacgugcucuacgagaaccagaagcugaucgccaaccaguucaacagcgccaucggcaagauccaggacucccugagcuccaccgccagcgcgcucgggaagcugcaggacguggucaaccagaacgcccaggcccugaacacgcucgugaagcagcuguccagcaacuucggcgccaucuccagcgugcugaacgacauccucucccgccuggacccgcccgaggccgaggugcagaucgaccggcugaucaccgggcgccuccagagccugcagaccuacgugacccagcagcugauccgggcggccgagauccgcgccagcgccaaccucgccgcgaccaagauguccgagugcguccugggccagagcaagcggguggacuucugcggcaagggguaccaccugauguccuucccccagagcgccccgcacggcguggucuuccuccacgugacguacguccccgcccaggagaagaacuucaccaccgcccccgcgaucugccacgacgggaaggcccacuucccccgcgagggcguguucguguccaacgggacccacugguucgucacgcagcggaacuucuacgagccgcagaucaucaccaccgacaacaccuucgugagcggcaacugcgacguggucaucggcaucgugaacaacacgguguacgacccccugcagcccgagcuggacuccuucaaggaggagcucgacaaguacuucaagaaccacaccagccccgacgucgaccugggggacaucuccggcaucaacgccagcguggugaacauccagaaggagaucgaccgccugaacgaggucgccaagaaccucaacgagucccugaucgaccugcaggagcucgggaaguacgagcaguacaucaaguggccgugguacaucuggcugggcuucaucgccggccugaucgcgaucgugaucgugaccaucaugcucugcugcaugaccagcugcugcuccugccugaaggggugcugcagcugcggcuccugcugcaaguucgacgaggacgacagcgagcccguccugaagggggugaagcuccacuacacguga

SEQ ID NO: 22782 - RNA, 3816 nt, Artificial Sequence
  SARS-CoV-2/Wuhan/WIV05/2019__EPI_ISL_402128 spike protein CDS gc (1-1273)(H69del_V70del_A222V_Y453F_S477N_D614G_I692V)
auguucguguuccugguccuccugccccuggugagcucccagugcgugaaccucaccacccgcacgcagcugccgcccgccuacaccaacagcuucacccggggcgucuacuaccccgacaagguguuccgcuccagcgugcugcacuccacccaggaccucuuccugcccuucuucagcaacgucacgugguuccacgccaucuccgggaccaacggcaccaagcgguucgacaacccggugcugcccuucaacgacggggucuacuucgcgagcaccgagaaguccaacaucauccgcggcuggaucuucgggacgacccucgacagcaagacccagucccugcugaucgugaacaacgccaccaacguggucaucaaggugugcgaguuccaguucugcaacgaccccuuccucggcguguacuaccacaagaacaacaagagcuggauggaguccgaguuccgggucuacagcuccgccaacaacugcacguucgaguacgugagccagcccuuccugauggaccuggagggcaagcaggggaacuucaagaaccuccgcgaguucguguucaagaacaucgacggcuacuucaagaucuacuccaagcacaccccgaucaaccugguccgggaccugccccagggguucagcguccucgagccccugguggaccugcccaucggcaucaacaucacccgcuuccagacccuccuggcccugcaccgguccuaccucacgccgggggacagcagcuccggcuggaccgcgggcgccgccgccuacuacgugggguaccugcagccccgcaccuuccugcucaaguacaacgagaacggcaccaucacggacgcggucgacugcgcccuggacccccugagcgagaccaagugcacccucaaguccuucaccguggagaaggggaucuaccagacgagcaacuuccgggugcagcccaccgaguccaucguccgcuucccgaacaucaccaaccugugccccuucggcgagguguucaacgccacccgguucgccagcgucuacgccuggaaccgcaagcggaucuccaacugcguggcggacuacagcgugcuguacaacuccgccagcuucuccacguucaagugcuacggcgucagccccaccaagcucaacgaccugugcuucaccaacguguacgccgacuccuucgugauccgcggggacgagguccggcagaucgcccccggccagaccgggaagaucgccgacuacaacuacaagcugccggacgacuucacgggcugcgugaucgcguggaacagcaacaaccucgacuccaaggucgggggcaacuacaacuaccuguuccgccuguuccgcaagagcaaccucaagcccuucgagcgggacaucuccaccgagaucuaccaggccggcaacacccccugcaacgggguggagggcuucaacugcuacuucccccugcaguccuacggguuccagccgaccaacggcgugggguaccagcccuaccggguggucgugcugagcuucgagcuccugcacgcccccgccacggugugcggccccaagaaguccaccaaccuggucaagaacaagugcgugaacuucaacuucaacggccucaccgggaccggcgugcugaccgagagcaacaagaaguuccugccguuccagcaguucgggcgcgacaucgccgacacgaccgacgcgguccgcgacccccagacccuggagauccucgacaucacccccugcagcuucggcgggguguccgugaucacgccgggcaccaacaccagcaaccaggucgccgugcuguaccagggcgugaacugcaccgagguccccguggccauccacgccgaccagcugacgcccaccuggcggguguacuccaccggcagcaacgucuuccagacccgcgccgggugccucaucggcgcggagcacgugaacaacuccuacgagugcgacauccccaucggggccggcaucugcgccagcuaccagacgcagaccaacuccccgcggcgcgcccggagcguggcgucccagagcgucaucgccuacaccaugucccugggcgccgagaacagcgucgccuacuccaacaacagcaucgccauccccaccaacuucacgaucuccgugaccaccgagauccugcccgugagcaugaccaagacgagcgucgacugcaccauguacaucugcggggacuccaccgagugcagcaaccuccugcugcaguacggcuccuucugcacccagcucaaccgcgcgcugacggggaucgccguggagcaggacaagaacacccaggagguguucgcccaggucaagcagaucuacaagacgcccccgaucaaggacuucggcggguucaacuucagccagauccugcccgaccccuccaagcccagcaagcgguccuucaucgaggaccuccuguucaacaaggugacccuggccgacgccggcuucaucaagcaguacggcgacugccucggggacaucgcggcccgcgaccugaucugcgcccagaaguucaacggccugaccgugcucccgccccugcugaccgacgagaugaucgcccaguacaccagcgcccuccuggcggggaccaucacguccggcuggaccuucggggccggcgccgcccugcagauccccuucgcgaugcagauggccuaccgguucaacggcaucggggucacccagaacgugcucuacgagaaccagaagcugaucgccaaccaguucaacagcgccaucggcaagauccaggacucccugagcuccaccgccagcgcgcucgggaagcugcaggacguggucaaccagaacgcccaggcccugaacacgcucgugaagcagcuguccagcaacuucggcgccaucuccagcgugcugaacgacauccucucccgccuggacaaggucgaggccgaggugcagaucgaccggcugaucaccgggcgccuccagagccugcagaccuacgugacccagcagcugauccgggcggccgagauccgcgccagcgccaaccucgccgcgaccaagauguccgagugcguccugggccagagcaagcggguggacuucugcggcaagggguaccaccugauguccuucccccagagcgccccgcacggcguggucuuccuccacgugacguacguccccgcccaggagaagaacuucaccaccgcccccgcgaucugccacgacgggaaggcccacuucccccgcgagggcguguucguguccaacgggacccacugguucgucacgcagcggaacuucuacgagccgcagaucaucaccaccgacaacaccuucgugagcggcaacugcgacguggucaucggcaucgugaacaacacgguguacgacccccugcagcccgagcuggacuccuucaaggaggagcucgacaaguacuucaagaaccacaccagccccgacgucgaccugggggacaucuccggcaucaacgccagcguggugaacauccagaaggagaucgaccgccugaacgaggucgccaagaaccucaacgagucccugaucgaccugcaggagcucgggaaguacgagcaguacaucaaguggccgugguacaucuggcugggcuucaucgccggccugaucgcgaucgugauggugaccaucaugcucugcugcaugaccagcugcugcuccugccugaaggggugcugcagcugcggcuccugcugcaaguucgacgaggacgacagcgagcccguccugaagggggugaagcuccacuacacguga

SEQ ID NO: 22783 - RNA, 3816 nt, Artificial Sequence
  SARS-CoV-2/Wuhan/WIV05/2019__EPI_ISL_402128 spike protein CDS gc (1-1273)(K986P_V987P_H69del_V70del_A222V_Y453F_S477N_D614G_I692V)
auguucguguuccugguccuccugccccuggugagcucccagugcgugaaccucaccacccgcacgcagcugccgcccgccuacaccaacagcuucacccggggcgucuacuaccccgacaagguguuccgcuccagcgugcugcacuccacccaggaccucuuccugcccuucuucagcaacgucacgugguuccacgccaucuccgggaccaacggcaccaagcgguucgacaacccggugcugcccuucaacgacggggucuacuucgcgagcaccgagaaguccaacaucauccgcggcuggaucuucgggacgacccucgacagcaagacccagucccugcugaucgugaacaacgccaccaacguggucaucaaggugugcgaguuccaguucugcaacgaccccuuccucggcguguacuaccacaagaacaacaagagcuggauggaguccgaguuccgggucuacagcuccgccaacaacugcacguucgaguacgugagccagcccuuccugauggaccuggagggcaagcaggggaacuucaagaaccuccgcgaguucguguucaagaacaucgacggcuacuucaagaucuacuccaagcacaccccgaucaaccugguccgggaccugccccagggguucagcguccucgagccccugguggaccugcccaucggcaucaacaucacccgcuuccagacccuccuggcccugcaccgguccuaccucacgccgggggacagcagcuccggcuggaccgcgggcgccgccgccuacuacgugggguaccugcagccccgcaccuuccugcucaaguacaacgagaacggcaccaucacggacgcggucgacugcgcccuggacccccugagcgagaccaagugcacccucaaguccuucaccguggagaaggggaucuaccagacgagcaacuuccgggugcagcccaccgaguccaucguccgcuucccgaacaucaccaaccugugccccuucggcgagguguucaacgccacccgguucgccagcgucuacgccuggaaccgcaagcggaucuccaacugcguggcggacuacagcgugcuguacaacuccgccagcuucuccacguucaagugcuacggcgucagccccaccaagcucaacgaccugugcuucaccaacguguacgccgacuccuucgugauccgcggggacgagguccggcagaucgcccccggccagaccgggaagaucgccgacuacaacuacaagcugccggacgacuucacgggcugcgugaucgcguggaacagcaacaaccucgacuccaaggucgggggcaacuacaacuaccuguuccgccuguuccgcaagagcaaccucaagcccuucgagcgggacaucuccaccgagaucuaccaggccggcaacacccccugcaacgggguggagggcuucaacugcuacuucccccugcaguccuacggguuccagccgaccaacggcgugggguaccagcccuaccggguggucgugcugagcuucgagcuccugcacgcccccgccacggugugcggccccaagaaguccaccaaccuggucaagaacaagugcgugaacuucaacuucaacggccucaccgggaccggcgugcugaccgagagcaacaagaaguuccugccguuccagcaguucgggcgcgacaucgccgacacgaccgacgcgguccgcgacccccagacccuggagauccucgacaucacccccugcagcuucggcgggguguccgugaucacgccgggcaccaacaccagcaaccaggucgccgugcuguaccagggcgugaacugcaccgagguccccguggccauccacgccgaccagcugacgcccaccuggcggguguacuccaccggcagcaacgucuuccagacccgcgccgggugccucaucggcgcggagcacgugaacaacuccuacgagugcgacauccccaucggggccggcaucugcgccagcuaccagacgcagaccaacuccccgcggcgcgcccggagcguggcgucccagagcgucaucgccuacaccaugucccugggcgccgagaacagcgucgccuacuccaacaacagcaucgccauccccaccaacuucacgaucuccgugaccaccgagauccugcccgugagcaugaccaagacgagcgucgacugcaccauguacaucugcggggacuccaccgagugcagcaaccuccugcugcaguacggcuccuucugcacccagcucaaccgcgcgcugacggggaucgccguggagcaggacaagaacacccaggagguguucgcccaggucaagcagaucuacaagacgcccccgaucaaggacuucggcggguucaacuucagccagauccugcccgaccccuccaagcccagcaagcgguccuucaucgaggaccuccuguucaacaaggugacccuggccgacgccggcuucaucaagcaguacggcgacugccucggggacaucgcggcccgcgaccugaucugcgcccagaaguucaacggccugaccgugcucccgccccugcugaccgacgagaugaucgcccaguacaccagcgcccuccuggcggggaccaucacguccggcuggaccuucggggccggcgccgcccugcagauccccuucgcgaugcagauggccuaccgguucaacggcaucggggucacccagaacgugcucuacgagaaccagaagcugaucgccaaccaguucaacagcgccaucggcaagauccaggacucccugagcuccaccgccagcgcgcucgggaagcugcaggacguggucaaccagaacgcccaggcccugaacacgcucgugaagcagcuguccagcaacuucggcgccaucuccagcgugcugaacgacauccucucccgccuggacccgcccgaggccgaggugcagaucgaccggcugaucaccgggcgccuccagagccugcagaccuacgugacccagcagcugauccgggcggccgagauccgcgccagcgccaaccucgccgcgaccaagauguccgagugcguccugggccagagcaagcggguggacuucugcggcaagggguaccaccugauguccuucccccagagcgccccgcacggcguggucuuccuccacgugacguacguccccgcccaggagaagaacuucaccaccgcccccgcgaucugccacgacgggaaggcccacuucccccgcgagggcguguucguguccaacgggacccacugguucgucacgcagcggaacuucuacgagccgcagaucaucaccaccgacaacaccuucgugagcggcaacugcgacguggucaucggcaucgugaacaacacgguguacgacccccugcagcccgagcuggacuccuucaaggaggagcucgacaaguacuucaagaaccacaccagccccgacgucgaccugggggacaucuccggcaucaacgccagcguggugaacauccagaaggagaucgaccgccugaacgaggucgccaagaaccucaacgagucccugaucgaccugcaggagcucgggaaguacgagcaguacaucaaguggccgugguacaucuggcugggcuucaucgccggccugaucgcgaucgugauggugaccaucaugcucugcugcaugaccagcugcugcuccugccugaaggggugcugcagcugcggcuccugcugcaaguucgacgaggacgacagcgagcccguccugaagggggugaagcuccacuacacguga

SEQ ID NO: 22784 - RNA, 3816 nt, Artificial Sequence
  SARS-CoV-2/Wuhan/WIV05/2019__EPI_ISL_402128 spike protein CDS gc (1-1273)(H69del_V70del_Y453F_D614G_I692V_M1229I)
auguucguguuccugguccuccugccccuggugagcucccagugcgugaaccucaccacccgcacgcagcugccgcccgccuacaccaacagcuucacccggggcgucuacuaccccgacaagguguuccgcuccagcgugcugcacuccacccaggaccucuuccugcccuucuucagcaacgucacgugguuccacgccaucuccgggaccaacggcaccaagcgguucgacaacccggugcugcccuucaacgacggggucuacuucgcgagcaccgagaaguccaacaucauccgcggcuggaucuucgggacgacccucgacagcaagacccagucccugcugaucgugaacaacgccaccaacguggucaucaaggugugcgaguuccaguucugcaacgaccccuuccucggcguguacuaccacaagaacaacaagagcuggauggaguccgaguuccgggucuacagcuccgccaacaacugcacguucgaguacgugagccagcccuuccugauggaccuggagggcaagcaggggaacuucaagaaccuccgcgaguucguguucaagaacaucgacggcuacuucaagaucuacuccaagcacaccccgaucaaccugguccgggaccugccccagggguucagcgcccucgagccccugguggaccugcccaucggcaucaacaucacccgcuuccagacccuccuggcccugcaccgguccuaccucacgccgggggacagcagcuccggcuggaccgcgggcgccgccgccuacuacgugggguaccugcagccccgcaccuuccugcucaaguacaacgagaacggcaccaucacggacgcggucgacugcgcccuggacccccugagcgagaccaagugcacccucaaguccuucaccguggagaaggggaucuaccagacgagcaacuuccgggugcagcccaccgaguccaucguccgcuucccgaacaucaccaaccugugccccuucggcgagguguucaacgccacccgguucgccagcgucuacgccuggaaccgcaagcggaucuccaacugcguggcggacuacagcgugcuguacaacuccgccagcuucuccacguucaagugcuacggcgucagccccaccaagcucaacgaccugugcuucaccaacguguacgccgacuccuucgugauccgcggggacgagguccggcagaucgcccccggccagaccgggaagaucgccgacuacaacuacaagcugccggacgacuucacgggcugcgugaucgcguggaacagcaacaaccucgacuccaaggucgggggcaacuacaacuaccuguuccgccuguuccgcaagagcaaccucaagcccuucgagcgggacaucuccaccgagaucuaccaggccggcagcacccccugcaacgggguggagggcuucaacugcuacuucccccugcaguccuacggguuccagccgaccaacggcgugggguaccagcccuaccggguggucgugcugagcuucgagcuccugcacgcccccgccacggugugcggccccaagaaguccaccaaccuggucaagaacaagugcgugaacuucaacuucaacggccucaccgggaccggcgugcugaccgagagcaacaagaaguuccugccguuccagcaguucgggcgcgacaucgccgacacgaccgacgcgguccgcgacccccagacccuggagauccucgacaucacccccugcagcuucggcgggguguccgugaucacgccgggcaccaacaccagcaaccaggucgccgugcuguaccagggcgugaacugcaccgagguccccguggccauccacgccgaccagcugacgcccaccuggcggguguacuccaccggcagcaacgucuuccagacccgcgccgggugccucaucggcgcggagcacgugaacaacuccuacgagugcgacauccccaucggggccggcaucugcgccagcuaccagacgcagaccaacuccccgcggcgcgcccggagcguggcgucccagagcgugaucgccuacaccaugucccugggcgccgagaacagcgucgccuacuccaacaacagcaucgccauccccaccaacuucacgaucuccgugaccaccgagauccugcccgugagcaugaccaagacgagcgucgacugcaccauguacaucugcggggacuccaccgagugcagcaaccuccugcugcaguacggcuccuucugcacccagcucaaccgcgcgcugacggggaucgccguggagcaggacaagaacacccaggagguguucgcccaggucaagcagaucuacaagacgcccccgaucaaggacuucggcggguucaacuucagccagauccugcccgaccccuccaagcccagcaagcgguccuucaucgaggaccuccuguucaacaaggugacccuggccgacgccggcuucaucaagcaguacggcgacugccucggggacaucgcggcccgcgaccugaucugcgcccagaaguucaacggccugaccgugcucccgccccugcugaccgacgagaugaucgcccaguacaccagcgcccuccuggcggggaccaucacguccggcuggaccuucggggccggcgccgcccugcagauccccuucgcgaugcagauggccuaccgguucaacggcaucggggucacccagaacgugcucuacgagaaccagaagcugaucgccaaccaguucaacagcgccaucggcaagauccaggacucccugagcuccaccgccagcgcgcucgggaagcugcaggacguggucaaccagaacgcccaggcccugaacacgcucgugaagcagcuguccagcaacuucggcgccaucuccagcgugcugaacgacauccucucccgccuggacaaggucgaggccgaggugcagaucgaccggcugaucaccgggcgccuccagagccugcagaccuacgugacccagcagcugauccgggcggccgagauccgcgccagcgccaaccucgccgcgaccaagauguccgagugcguccugggccagagcaagcggguggacuucugcggcaagggguaccaccugauguccuucccccagagcgccccgcacggcguggucuuccuccacgugacguacguccccgcccaggagaagaacuucaccaccgcccccgcgaucugccacgacgggaaggcccacuucccccgcgagggcguguucguguccaacgggacccacugguucgucacgcagcggaacuucuacgagccgcagaucaucaccaccgacaacaccuucgugagcggcaacugcgacguggucaucggcaucgugaacaacacgguguacgacccccugcagcccgagcuggacuccuucaaggaggagcucgacaaguacuucaagaaccacaccagccccgacgucgaccugggggacaucuccggcaucaacgccagcguggugaacauccagaaggagaucgaccgccugaacgaggucgccaagaaccucaacgagucccugaucgaccugcaggagcucgggaaguacgagcaguacaucaaguggccgugguacaucuggcugggcuucaucgccggccugaucgcgaucgugaucgugaccaucaugcucugcugcaugaccagcugcugcuccugccugaaggggugcugcagcugcggcuccugcugcaaguucgacgaggacgacagcgagcccguccugaagggggugaagcuccacuacacguga

SEQ ID NO: 22785 - RNA, 3816 nt, Artificial Sequence
  SARS-CoV-2/Wuhan/WIV05/2019__EPI_ISL_402128 spike protein CDS gc (1-1273)(K986P_V987P_H69del_V70del_Y453F_D614G_I692V_M1229I)
auguucguguuccugguccuccugccccuggugagcucccagugcgugaaccucaccacccgcacgcagcugccgcccgccuacaccaacagcuucacccggggcgucuacuaccccgacaagguguuccgcuccagcgugcugcacuccacccaggaccucuuccugcccuucuucagcaacgucacgugguuccacgccaucuccgggaccaacggcaccaagcgguucgacaacccggugcugcccuucaacgacggggucuacuucgcgagcaccgagaaguccaacaucauccgcggcuggaucuucgggacgacccucgacagcaagacccagucccugcugaucgugaacaacgccaccaacguggucaucaaggugugcgaguuccaguucugcaacgaccccuuccucggcguguacuaccacaagaacaacaagagcuggauggaguccgaguuccgggucuacagcuccgccaacaacugcacguucgaguacgugagccagcccuuccugauggaccuggagggcaagcaggggaacuucaagaaccuccgcgaguucguguucaagaacaucgacggcuacuucaagaucuacuccaagcacaccccgaucaaccugguccgggaccugccccagggguucagcgcccucgagccccugguggaccugcccaucggcaucaacaucacccgcuuccagacccuccuggcccugcaccgguccuaccucacgccgggggacagcagcuccggcuggaccgcgggcgccgccgccuacuacgugggguaccugcagccccgcaccuuccugcucaaguacaacgagaacggcaccaucacggacgcggucgacugcgcccuggacccccugagcgagaccaagugcacccucaaguccuucaccguggagaaggggaucuaccagacgagcaacuuccgggugcagcccaccgaguccaucguccgcuucccgaacaucaccaaccugugccccuucggcgagguguucaacgccacccgguucgccagcgucuacgccuggaaccgcaagcggaucuccaacugcguggcggacuacagcgugcuguacaacuccgccagcuucuccacguucaagugcuacggcgucagccccaccaagcucaacgaccugugcuucaccaacguguacgccgacuccuucgugauccgcggggacgagguccggcagaucgcccccggccagaccgggaagaucgccgacuacaacuacaagcugccggacgacuucacgggcugcgugaucgcguggaacagcaacaaccucgacuccaaggucgggggcaacuacaacuaccuguuccgccuguuccgcaagagcaaccucaagcccuucgagcgggacaucuccaccgagaucuaccaggccggcagcacccccugcaacgggguggagggcuucaacugcuacuucccccugcaguccuacggguuccagccgaccaacggcgugggguaccagcccuaccggguggucgugcugagcuucgagcuccugcacgcccccgccacggugugcggccccaagaaguccaccaaccuggucaagaacaagugcgugaacuucaacuucaacggccucaccgggaccggcgugcugaccgagagcaacaagaaguuccugccguuccagcaguucgggcgcgacaucgccgacacgaccgacgcgguccgcgacccccagacccuggagauccucgacaucacccccugcagcuucggcgggguguccgugaucacgccgggcaccaacaccagcaaccaggucgccgugcuguaccagggcgugaacugcaccgagguccccguggccauccacgccgaccagcugacgcccaccuggcggguguacuccaccggcagcaacgucuuccagacccgcgccgggugccucaucggcgcggagcacgugaacaacuccuacgagugcgacauccccaucggggccggcaucugcgccagcuaccagacgcagaccaacuccccgcggcgcgcccggagcguggcgucccagagcgugaucgccuacaccaugucccugggcgccgagaacagcgucgccuacuccaacaacagcaucgccauccccaccaacuucacgaucuccgugaccaccgagauccugcccgugagcaugaccaagacgagcgucgacugcaccauguacaucugcggggacuccaccgagugcagcaaccuccugcugcaguacggcuccuucugcacccagcucaaccgcgcgcugacggggaucgccguggagcaggacaagaacacccaggagguguucgcccaggucaagcagaucuacaagacgcccccgaucaaggacuucggcggguucaacuucagccagauccugcccgaccccuccaagcccagcaagcgguccuucaucgaggaccuccuguucaacaaggugacccuggccgacgccggcuucaucaagcaguacggcgacugccucggggacaucgcggcccgcgaccugaucugcgcccagaaguucaacggccugaccgugcucccgccccugcugaccgacgagaugaucgcccaguacaccagcgcccuccuggcggggaccaucacguccggcuggaccuucggggccggcgccgcccugcagauccccuucgcgaugcagauggccuaccgguucaacggcaucggggucacccagaacgugcucuacgagaaccagaagcugaucgccaaccaguucaacagcgccaucggcaagauccaggacucccugagcuccaccgccagcgcgcucgggaagcugcaggacguggucaaccagaacgcccaggcccugaacacgcucgugaagcagcuguccagcaacuucggcgccaucuccagcgugcugaacgacauccucucccgccuggacccgcccgaggccgaggugcagaucgaccggcugaucaccgggcgccuccagagccugcagaccuacgugacccagcagcugauccgggcggccgagauccgcgccagcgccaaccucgccgcgaccaagauguccgagugcguccugggccagagcaagcggguggacuucugcggcaagggguaccaccugauguccuucccccagagcgccccgcacggcguggucuuccuccacgugacguacguccccgcccaggagaagaacuucaccaccgcccccgcgaucugccacgacgggaaggcccacuucccccgcgagggcguguucguguccaacgggacccacugguucgucacgcagcggaacuucuacgagccgcagaucaucaccaccgacaacaccuucgugagcggcaacugcgacguggucaucggcaucgugaacaacacgguguacgacccccugcagcccgagcuggacuccuucaaggaggagcucgacaaguacuucaagaaccacaccagccccgacgucgaccugggggacaucuccggcaucaacgccagcguggugaacauccagaaggagaucgaccgccugaacgaggucgccaagaaccucaacgagucccugaucgaccugcaggagcucgggaaguacgagcaguacaucaaguggccgugguacaucuggcugggcuucaucgccggccugaucgcgaucgugaucgugaccaucaugcucugcugcaugaccagcugcugcuccugccugaaggggugcugcagcugcggcuccugcugcaaguucgacgaggacgacagcgagcccguccugaagggggugaagcuccacuacacguga

SEQ ID NO: 22786 - RNA, 4094 nt, Artificial Sequence
  SARS-CoV-2/Wuhan/WIV05/2019__EPI_ISL_402128 spike protein mRNA gc (1-1273)(K986P_V987P_F817P_A892P_A899P_A942P)
aggagagucccgcagucggcguccagcggcucugcuuguucgugugugugucguugcaggccuuauucaagcuuaccauguucguguuccugguccuccugccccuggugagcucccagugcgugaaccucaccacccgcacgcagcugccgcccgccuacaccaacagcuucacccggggcgucuacuaccccgacaagguguuccgcuccagcgugcugcacuccacccaggaccucuuccugcccuucuucagcaacgucacgugguuccacgccauccacguguccgggaccaacggcaccaagcgguucgacaacccggugcugcccuucaacgacggggucuacuucgcgagcaccgagaaguccaacaucauccgcggcuggaucuucgggacgacccucgacagcaagacccagucccugcugaucgugaacaacgccaccaacguggucaucaaggugugcgaguuccaguucugcaacgaccccuuccucggcguguacuaccacaagaacaacaagagcuggauggaguccgaguuccgggucuacagcuccgccaacaacugcacguucgaguacgugagccagcccuuccugauggaccuggagggcaagcaggggaacuucaagaaccuccgcgaguucguguucaagaacaucgacggcuacuucaagaucuacuccaagcacaccccgaucaaccugguccgggaccugccccagggguucagcgcccucgagccccugguggaccugcccaucggcaucaacaucacccgcuuccagacccuccuggcccugcaccgguccuaccucacgccgggggacagcagcuccggcuggaccgcgggcgccgccgccuacuacgugggguaccugcagccccgcaccuuccugcucaaguacaacgagaacggcaccaucacggacgcggucgacugcgcccuggacccccugagcgagaccaagugcacccucaaguccuucaccguggagaaggggaucuaccagacgagcaacuuccgggugcagcccaccgaguccaucguccgcuucccgaacaucaccaaccugugccccuucggcgagguguucaacgccacccgguucgccagcgucuacgccuggaaccgcaagcggaucuccaacugcguggcggacuacagcgugcuguacaacuccgccagcuucuccacguucaagugcuacggcgucagccccaccaagcucaacgaccugugcuucaccaacguguacgccgacuccuucgugauccgcggggacgagguccggcagaucgcccccggccagaccgggaagaucgccgacuacaacuacaagcugccggacgacuucacgggcugcgugaucgcguggaacagcaacaaccucgacuccaaggucgggggcaacuacaacuaccuguaccgccuguuccgcaagagcaaccucaagcccuucgagcgggacaucuccaccgagaucuaccaggccggcagcacccccugcaacgggguggagggcuucaacugcuacuucccccugcaguccuacggguuccagccgaccaacggcgugggguaccagcccuaccggguggucgugcugagcuucgagcuccugcacgcccccgccacggugugcggccccaagaaguccaccaaccuggucaagaacaagugcgugaacuucaacuucaacggccucaccgggaccggcgugcugaccgagagcaacaagaaguuccugccguuccagcaguucgggcgcgacaucgccgacacgaccgacgcgguccgcgacccccagacccuggagauccucgacaucacccccugcagcuucggcgggguguccgugaucacgccgggcaccaacaccagcaaccaggucgccgugcuguaccaggacgugaacugcaccgagguccccguggccauccacgccgaccagcugacgcccaccuggcggguguacuccaccggcagcaacgucuuccagacccgcgccgggugccucaucggcgcggagcacgugaacaacuccuacgagugcgacauccccaucggggccggcaucugcgccagcuaccagacgcagaccaacuccccgcggcgcgcccggagcguggcgucccagagcaucaucgccuacaccaugucccugggcgccgagaacagcgucgccuacuccaacaacagcaucgccauccccaccaacuucacgaucuccgugaccaccgagauccugcccgugagcaugaccaagacgagcgucgacugcaccauguacaucugcggggacuccaccgagugcagcaaccuccugcugcaguacggcuccuucugcacccagcucaaccgcgcgcugacggggaucgccguggagcaggacaagaacacccaggagguguucgcccaggucaagcagaucuacaagacgcccccgaucaaggacuucggcggguucaacuucagccagauccugcccgaccccuccaagcccagcaagcggucccccaucgaggaccuccuguucaacaaggugacccuggccgacgccggcuucaucaagcaguacggcgacugccucggggacaucgcggcccgcgaccugaucugcgcccagaaguucaacggccugaccgugcucccgccccugcugaccgacgagaugaucgcccaguacaccagcgcccuccuggcggggaccaucacguccggcuggaccuucggggccggccccgcccugcagauccccuucccgaugcagauggccuaccgguucaacggcaucggggucacccagaacgugcucuacgagaaccagaagcugaucgccaaccaguucaacagcgccaucggcaagauccaggacucccugagcuccacccccagcgcgcucgggaagcugcaggacguggucaaccagaacgcccaggcccugaacacgcucgugaagcagcuguccagcaacuucggcgccaucuccagcgugcugaacgacauccucucccgccuggacccgcccgaggccgaggugcagaucgaccggcugaucaccgggcgccuccagagccugcagaccuacgugacccagcagcugauccgggcggccgagauccgcgccagcgccaaccucgccgcgaccaagauguccgagugcguccugggccagagcaagcggguggacuucugcggcaagggguaccaccugauguccuucccccagagcgccccgcacggcguggucuuccuccacgugacguacguccccgcccaggagaagaacuucaccaccgcccccgcgaucugccacgacgggaaggcccacuucccccgcgagggcguguucguguccaacgggacccacugguucgucacgcagcggaacuucuacgagccgcagaucaucaccaccgacaacaccuucgugagcggcaacugcgacguggucaucggcaucgugaacaacacgguguacgacccccugcagcccgagcuggacuccuucaaggaggagcucgacaaguacuucaagaaccacaccagccccgacgucgaccugggggacaucuccggcaucaacgccagcguggugaacauccagaaggagaucgaccgccugaacgaggucgccaagaaccucaacgagucccugaucgaccugcaggagcucgggaaguacgagcaguacaucaaguggccgugguacaucuggcugggcuucaucgccggccugaucgcgaucgugauggugaccaucaugcucugcugcaugaccagcugcugcuccugccugaaggggugcugcagcugcggcuccugcugcaaguucgacgaggacgacagcgagcccguccugaagggggugaagcuccacuacacgugaggacuagucccuguucccagagcccacuuuuuuuucuuuuuuugaaauaaaauagccugucuuucagaucucaaaggcucuuuucagagccaccaaaaaaaaaaaaaaaaaaaaaaaaaaaaaaaaaaaaaaaaaaaaaaaaaaaaaaaaaaaaaaaaaaaaaaaaaaaaaaaaaaaaaaaaaaaaaaaaaaaaa

SEQ ID NO: 22787 - RNA, 1424 nt, Artificial Sequence
  SARS-CoV-2/Wuhan/WIV05/2019__EPI_ISL_402128 spike protein mRNA gc (1-15,334-528) Ferritin construct R10340
aggagagucccgcagucggcguccagcggcucugcuuguucgugugugugucguugcaggccuuauucaagcuuaccauguucguguuccugguccuccugccccuggugagcucccagugcaaccugugccccuucggcgagguguucaacgccacccgguucgccagcgucuacgccuggaaccgcaagcggaucuccaacugcguggcggacuacagcgugcuguacaacuccgccagcuucuccacguucaagugcuacggcgucagccccaccaagcucaacgaccugugcuucaccaacguguacgccgacuccuucgugauccgcggggacgagguccggcagaucgcccccggccagaccgggaagaucgccgacuacaacuacaagcugccggacgacuucacgggcugcgugaucgcguggaacagcaacaaccucgacuccaaggucgggggcaacuacaacuaccuguaccgccuguuccgcaagagcaaccucaagcccuucgagcgggacaucuccaccgagaucuaccaggccggcagcacccccugcaacgggguggagggcuucaacugcuacuucccccugcaguccuacggguuccagccgaccaacggcgugggguaccagcccuaccggguggucgugcugagcuucgagcuccugcacgcccccgccacggugugcggccccaagggcggggguggaagcggcggggguggaagugacaucaucaagcuccugaacgagcaggucaacaaggagaugcaguccagcaaccuguacauguccaugagcuccuggugcuacacccacagccucgacggcgccgggcuguuccuguucgaccacgccgcggaggaguacgagcacgccaagaagcucaucaucuuccugaacgagaacaacgugcccgugcagcugaccuccaucagcgccccggagcacaaguucgagggccucacgcagaucuuccagaaggccuacgagcacgagcagcacaucuccgagagcaucaacaacaucguggaccacgccaucaaguccaaggaccacgcgaccuucaacuuccugcagugguacgucgccgagcagcacgaggaggaggugcuguucaaggacauccucgacaagaucgagcugaucgggaacgagaaccacggccuguaccucgccgaccaguacgugaaggggaucgccaagagccgcaaguccugaggacuagucccuguucccagagcccacuuuuuuuucuuuuuuugaaauaaaauagccugucuuucagaucucaaaggcucuuuucagagccaccaaaaaaaaaaaaaaaaaaaaaaaaaaaaaaaaaaaaaaaaaaaaaaaaaaaaaaaaaaaaaaaaaaaaaaaaaaaaaaaaaaaaaaaaaaaaaaaaaaaaa

SEQ ID NO: 22788 - RNA, 1022 nt, Artificial Sequence
  SARS-CoV-2/Wuhan/WIV05/2019__EPI_ISL_402128 spike protein mRNA gc (334-528) Foldon construct R9927
aggagagucccgcagucggcguccagcggcucugcuuguucgugugugugucguugcaggccuuauucaagcuuaccaugcccaugggcagccugcagccgcucgccacccuguaccugcucgggaugcugguggccuccguccuggcgaaccugugccccuucggcgagguguucaacgccacccgguucgccagcgucuacgccuggaaccgcaagcggaucuccaacugcguggcggacuacagcgugcuguacaacuccgccagcuucuccacguucaagugcuacggcgucagccccaccaagcucaacgaccugugcuucaccaacguguacgccgacuccuucgugauccgcggggacgagguccggcagaucgcccccggccagaccgggaagaucgccgacuacaacuacaagcugccggacgacuucacgggcugcgugaucgcguggaacagcaacaaccucgacuccaaggucgggggcaacuacaacuaccuguaccgccuguuccgcaagagcaaccucaagcccuucgagcgggacaucuccaccgagaucuaccaggccggcagcacccccugcaacgggguggagggcuucaacugcuacuucccccugcaguccuacggguuccagccgaccaacggcgugggguaccagcccuaccggguggucgugcugagcuucgagcuccugcacgcccccgccacggugugcggccccaagggcagcggcggguacauccccgaggccccgcgcgacggccaggccuacgugcggaaggacggcgaguggguccugcugagcaccuuccucugaggacuagucccuguucccagagcccacuuuuuuuucuuuuuuugaaauaaaauagccugucuuucagaucucaaaggcucuuuucagagccaccaaaaaaaaaaaaaaaaaaaaaaaaaaaaaaaaaaaaaaaaaaaaaaaaaaaaaaaaaaaaaaaaaaaaaaaaaaaaaaaaaaaaaaaaaaaaaaaaaaaaa

SEQ ID NO: 22789 - RNA, 1400 nt, Artificial Sequence
  SARS-CoV-2/Wuhan/WIV05/2019__EPI_ISL_402128 spike protein mRNA gc (1-15,334-528) LumSynth construct R10338
aggagagucccgcagucggcguccagcggcucugcuuguucgugugugugucguugcaggccuuauucaagcuuaccauguucguguuccugguccuccugccccuggugagcucccagugcaaccugugccccuucggcgagguguucaacgccacccgguucgccagcgucuacgccuggaaccgcaagcggaucuccaacugcguggcggacuacagcgugcuguacaacuccgccagcuucuccacguucaagugcuacggcgucagccccaccaagcucaacgaccugugcuucaccaacguguacgccgacuccuucgugauccgcggggacgagguccggcagaucgcccccggccagaccgggaagaucgccgacuacaacuacaagcugccggacgacuucacgggcugcgugaucgcguggaacagcaacaaccucgacuccaaggucgggggcaacuacaacuaccuguaccgccuguuccgcaagagcaaccucaagcccuucgagcgggacaucuccaccgagaucuaccaggccggcagcacccccugcaacgggguggagggcuucaacugcuacuucccccugcaguccuacggguuccagccgaccaacggcgugggguaccagcccuaccggguggucgugcugagcuucgagcuccugcacgcccccgccacggugugcggccccaagggcggcggcggcuccggaggcggagguagcgggggacagaucuacgagggcaagcugaccgccgaggggcuccgcuucggcaucguggccagccgguucaaccacgcgcuggucgaccgccugguggagggggccaucgacgccaucgugcggcacggcgggcgcgaggaggacaucacccucguccgggugcccggcuccugggagaucccgguggccgccggcgagcuggcccgcaaggaggacaucgacgcggucaucgccaucggggugcugauccggggcgccacgccccacuucgacuacaucgccagcgagguguccaaggggcucgcggaccugagccuggagcuccgcaagcccaucaccuucggcgucaucaccgccgacacccuggagcaggccaucgagcgggccgggacgaagcacggcaacaagggcugggaggccgcgcuguccgccaucgagauggccaaccucuucaagagccugcgcugaggacuagucccuguucccagagcccacuuuuuuuucuuuuuuugaaauaaaauagccugucuuucagaucucaaaggcucuuuucagagccaccaaaaaaaaaaaaaaaaaaaaaaaaaaaaaaaaaaaaaaaaaaaaaaaaaaaaaaaaaaaaaaaaaaaaaaaaaaaaaaaaaaaaaaaaaaaaaaaaaaaaa

SEQ ID NO: 22790 - RNA, 1361 nt, Artificial Sequence
  SARS-CoV-2/Wuhan/WIV05/2019__EPI_ISL_402128 spike protein mRNA gc (334-528) LumSynth construct R10339
aggagagucccgcagucggcguccagcggcucugcuuguucgugugugugucguugcaggccuuauucaagcuuaccaugcagaucuacgagggcaagcugaccgccgaggggcuccgcuucggcaucguggccagccgguucaaccacgcgcuggucgaccgccugguggagggggccaucgacgccaucgugcggcacggcgggcgcgaggaggacaucacccucguccgggugcccggcuccugggagaucccgguggccgccggcgagcuggcccgcaaggaggacaucgacgcggucaucgccaucggggugcugauccggggcgccacgccccacuucgacuacaucgccagcgagguguccaaggggcucgcggaccugagccuggagcuccgcaagcccaucaccuucggcgucaucaccgccgacacccuggagcaggccaucgagcgggccgggacgaagcacggcaacaagggcugggaggccgcgcuguccgccaucgagauggccaaccucuucaagagccugcgcggcgggggcgggagcggcgggggcggcuccgggggcgggaaccugugccccuucggcgagguguucaacgccacccgguucgccagcgucuacgccuggaaccgcaagcggaucuccaacugcguggcggacuacagcgugcuguacaacuccgccagcuucuccacguucaagugcuacggcgucagccccaccaagcucaacgaccugugcuucaccaacguguacgccgacuccuucgugauccgcggggacgagguccggcagaucgcccccggccagaccgggaagaucgccgacuacaacuacaagcugccggacgacuucacgggcugcgugaucgcguggaacagcaacaaccucgacuccaaggucgggggcaacuacaacuaccuguaccgccuguuccgcaagagcaaccucaagcccuucgagcgggacaucuccaccgagaucuaccaggccggcagcacccccugcaacgggguggagggcuucaacugcuacuucccccugcaguccuacggguuccagccgaccaacggcgugggguaccagcccuaccggguggucgugcugagcuucgagcuccugcacgcccccgccacggugugcggccccaagugaggacuagucccuguucccagagcccacuuuuuuuucuuuuuuugaaauaaaauagccugucuuucagaucucaaaggcucuuuucagagccaccaaaaaaaaaaaaaaaaaaaaaaaaaaaaaaaaaaaaaaaaaaaaaaaaaaaaaaaaaaaaaaaaaaaaaaaaaaaaaaaaaaaaaaaaaaaaaaaaaaaaa

SEQ ID NO: 22791 - RNA, 4094 nt, Artificial Sequence
  SARS-CoV-2/Wuhan/WIV05/2019__EPI_ISL_402128 spike protein mRNA gc (1-1273)(D614G) R10182
aggagagucccgcagucggcguccagcggcucugcuuguucgugugugugucguugcaggccuuauucaagcuuaccauguucguguuccugguccuccugccccuggugagcucccagugcgugaaccucaccacccgcacgcagcugccgcccgccuacaccaacagcuucacccggggcgucuacuaccccgacaagguguuccgcuccagcgugcugcacuccacccaggaccucuuccugcccuucuucagcaacgucacgugguuccacgccauccacguguccgggaccaacggcaccaagcgguucgacaacccggugcugcccuucaacgacggggucuacuucgcgagcaccgagaaguccaacaucauccgcggcuggaucuucgggacgacccucgacagcaagacccagucccugcugaucgugaacaacgccaccaacguggucaucaaggugugcgaguuccaguucugcaacgaccccuuccucggcguguacuaccacaagaacaacaagagcuggauggaguccgaguuccgggucuacagcuccgccaacaacugcacguucgaguacgugagccagcccuuccugauggaccuggagggcaagcaggggaacuucaagaaccuccgcgaguucguguucaagaacaucgacggcuacuucaagaucuacuccaagcacaccccgaucaaccugguccgggaccugccccagggguucagcgcccucgagccccugguggaccugcccaucggcaucaacaucacccgcuuccagacccuccuggcccugcaccgguccuaccucacgccgggggacagcagcuccggcuggaccgcgggcgccgccgccuacuacgugggguaccugcagccccgcaccuuccugcucaaguacaacgagaacggcaccaucacggacgcggucgacugcgcccuggacccccugagcgagaccaagugcacccucaaguccuucaccguggagaaggggaucuaccagacgagcaacuuccgggugcagcccaccgaguccaucguccgcuucccgaacaucaccaaccugugccccuucggcgagguguucaacgccacccgguucgccagcgucuacgccuggaaccgcaagcggaucuccaacugcguggcggacuacagcgugcuguacaacuccgccagcuucuccacguucaagugcuacggcgucagccccaccaagcucaacgaccugugcuucaccaacguguacgccgacuccuucgugauccgcggggacgagguccggcagaucgcccccggccagaccgggaagaucgccgacuacaacuacaagcugccggacgacuucacgggcugcgugaucgcguggaacagcaacaaccucgacuccaaggucgggggcaacuacaacuaccuguaccgccuguuccgcaagagcaaccucaagcccuucgagcgggacaucuccaccgagaucuaccaggccggcagcacccccugcaacgggguggagggcuucaacugcuacuucccccugcaguccuacggguuccagccgaccaacggcgugggguaccagcccuaccggguggucgugcugagcuucgagcuccugcacgcccccgccacggugugcggccccaagaaguccaccaaccuggucaagaacaagugcgugaacuucaacuucaacggccucaccgggaccggcgugcugaccgagagcaacaagaaguuccugccguuccagcaguucgggcgcgacaucgccgacacgaccgacgcgguccgcgacccccagacccuggagauccucgacaucacccccugcagcuucggcgggguguccgugaucacgccgggcaccaacaccagcaaccaggucgccgugcuguaccagggcgugaacugcaccgagguccccguggccauccacgccgaccagcugacgcccaccuggcggguguacuccaccggcagcaacgucuuccagacccgcgccgggugccucaucggcgcggagcacgugaacaacuccuacgagugcgacauccccaucggggccggcaucugcgccagcuaccagacgcagaccaacuccccgcggcgcgcccggagcguggcgucccagagcaucaucgccuacaccaugucccugggcgccgagaacagcgucgccuacuccaacaacagcaucgccauccccaccaacuucacgaucuccgugaccaccgagauccugcccgugagcaugaccaagacgagcgucgacugcaccauguacaucugcggggacuccaccgagugcagcaaccuccugcugcaguacggcuccuucugcacccagcucaaccgcgcgcugacggggaucgccguggagcaggacaagaacacccaggagguguucgcccaggucaagcagaucuacaagacgcccccgaucaaggacuucggcggguucaacuucagccagauccugcccgaccccuccaagcccagcaagcgguccuucaucgaggaccuccuguucaacaaggugacccuggccgacgccggcuucaucaagcaguacggcgacugccucggggacaucgcggcccgcgaccugaucugcgcccagaaguucaacggccugaccgugcucccgccccugcugaccgacgagaugaucgcccaguacaccagcgcccuccuggcggggaccaucacguccggcuggaccuucggggccggcgccgcccugcagauccccuucgcgaugcagauggccuaccgguucaacggcaucggggucacccagaacgugcucuacgagaaccagaagcugaucgccaaccaguucaacagcgccaucggcaagauccaggacucccugagcuccaccgccagcgcgcucgggaagcugcaggacguggucaaccagaacgcccaggcccugaacacgcucgugaagcagcuguccagcaacuucggcgccaucuccagcgugcugaacgacauccucucccgccuggacaaggucgaggccgaggugcagaucgaccggcugaucaccgggcgccuccagagccugcagaccuacgugacccagcagcugauccgggcggccgagauccgcgccagcgccaaccucgccgcgaccaagauguccgagugcguccugggccagagcaagcggguggacuucugcggcaagggguaccaccugauguccuucccccagagcgccccgcacggcguggucuuccuccacgugacguacguccccgcccaggagaagaacuucaccaccgcccccgcgaucugccacgacgggaaggcccacuucccccgcgagggcguguucguguccaacgggacccacugguucgucacgcagcggaacuucuacgagccgcagaucaucaccaccgacaacaccuucgugagcggcaacugcgacguggucaucggcaucgugaacaacacgguguacgacccccugcagcccgagcuggacuccuucaaggaggagcucgacaaguacuucaagaaccacaccagccccgacgucgaccugggggacaucuccggcaucaacgccagcguggugaacauccagaaggagaucgaccgccugaacgaggucgccaagaaccucaacgagucccugaucgaccugcaggagcucgggaaguacgagcaguacaucaaguggccgugguacaucuggcugggcuucaucgccggccugaucgcgaucgugauggugaccaucaugcucugcugcaugaccagcugcugcuccugccugaaggggugcugcagcugcggcuccugcugcaaguucgacgaggacgacagcgagcccguccugaagggggugaagcuccacuacacgugaggacuagucccuguucccagagcccacuuuuuuuucuuuuuuugaaauaaaauagccugucuuucagaucucaaaggcucuuuucagagccaccaaaaaaaaaaaaaaaaaaaaaaaaaaaaaaaaaaaaaaaaaaaaaaaaaaaaaaaaaaaaaaaaaaaaaaaaaaaaaaaaaaaaaaaaaaaaaaaaaaaaa

SEQ ID NO: 22792 - RNA, 4094 nt, Artificial Sequence
  SARS-CoV-2/Wuhan/WIV05/2019__EPI_ISL_402128 spike protein mRNA gc (1-1273)(K986P_V987P_ D614G) R10166
aggagagucccgcagucggcguccagcggcucugcuuguucgugugugugucguugcaggccuuauucaagcuuaccauguucguguuccugguccuccugccccuggugagcucccagugcgugaaccucaccacccgcacgcagcugccgcccgccuacaccaacagcuucacccggggcgucuacuaccccgacaagguguuccgcuccagcgugcugcacuccacccaggaccucuuccugcccuucuucagcaacgucacgugguuccacgccauccacguguccgggaccaacggcaccaagcgguucgacaacccggugcugcccuucaacgacggggucuacuucgcgagcaccgagaaguccaacaucauccgcggcuggaucuucgggacgacccucgacagcaagacccagucccugcugaucgugaacaacgccaccaacguggucaucaaggugugcgaguuccaguucugcaacgaccccuuccucggcguguacuaccacaagaacaacaagagcuggauggaguccgaguuccgggucuacagcuccgccaacaacugcacguucgaguacgugagccagcccuuccugauggaccuggagggcaagcaggggaacuucaagaaccuccgcgaguucguguucaagaacaucgacggcuacuucaagaucuacuccaagcacaccccgaucaaccugguccgggaccugccccagggguucagcgcccucgagccccugguggaccugcccaucggcaucaacaucacccgcuuccagacccuccuggcccugcaccgguccuaccucacgccgggggacagcagcuccggcuggaccgcgggcgccgccgccuacuacgugggguaccugcagccccgcaccuuccugcucaaguacaacgagaacggcaccaucacggacgcggucgacugcgcccuggacccccugagcgagaccaagugcacccucaaguccuucaccguggagaaggggaucuaccagacgagcaacuuccgggugcagcccaccgaguccaucguccgcuucccgaacaucaccaaccugugccccuucggcgagguguucaacgccacccgguucgccagcgucuacgccuggaaccgcaagcggaucuccaacugcguggcggacuacagcgugcuguacaacuccgccagcuucuccacguucaagugcuacggcgucagccccaccaagcucaacgaccugugcuucaccaacguguacgccgacuccuucgugauccgcggggacgagguccggcagaucgcccccggccagaccgggaagaucgccgacuacaacuacaagcugccggacgacuucacgggcugcgugaucgcguggaacagcaacaaccucgacuccaaggucgggggcaacuacaacuaccuguaccgccuguuccgcaagagcaaccucaagcccuucgagcgggacaucuccaccgagaucuaccaggccggcagcacccccugcaacgggguggagggcuucaacugcuacuucccccugcaguccuacggguuccagccgaccaacggcgugggguaccagcccuaccggguggucgugcugagcuucgagcuccugcacgcccccgccacggugugcggccccaagaaguccaccaaccuggucaagaacaagugcgugaacuucaacuucaacggccucaccgggaccggcgugcugaccgagagcaacaagaaguuccugccguuccagcaguucgggcgcgacaucgccgacacgaccgacgcgguccgcgacccccagacccuggagauccucgacaucacccccugcagcuucggcgggguguccgugaucacgccgggcaccaacaccagcaaccaggucgccgugcuguaccagggcgugaacugcaccgagguccccguggccauccacgccgaccagcugacgcccaccuggcggguguacuccaccggcagcaacgucuuccagacccgcgccgggugccucaucggcgcggagcacgugaacaacuccuacgagugcgacauccccaucggggccggcaucugcgccagcuaccagacgcagaccaacuccccgcggcgcgcccggagcguggcgucccagagcaucaucgccuacaccaugucccugggcgccgagaacagcgucgccuacuccaacaacagcaucgccauccccaccaacuucacgaucuccgugaccaccgagauccugcccgugagcaugaccaagacgagcgucgacugcaccauguacaucugcggggacuccaccgagugcagcaaccuccugcugcaguacggcuccuucugcacccagcucaaccgcgcgcugacggggaucgccguggagcaggacaagaacacccaggagguguucgcccaggucaagcagaucuacaagacgcccccgaucaaggacuucggcggguucaacuucagccagauccugcccgaccccuccaagcccagcaagcgguccuucaucgaggaccuccuguucaacaaggugacccuggccgacgccggcuucaucaagcaguacggcgacugccucggggacaucgcggcccgcgaccugaucugcgcccagaaguucaacggccugaccgugcucccgccccugcugaccgacgagaugaucgcccaguacaccagcgcccuccuggcggggaccaucacguccggcuggaccuucggggccggcgccgcccugcagauccccuucgcgaugcagauggccuaccgguucaacggcaucggggucacccagaacgugcucuacgagaaccagaagcugaucgccaaccaguucaacagcgccaucggcaagauccaggacucccugagcuccaccgccagcgcgcucgggaagcugcaggacguggucaaccagaacgcccaggcccugaacacgcucgugaagcagcuguccagcaacuucggcgccaucuccagcgugcugaacgacauccucucccgccuggacccgcccgaggccgaggugcagaucgaccggcugaucaccgggcgccuccagagccugcagaccuacgugacccagcagcugauccgggcggccgagauccgcgccagcgccaaccucgccgcgaccaagauguccgagugcguccugggccagagcaagcggguggacuucugcggcaagggguaccaccugauguccuucccccagagcgccccgcacggcguggucuuccuccacgugacguacguccccgcccaggagaagaacuucaccaccgcccccgcgaucugccacgacgggaaggcccacuucccccgcgagggcguguucguguccaacgggacccacugguucgucacgcagcggaacuucuacgagccgcagaucaucaccaccgacaacaccuucgugagcggcaacugcgacguggucaucggcaucgugaacaacacgguguacgacccccugcagcccgagcuggacuccuucaaggaggagcucgacaaguacuucaagaaccacaccagccccgacgucgaccugggggacaucuccggcaucaacgccagcguggugaacauccagaaggagaucgaccgccugaacgaggucgccaagaaccucaacgagucccugaucgaccugcaggagcucgggaaguacgagcaguacaucaaguggccgugguacaucuggcugggcuucaucgccggccugaucgcgaucgugauggugaccaucaugcucugcugcaugaccagcugcugcuccugccugaaggggugcugcagcugcggcuccugcugcaaguucgacgaggacgacagcgagcccguccugaagggggugaagcuccacuacacgugaggacuagucccuguucccagagcccacuuuuuuuucuuuuuuugaaauaaaauagccugucuuucagaucucaaaggcucuuuucagagccaccaaaaaaaaaaaaaaaaaaaaaaaaaaaaaaaaaaaaaaaaaaaaaaaaaaaaaaaaaaaaaaaaaaaaaaaaaaaaaaaaaaaaaaaaaaaaaaaaaaaaa

SEQ ID NO: 22793 - RNA, 4094 nt, Artificial Sequence
  SARS-CoV-2/Wuhan/WIV05/2019__EPI_ISL_402128 spike protein mRNA gc (1-1273)(A222V_D614G) R10278
aggagagucccgcagucggcguccagcggcucugcuuguucgugugugugucguugcaggccuuauucaagcuuaccauguucguguuccugguccuccugccccuggugagcucccagugcgugaaccucaccacccgcacgcagcugccgcccgccuacaccaacagcuucacccggggcgucuacuaccccgacaagguguuccgcuccagcgugcugcacuccacccaggaccucuuccugcccuucuucagcaacgucacgugguuccacgccauccacguguccgggaccaacggcaccaagcgguucgacaacccggugcugcccuucaacgacggggucuacuucgcgagcaccgagaaguccaacaucauccgcggcuggaucuucgggacgacccucgacagcaagacccagucccugcugaucgugaacaacgccaccaacguggucaucaaggugugcgaguuccaguucugcaacgaccccuuccucggcguguacuaccacaagaacaacaagagcuggauggaguccgaguuccgggucuacagcuccgccaacaacugcacguucgaguacgugagccagcccuuccugauggaccuggagggcaagcaggggaacuucaagaaccuccgcgaguucguguucaagaacaucgacggcuacuucaagaucuacuccaagcacaccccgaucaaccugguccgggaccugccccagggguucagcguccucgagccccugguggaccugcccaucggcaucaacaucacccgcuuccagacccuccuggcccugcaccgguccuaccucacgccgggggacagcagcuccggcuggaccgcgggcgccgccgccuacuacgugggguaccugcagccccgcaccuuccugcucaaguacaacgagaacggcaccaucacggacgcggucgacugcgcccuggacccccugagcgagaccaagugcacccucaaguccuucaccguggagaaggggaucuaccagacgagcaacuuccgggugcagcccaccgaguccaucguccgcuucccgaacaucaccaaccugugccccuucggcgagguguucaacgccacccgguucgccagcgucuacgccuggaaccgcaagcggaucuccaacugcguggcggacuacagcgugcuguacaacuccgccagcuucuccacguucaagugcuacggcgucagccccaccaagcucaacgaccugugcuucaccaacguguacgccgacuccuucgugauccgcggggacgagguccggcagaucgcccccggccagaccgggaagaucgccgacuacaacuacaagcugccggacgacuucacgggcugcgugaucgcguggaacagcaacaaccucgacuccaaggucgggggcaacuacaacuaccuguaccgccuguuccgcaagagcaaccucaagcccuucgagcgggacaucuccaccgagaucuaccaggccggcagcacccccugcaacgggguggagggcuucaacugcuacuucccccugcaguccuacggguuccagccgaccaacggcgugggguaccagcccuaccggguggucgugcugagcuucgagcuccugcacgcccccgccacggugugcggccccaagaaguccaccaaccuggucaagaacaagugcgugaacuucaacuucaacggccucaccgggaccggcgugcugaccgagagcaacaagaaguuccugccguuccagcaguucgggcgcgacaucgccgacacgaccgacgcgguccgcgacccccagacccuggagauccucgacaucacccccugcagcuucggcgggguguccgugaucacgccgggcaccaacaccagcaaccaggucgccgugcuguaccagggcgugaacugcaccgagguccccguggccauccacgccgaccagcugacgcccaccuggcggguguacuccaccggcagcaacgucuuccagacccgcgccgggugccucaucggcgcggagcacgugaacaacuccuacgagugcgacauccccaucggggccggcaucugcgccagcuaccagacgcagaccaacuccccgcggcgcgcccggagcguggcgucccagagcaucaucgccuacaccaugucccugggcgccgagaacagcgucgccuacuccaacaacagcaucgccauccccaccaacuucacgaucuccgugaccaccgagauccugcccgugagcaugaccaagacgagcgucgacugcaccauguacaucugcggggacuccaccgagugcagcaaccuccugcugcaguacggcuccuucugcacccagcucaaccgcgcgcugacggggaucgccguggagcaggacaagaacacccaggagguguucgcccaggucaagcagaucuacaagacgcccccgaucaaggacuucggcggguucaacuucagccagauccugcccgaccccuccaagcccagcaagcgguccuucaucgaggaccuccuguucaacaaggugacccuggccgacgccggcuucaucaagcaguacggcgacugccucggggacaucgcggcccgcgaccugaucugcgcccagaaguucaacggccugaccgugcucccgccccugcugaccgacgagaugaucgcccaguacaccagcgcccuccuggcggggaccaucacguccggcuggaccuucggggccggcgccgcccugcagauccccuucgcgaugcagauggccuaccgguucaacggcaucggggucacccagaacgugcucuacgagaaccagaagcugaucgccaaccaguucaacagcgccaucggcaagauccaggacucccugagcuccaccgccagcgcgcucgggaagcugcaggacguggucaaccagaacgcccaggcccugaacacgcucgugaagcagcuguccagcaacuucggcgccaucuccagcgugcugaacgacauccucucccgccuggacaaggucgaggccgaggugcagaucgaccggcugaucaccgggcgccuccagagccugcagaccuacgugacccagcagcugauccgggcggccgagauccgcgccagcgccaaccucgccgcgaccaagauguccgagugcguccugggccagagcaagcggguggacuucugcggcaagggguaccaccugauguccuucccccagagcgccccgcacggcguggucuuccuccacgugacguacguccccgcccaggagaagaacuucaccaccgcccccgcgaucugccacgacgggaaggcccacuucccccgcgagggcguguucguguccaacgggacccacugguucgucacgcagcggaacuucuacgagccgcagaucaucaccaccgacaacaccuucgugagcggcaacugcgacguggucaucggcaucgugaacaacacgguguacgacccccugcagcccgagcuggacuccuucaaggaggagcucgacaaguacuucaagaaccacaccagccccgacgucgaccugggggacaucuccggcaucaacgccagcguggugaacauccagaaggagaucgaccgccugaacgaggucgccaagaaccucaacgagucccugaucgaccugcaggagcucgggaaguacgagcaguacaucaaguggccgugguacaucuggcugggcuucaucgccggccugaucgcgaucgugauggugaccaucaugcucugcugcaugaccagcugcugcuccugccugaaggggugcugcagcugcggcuccugcugcaaguucgacgaggacgacagcgagcccguccugaagggggugaagcuccacuacacgugaggacuagucccuguucccagagcccacuuuuuuuucuuuuuuugaaauaaaauagccugucuuucagaucucaaaggcucuuuucagagccaccaaaaaaaaaaaaaaaaaaaaaaaaaaaaaaaaaaaaaaaaaaaaaaaaaaaaaaaaaaaaaaaaaaaaaaaaaaaaaaaaaaaaaaaaaaaaaaaaaaaaa

SEQ ID NO: 22794 - RNA, 4094 nt, Artificial Sequence
  SARS-CoV-2/Wuhan/WIV05/2019__EPI_ISL_402128 spike protein mRNA gc (1-1273)(K986P_V987P_A222V_D614G) R10279
aggagagucccgcagucggcguccagcggcucugcuuguucgugugugugucguugcaggccuuauucaagcuuaccauguucguguuccugguccuccugccccuggugagcucccagugcgugaaccucaccacccgcacgcagcugccgcccgccuacaccaacagcuucacccggggcgucuacuaccccgacaagguguuccgcuccagcgugcugcacuccacccaggaccucuuccugcccuucuucagcaacgucacgugguuccacgccauccacguguccgggaccaacggcaccaagcgguucgacaacccggugcugcccuucaacgacggggucuacuucgcgagcaccgagaaguccaacaucauccgcggcuggaucuucgggacgacccucgacagcaagacccagucccugcugaucgugaacaacgccaccaacguggucaucaaggugugcgaguuccaguucugcaacgaccccuuccucggcguguacuaccacaagaacaacaagagcuggauggaguccgaguuccgggucuacagcuccgccaacaacugcacguucgaguacgugagccagcccuuccugauggaccuggagggcaagcaggggaacuucaagaaccuccgcgaguucguguucaagaacaucgacggcuacuucaagaucuacuccaagcacaccccgaucaaccugguccgggaccugccccagggguucagcguccucgagccccugguggaccugcccaucggcaucaacaucacccgcuuccagacccuccuggcccugcaccgguccuaccucacgccgggggacagcagcuccggcuggaccgcgggcgccgccgccuacuacgugggguaccugcagccccgcaccuuccugcucaaguacaacgagaacggcaccaucacggacgcggucgacugcgcccuggacccccugagcgagaccaagugcacccucaaguccuucaccguggagaaggggaucuaccagacgagcaacuuccgggugcagcccaccgaguccaucguccgcuucccgaacaucaccaaccugugccccuucggcgagguguucaacgccacccgguucgccagcgucuacgccuggaaccgcaagcggaucuccaacugcguggcggacuacagcgugcuguacaacuccgccagcuucuccacguucaagugcuacggcgucagccccaccaagcucaacgaccugugcuucaccaacguguacgccgacuccuucgugauccgcggggacgagguccggcagaucgcccccggccagaccgggaagaucgccgacuacaacuacaagcugccggacgacuucacgggcugcgugaucgcguggaacagcaacaaccucgacuccaaggucgggggcaacuacaacuaccuguaccgccuguuccgcaagagcaaccucaagcccuucgagcgggacaucuccaccgagaucuaccaggccggcagcacccccugcaacgggguggagggcuucaacugcuacuucccccugcaguccuacggguuccagccgaccaacggcgugggguaccagcccuaccggguggucgugcugagcuucgagcuccugcacgcccccgccacggugugcggccccaagaaguccaccaaccuggucaagaacaagugcgugaacuucaacuucaacggccucaccgggaccggcgugcugaccgagagcaacaagaaguuccugccguuccagcaguucgggcgcgacaucgccgacacgaccgacgcgguccgcgacccccagacccuggagauccucgacaucacccccugcagcuucggcgggguguccgugaucacgccgggcaccaacaccagcaaccaggucgccgugcuguaccagggcgugaacugcaccgagguccccguggccauccacgccgaccagcugacgcccaccuggcggguguacuccaccggcagcaacgucuuccagacccgcgccgggugccucaucggcgcggagcacgugaacaacuccuacgagugcgacauccccaucggggccggcaucugcgccagcuaccagacgcagaccaacuccccgcggcgcgcccggagcguggcgucccagagcaucaucgccuacaccaugucccugggcgccgagaacagcgucgccuacuccaacaacagcaucgccauccccaccaacuucacgaucuccgugaccaccgagauccugcccgugagcaugaccaagacgagcgucgacugcaccauguacaucugcggggacuccaccgagugcagcaaccuccugcugcaguacggcuccuucugcacccagcucaaccgcgcgcugacggggaucgccguggagcaggacaagaacacccaggagguguucgcccaggucaagcagaucuacaagacgcccccgaucaaggacuucggcggguucaacuucagccagauccugcccgaccccuccaagcccagcaagcgguccuucaucgaggaccuccuguucaacaaggugacccuggccgacgccggcuucaucaagcaguacggcgacugccucggggacaucgcggcccgcgaccugaucugcgcccagaaguucaacggccugaccgugcucccgccccugcugaccgacgagaugaucgcccaguacaccagcgcccuccuggcggggaccaucacguccggcuggaccuucggggccggcgccgcccugcagauccccuucgcgaugcagauggccuaccgguucaacggcaucggggucacccagaacgugcucuacgagaaccagaagcugaucgccaaccaguucaacagcgccaucggcaagauccaggacucccugagcuccaccgccagcgcgcucgggaagcugcaggacguggucaaccagaacgcccaggcccugaacacgcucgugaagcagcuguccagcaacuucggcgccaucuccagcgugcugaacgacauccucucccgccuggacccgcccgaggccgaggugcagaucgaccggcugaucaccgggcgccuccagagccugcagaccuacgugacccagcagcugauccgggcggccgagauccgcgccagcgccaaccucgccgcgaccaagauguccgagugcguccugggccagagcaagcggguggacuucugcggcaagggguaccaccugauguccuucccccagagcgccccgcacggcguggucuuccuccacgugacguacguccccgcccaggagaagaacuucaccaccgcccccgcgaucugccacgacgggaaggcccacuucccccgcgagggcguguucguguccaacgggacccacugguucgucacgcagcggaacuucuacgagccgcagaucaucaccaccgacaacaccuucgugagcggcaacugcgacguggucaucggcaucgugaacaacacgguguacgacccccugcagcccgagcuggacuccuucaaggaggagcucgacaaguacuucaagaaccacaccagccccgacgucgaccugggggacaucuccggcaucaacgccagcguggugaacauccagaaggagaucgaccgccugaacgaggucgccaagaaccucaacgagucccugaucgaccugcaggagcucgggaaguacgagcaguacaucaaguggccgugguacaucuggcugggcuucaucgccggccugaucgcgaucgugauggugaccaucaugcucugcugcaugaccagcugcugcuccugccugaaggggugcugcagcugcggcuccugcugcaaguucgacgaggacgacagcgagcccguccugaagggggugaagcuccacuacacgugaggacuagucccuguucccagagcccacuuuuuuuucuuuuuuugaaauaaaauagccugucuuucagaucucaaaggcucuuuucagagccaccaaaaaaaaaaaaaaaaaaaaaaaaaaaaaaaaaaaaaaaaaaaaaaaaaaaaaaaaaaaaaaaaaaaaaaaaaaaaaaaaaaaaaaaaaaaaaaaaaaaaa

SEQ ID NO: 22795 - RNA, 4094 nt, Artificial Sequence
  SARS-CoV-2/Wuhan/WIV05/2019__EPI_ISL_402128 spike protein mRNA gc (1-1273)(N439K_D614G) R10298
aggagagucccgcagucggcguccagcggcucugcuuguucgugugugugucguugcaggccuuauucaagcuuaccauguucguguuccugguccuccugccccuggugagcucccagugcgugaaccucaccacccgcacgcagcugccgcccgccuacaccaacagcuucacccggggcgucuacuaccccgacaagguguuccgcuccagcgugcugcacuccacccaggaccucuuccugcccuucuucagcaacgucacgugguuccacgccauccacguguccgggaccaacggcaccaagcgguucgacaacccggugcugcccuucaacgacggggucuacuucgcgagcaccgagaaguccaacaucauccgcggcuggaucuucgggacgacccucgacagcaagacccagucccugcugaucgugaacaacgccaccaacguggucaucaaggugugcgaguuccaguucugcaacgaccccuuccucggcguguacuaccacaagaacaacaagagcuggauggaguccgaguuccgggucuacagcuccgccaacaacugcacguucgaguacgugagccagcccuuccugauggaccuggagggcaagcaggggaacuucaagaaccuccgcgaguucguguucaagaacaucgacggcuacuucaagaucuacuccaagcacaccccgaucaaccugguccgggaccugccccagggguucagcgcccucgagccccugguggaccugcccaucggcaucaacaucacccgcuuccagacccuccuggcccugcaccgguccuaccucacgccgggggacagcagcuccggcuggaccgcgggcgccgccgccuacuacgugggguaccugcagccccgcaccuuccugcucaaguacaacgagaacggcaccaucacggacgcggucgacugcgcccuggacccccugagcgagaccaagugcacccucaaguccuucaccguggagaaggggaucuaccagacgagcaacuuccgggugcagcccaccgaguccaucguccgcuucccgaacaucaccaaccugugccccuucggcgagguguucaacgccacccgguucgccagcgucuacgccuggaaccgcaagcggaucuccaacugcguggcggacuacagcgugcuguacaacuccgccagcuucuccacguucaagugcuacggcgucagccccaccaagcucaacgaccugugcuucaccaacguguacgccgacuccuucgugauccgcggggacgagguccggcagaucgcccccggccagaccgggaagaucgccgacuacaacuacaagcugccggacgacuucacgggcugcgugaucgcguggaacagcaagaaccucgacuccaaggucgggggcaacuacaacuaccuguaccgccuguuccgcaagagcaaccucaagcccuucgagcgggacaucuccaccgagaucuaccaggccggcagcacccccugcaacgggguggagggcuucaacugcuacuucccccugcaguccuacggguuccagccgaccaacggcgugggguaccagcccuaccggguggucgugcugagcuucgagcuccugcacgcccccgccacggugugcggccccaagaaguccaccaaccuggucaagaacaagugcgugaacuucaacuucaacggccucaccgggaccggcgugcugaccgagagcaacaagaaguuccugccguuccagcaguucgggcgcgacaucgccgacacgaccgacgcgguccgcgacccccagacccuggagauccucgacaucacccccugcagcuucggcgggguguccgugaucacgccgggcaccaacaccagcaaccaggucgccgugcuguaccagggcgugaacugcaccgagguccccguggccauccacgccgaccagcugacgcccaccuggcggguguacuccaccggcagcaacgucuuccagacccgcgccgggugccucaucggcgcggagcacgugaacaacuccuacgagugcgacauccccaucggggccggcaucugcgccagcuaccagacgcagaccaacuccccgcggcgcgcccggagcguggcgucccagagcaucaucgccuacaccaugucccugggcgccgagaacagcgucgccuacuccaacaacagcaucgccauccccaccaacuucacgaucuccgugaccaccgagauccugcccgugagcaugaccaagacgagcgucgacugcaccauguacaucugcggggacuccaccgagugcagcaaccuccugcugcaguacggcuccuucugcacccagcucaaccgcgcgcugacggggaucgccguggagcaggacaagaacacccaggagguguucgcccaggucaagcagaucuacaagacgcccccgaucaaggacuucggcggguucaacuucagccagauccugcccgaccccuccaagcccagcaagcgguccuucaucgaggaccuccuguucaacaaggugacccuggccgacgccggcuucaucaagcaguacggcgacugccucggggacaucgcggcccgcgaccugaucugcgcccagaaguucaacggccugaccgugcucccgccccugcugaccgacgagaugaucgcccaguacaccagcgcccuccuggcggggaccaucacguccggcuggaccuucggggccggcgccgcccugcagauccccuucgcgaugcagauggccuaccgguucaacggcaucggggucacccagaacgugcucuacgagaaccagaagcugaucgccaaccaguucaacagcgccaucggcaagauccaggacucccugagcuccaccgccagcgcgcucgggaagcugcaggacguggucaaccagaacgcccaggcccugaacacgcucgugaagcagcuguccagcaacuucggcgccaucuccagcgugcugaacgacauccucucccgccuggacaaggucgaggccgaggugcagaucgaccggcugaucaccgggcgccuccagagccugcagaccuacgugacccagcagcugauccgggcggccgagauccgcgccagcgccaaccucgccgcgaccaagauguccgagugcguccugggccagagcaagcggguggacuucugcggcaagggguaccaccugauguccuucccccagagcgccccgcacggcguggucuuccuccacgugacguacguccccgcccaggagaagaacuucaccaccgcccccgcgaucugccacgacgggaaggcccacuucccccgcgagggcguguucguguccaacgggacccacugguucgucacgcagcggaacuucuacgagccgcagaucaucaccaccgacaacaccuucgugagcggcaacugcgacguggucaucggcaucgugaacaacacgguguacgacccccugcagcccgagcuggacuccuucaaggaggagcucgacaaguacuucaagaaccacaccagccccgacgucgaccugggggacaucuccggcaucaacgccagcguggugaacauccagaaggagaucgaccgccugaacgaggucgccaagaaccucaacgagucccugaucgaccugcaggagcucgggaaguacgagcaguacaucaaguggccgugguacaucuggcugggcuucaucgccggccugaucgcgaucgugauggugaccaucaugcucugcugcaugaccagcugcugcuccugccugaaggggugcugcagcugcggcuccugcugcaaguucgacgaggacgacagcgagcccguccugaagggggugaagcuccacuacacgugaggacuagucccuguucccagagcccacuuuuuuuucuuuuuuugaaauaaaauagccugucuuucagaucucaaaggcucuuuucagagccaccaaaaaaaaaaaaaaaaaaaaaaaaaaaaaaaaaaaaaaaaaaaaaaaaaaaaaaaaaaaaaaaaaaaaaaaaaaaaaaaaaaaaaaaaaaaaaaaaaaaaa

SEQ ID NO: 22796 - RNA, 4094 nt, Artificial Sequence
  SARS-CoV-2/Wuhan/WIV05/2019__EPI_ISL_402128 spike protein mRNA gc (1-1273)(K986P_V987P_N439K_D614G) R10299
aggagagucccgcagucggcguccagcggcucugcuuguucgugugugugucguugcaggccuuauucaagcuuaccauguucguguuccugguccuccugccccuggugagcucccagugcgugaaccucaccacccgcacgcagcugccgcccgccuacaccaacagcuucacccggggcgucuacuaccccgacaagguguuccgcuccagcgugcugcacuccacccaggaccucuuccugcccuucuucagcaacgucacgugguuccacgccauccacguguccgggaccaacggcaccaagcgguucgacaacccggugcugcccuucaacgacggggucuacuucgcgagcaccgagaaguccaacaucauccgcggcuggaucuucgggacgacccucgacagcaagacccagucccugcugaucgugaacaacgccaccaacguggucaucaaggugugcgaguuccaguucugcaacgaccccuuccucggcguguacuaccacaagaacaacaagagcuggauggaguccgaguuccgggucuacagcuccgccaacaacugcacguucgaguacgugagccagcccuuccugauggaccuggagggcaagcaggggaacuucaagaaccuccgcgaguucguguucaagaacaucgacggcuacuucaagaucuacuccaagcacaccccgaucaaccugguccgggaccugccccagggguucagcgcccucgagccccugguggaccugcccaucggcaucaacaucacccgcuuccagacccuccuggcccugcaccgguccuaccucacgccgggggacagcagcuccggcuggaccgcgggcgccgccgccuacuacgugggguaccugcagccccgcaccuuccugcucaaguacaacgagaacggcaccaucacggacgcggucgacugcgcccuggacccccugagcgagaccaagugcacccucaaguccuucaccguggagaaggggaucuaccagacgagcaacuuccgggugcagcccaccgaguccaucguccgcuucccgaacaucaccaaccugugccccuucggcgagguguucaacgccacccgguucgccagcgucuacgccuggaaccgcaagcggaucuccaacugcguggcggacuacagcgugcuguacaacuccgccagcuucuccacguucaagugcuacggcgucagccccaccaagcucaacgaccugugcuucaccaacguguacgccgacuccuucgugauccgcggggacgagguccggcagaucgcccccggccagaccgggaagaucgccgacuacaacuacaagcugccggacgacuucacgggcugcgugaucgcguggaacagcaagaaccucgacuccaaggucgggggcaacuacaacuaccuguaccgccuguuccgcaagagcaaccucaagcccuucgagcgggacaucuccaccgagaucuaccaggccggcagcacccccugcaacgggguggagggcuucaacugcuacuucccccugcaguccuacggguuccagccgaccaacggcgugggguaccagcccuaccggguggucgugcugagcuucgagcuccugcacgcccccgccacggugugcggccccaagaaguccaccaaccuggucaagaacaagugcgugaacuucaacuucaacggccucaccgggaccggcgugcugaccgagagcaacaagaaguuccugccguuccagcaguucgggcgcgacaucgccgacacgaccgacgcgguccgcgacccccagacccuggagauccucgacaucacccccugcagcuucggcgggguguccgugaucacgccgggcaccaacaccagcaaccaggucgccgugcuguaccagggcgugaacugcaccgagguccccguggccauccacgccgaccagcugacgcccaccuggcggguguacuccaccggcagcaacgucuuccagacccgcgccgggugccucaucggcgcggagcacgugaacaacuccuacgagugcgacauccccaucggggccggcaucugcgccagcuaccagacgcagaccaacuccccgcggcgcgcccggagcguggcgucccagagcaucaucgccuacaccaugucccugggcgccgagaacagcgucgccuacuccaacaacagcaucgccauccccaccaacuucacgaucuccgugaccaccgagauccugcccgugagcaugaccaagacgagcgucgacugcaccauguacaucugcggggacuccaccgagugcagcaaccuccugcugcaguacggcuccuucugcacccagcucaaccgcgcgcugacggggaucgccguggagcaggacaagaacacccaggagguguucgcccaggucaagcagaucuacaagacgcccccgaucaaggacuucggcggguucaacuucagccagauccugcccgaccccuccaagcccagcaagcgguccuucaucgaggaccuccuguucaacaaggugacccuggccgacgccggcuucaucaagcaguacggcgacugccucggggacaucgcggcccgcgaccugaucugcgcccagaaguucaacggccugaccgugcucccgccccugcugaccgacgagaugaucgcccaguacaccagcgcccuccuggcggggaccaucacguccggcuggaccuucggggccggcgccgcccugcagauccccuucgcgaugcagauggccuaccgguucaacggcaucggggucacccagaacgugcucuacgagaaccagaagcugaucgccaaccaguucaacagcgccaucggcaagauccaggacucccugagcuccaccgccagcgcgcucgggaagcugcaggacguggucaaccagaacgcccaggcccugaacacgcucgugaagcagcuguccagcaacuucggcgccaucuccagcgugcugaacgacauccucucccgccuggacccgcccgaggccgaggugcagaucgaccggcugaucaccgggcgccuccagagccugcagaccuacgugacccagcagcugauccgggcggccgagauccgcgccagcgccaaccucgccgcgaccaagauguccgagugcguccugggccagagcaagcggguggacuucugcggcaagggguaccaccugauguccuucccccagagcgccccgcacggcguggucuuccuccacgugacguacguccccgcccaggagaagaacuucaccaccgcccccgcgaucugccacgacgggaaggcccacuucccccgcgagggcguguucguguccaacgggacccacugguucgucacgcagcggaacuucuacgagccgcagaucaucaccaccgacaacaccuucgugagcggcaacugcgacguggucaucggcaucgugaacaacacgguguacgacccccugcagcccgagcuggacuccuucaaggaggagcucgacaaguacuucaagaaccacaccagccccgacgucgaccugggggacaucuccggcaucaacgccagcguggugaacauccagaaggagaucgaccgccugaacgaggucgccaagaaccucaacgagucccugaucgaccugcaggagcucgggaaguacgagcaguacaucaaguggccgugguacaucuggcugggcuucaucgccggccugaucgcgaucgugauggugaccaucaugcucugcugcaugaccagcugcugcuccugccugaaggggugcugcagcugcggcuccugcugcaaguucgacgaggacgacagcgagcccguccugaagggggugaagcuccacuacacgugaggacuagucccuguucccagagcccacuuuuuuuucuuuuuuugaaauaaaauagccugucuuucagaucucaaaggcucuuuucagagccaccaaaaaaaaaaaaaaaaaaaaaaaaaaaaaaaaaaaaaaaaaaaaaaaaaaaaaaaaaaaaaaaaaaaaaaaaaaaaaaaaaaaaaaaaaaaaaaaaaaaaa

SEQ ID NO: 22797 - RNA, 4094 nt, Artificial Sequence
  SARS-CoV-2/Wuhan/WIV05/2019__EPI_ISL_402128 spike protein mRNA gc (1-1273)(S477N_D614G) R10287
aggagagucccgcagucggcguccagcggcucugcuuguucgugugugugucguugcaggccuuauucaagcuuaccauguucguguuccugguccuccugccccuggugagcucccagugcgugaaccucaccacccgcacgcagcugccgcccgccuacaccaacagcuucacccggggcgucuacuaccccgacaagguguuccgcuccagcgugcugcacuccacccaggaccucuuccugcccuucuucagcaacgucacgugguuccacgccauccacguguccgggaccaacggcaccaagcgguucgacaacccggugcugcccuucaacgacggggucuacuucgcgagcaccgagaaguccaacaucauccgcggcuggaucuucgggacgacccucgacagcaagacccagucccugcugaucgugaacaacgccaccaacguggucaucaaggugugcgaguuccaguucugcaacgaccccuuccucggcguguacuaccacaagaacaacaagagcuggauggaguccgaguuccgggucuacagcuccgccaacaacugcacguucgaguacgugagccagcccuuccugauggaccuggagggcaagcaggggaacuucaagaaccuccgcgaguucguguucaagaacaucgacggcuacuucaagaucuacuccaagcacaccccgaucaaccugguccgggaccugccccagggguucagcgcccucgagccccugguggaccugcccaucggcaucaacaucacccgcuuccagacccuccuggcccugcaccgguccuaccucacgccgggggacagcagcuccggcuggaccgcgggcgccgccgccuacuacgugggguaccugcagccccgcaccuuccugcucaaguacaacgagaacggcaccaucacggacgcggucgacugcgcccuggacccccugagcgagaccaagugcacccucaaguccuucaccguggagaaggggaucuaccagacgagcaacuuccgggugcagcccaccgaguccaucguccgcuucccgaacaucaccaaccugugccccuucggcgagguguucaacgccacccgguucgccagcgucuacgccuggaaccgcaagcggaucuccaacugcguggcggacuacagcgugcuguacaacuccgccagcuucuccacguucaagugcuacggcgucagccccaccaagcucaacgaccugugcuucaccaacguguacgccgacuccuucgugauccgcggggacgagguccggcagaucgcccccggccagaccgggaagaucgccgacuacaacuacaagcugccggacgacuucacgggcugcgugaucgcguggaacagcaacaaccucgacuccaaggucgggggcaacuacaacuaccuguaccgccuguuccgcaagagcaaccucaagcccuucgagcgggacaucuccaccgagaucuaccaggccggcaacacccccugcaacgggguggagggcuucaacugcuacuucccccugcaguccuacggguuccagccgaccaacggcgugggguaccagcccuaccggguggucgugcugagcuucgagcuccugcacgcccccgccacggugugcggccccaagaaguccaccaaccuggucaagaacaagugcgugaacuucaacuucaacggccucaccgggaccggcgugcugaccgagagcaacaagaaguuccugccguuccagcaguucgggcgcgacaucgccgacacgaccgacgcgguccgcgacccccagacccuggagauccucgacaucacccccugcagcuucggcgggguguccgugaucacgccgggcaccaacaccagcaaccaggucgccgugcuguaccagggcgugaacugcaccgagguccccguggccauccacgccgaccagcugacgcccaccuggcggguguacuccaccggcagcaacgucuuccagacccgcgccgggugccucaucggcgcggagcacgugaacaacuccuacgagugcgacauccccaucggggccggcaucugcgccagcuaccagacgcagaccaacuccccgcggcgcgcccggagcguggcgucccagagcaucaucgccuacaccaugucccugggcgccgagaacagcgucgccuacuccaacaacagcaucgccauccccaccaacuucacgaucuccgugaccaccgagauccugcccgugagcaugaccaagacgagcgucgacugcaccauguacaucugcggggacuccaccgagugcagcaaccuccugcugcaguacggcuccuucugcacccagcucaaccgcgcgcugacggggaucgccguggagcaggacaagaacacccaggagguguucgcccaggucaagcagaucuacaagacgcccccgaucaaggacuucggcggguucaacuucagccagauccugcccgaccccuccaagcccagcaagcgguccuucaucgaggaccuccuguucaacaaggugacccuggccgacgccggcuucaucaagcaguacggcgacugccucggggacaucgcggcccgcgaccugaucugcgcccagaaguucaacggccugaccgugcucccgccccugcugaccgacgagaugaucgcccaguacaccagcgcccuccuggcggggaccaucacguccggcuggaccuucggggccggcgccgcccugcagauccccuucgcgaugcagauggccuaccgguucaacggcaucggggucacccagaacgugcucuacgagaaccagaagcugaucgccaaccaguucaacagcgccaucggcaagauccaggacucccugagcuccaccgccagcgcgcucgggaagcugcaggacguggucaaccagaacgcccaggcccugaacacgcucgugaagcagcuguccagcaacuucggcgccaucuccagcgugcugaacgacauccucucccgccuggacaaggucgaggccgaggugcagaucgaccggcugaucaccgggcgccuccagagccugcagaccuacgugacccagcagcugauccgggcggccgagauccgcgccagcgccaaccucgccgcgaccaagauguccgagugcguccugggccagagcaagcggguggacuucugcggcaagggguaccaccugauguccuucccccagagcgccccgcacggcguggucuuccuccacgugacguacguccccgcccaggagaagaacuucaccaccgcccccgcgaucugccacgacgggaaggcccacuucccccgcgagggcguguucguguccaacgggacccacugguucgucacgcagcggaacuucuacgagccgcagaucaucaccaccgacaacaccuucgugagcggcaacugcgacguggucaucggcaucgugaacaacacgguguacgacccccugcagcccgagcuggacuccuucaaggaggagcucgacaaguacuucaagaaccacaccagccccgacgucgaccugggggacaucuccggcaucaacgccagcguggugaacauccagaaggagaucgaccgccugaacgaggucgccaagaaccucaacgagucccugaucgaccugcaggagcucgggaaguacgagcaguacaucaaguggccgugguacaucuggcugggcuucaucgccggccugaucgcgaucgugauggugaccaucaugcucugcugcaugaccagcugcugcuccugccugaaggggugcugcagcugcggcuccugcugcaaguucgacgaggacgacagcgagcccguccugaagggggugaagcuccacuacacgugaggacuagucccuguucccagagcccacuuuuuuuucuuuuuuugaaauaaaauagccugucuuucagaucucaaaggcucuuuucagagccaccaaaaaaaaaaaaaaaaaaaaaaaaaaaaaaaaaaaaaaaaaaaaaaaaaaaaaaaaaaaaaaaaaaaaaaaaaaaaaaaaaaaaaaaaaaaaaaaaaaaaa

SEQ ID NO: 22798 - RNA, 4094 nt, Artificial Sequence
  SARS-CoV-2/Wuhan/WIV05/2019__EPI_ISL_402128 spike protein mRNA gc (1-1273)(K986P_V987P_S477N_D614G) R10286
aggagagucccgcagucggcguccagcggcucugcuuguucgugugugugucguugcaggccuuauucaagcuuaccauguucguguuccugguccuccugccccuggugagcucccagugcgugaaccucaccacccgcacgcagcugccgcccgccuacaccaacagcuucacccggggcgucuacuaccccgacaagguguuccgcuccagcgugcugcacuccacccaggaccucuuccugcccuucuucagcaacgucacgugguuccacgccauccacguguccgggaccaacggcaccaagcgguucgacaacccggugcugcccuucaacgacggggucuacuucgcgagcaccgagaaguccaacaucauccgcggcuggaucuucgggacgacccucgacagcaagacccagucccugcugaucgugaacaacgccaccaacguggucaucaaggugugcgaguuccaguucugcaacgaccccuuccucggcguguacuaccacaagaacaacaagagcuggauggaguccgaguuccgggucuacagcuccgccaacaacugcacguucgaguacgugagccagcccuuccugauggaccuggagggcaagcaggggaacuucaagaaccuccgcgaguucguguucaagaacaucgacggcuacuucaagaucuacuccaagcacaccccgaucaaccugguccgggaccugccccagggguucagcgcccucgagccccugguggaccugcccaucggcaucaacaucacccgcuuccagacccuccuggcccugcaccgguccuaccucacgccgggggacagcagcuccggcuggaccgcgggcgccgccgccuacuacgugggguaccugcagccccgcaccuuccugcucaaguacaacgagaacggcaccaucacggacgcggucgacugcgcccuggacccccugagcgagaccaagugcacccucaaguccuucaccguggagaaggggaucuaccagacgagcaacuuccgggugcagcccaccgaguccaucguccgcuucccgaacaucaccaaccugugccccuucggcgagguguucaacgccacccgguucgccagcgucuacgccuggaaccgcaagcggaucuccaacugcguggcggacuacagcgugcuguacaacuccgccagcuucuccacguucaagugcuacggcgucagccccaccaagcucaacgaccugugcuucaccaacguguacgccgacuccuucgugauccgcggggacgagguccggcagaucgcccccggccagaccgggaagaucgccgacuacaacuacaagcugccggacgacuucacgggcugcgugaucgcguggaacagcaacaaccucgacuccaaggucgggggcaacuacaacuaccuguaccgccuguuccgcaagagcaaccucaagcccuucgagcgggacaucuccaccgagaucuaccaggccggcaacacccccugcaacgggguggagggcuucaacugcuacuucccccugcaguccuacggguuccagccgaccaacggcgugggguaccagcccuaccggguggucgugcugagcuucgagcuccugcacgcccccgccacggugugcggccccaagaaguccaccaaccuggucaagaacaagugcgugaacuucaacuucaacggccucaccgggaccggcgugcugaccgagagcaacaagaaguuccugccguuccagcaguucgggcgcgacaucgccgacacgaccgacgcgguccgcgacccccagacccuggagauccucgacaucacccccugcagcuucggcgggguguccgugaucacgccgggcaccaacaccagcaaccaggucgccgugcuguaccagggcgugaacugcaccgagguccccguggccauccacgccgaccagcugacgcccaccuggcggguguacuccaccggcagcaacgucuuccagacccgcgccgggugccucaucggcgcggagcacgugaacaacuccuacgagugcgacauccccaucggggccggcaucugcgccagcuaccagacgcagaccaacuccccgcggcgcgcccggagcguggcgucccagagcaucaucgccuacaccaugucccugggcgccgagaacagcgucgccuacuccaacaacagcaucgccauccccaccaacuucacgaucuccgugaccaccgagauccugcccgugagcaugaccaagacgagcgucgacugcaccauguacaucugcggggacuccaccgagugcagcaaccuccugcugcaguacggcuccuucugcacccagcucaaccgcgcgcugacggggaucgccguggagcaggacaagaacacccaggagguguucgcccaggucaagcagaucuacaagacgcccccgaucaaggacuucggcggguucaacuucagccagauccugcccgaccccuccaagcccagcaagcgguccuucaucgaggaccuccuguucaacaaggugacccuggccgacgccggcuucaucaagcaguacggcgacugccucggggacaucgcggcccgcgaccugaucugcgcccagaaguucaacggccugaccgugcucccgccccugcugaccgacgagaugaucgcccaguacaccagcgcccuccuggcggggaccaucacguccggcuggaccuucggggccggcgccgcccugcagauccccuucgcgaugcagauggccuaccgguucaacggcaucggggucacccagaacgugcucuacgagaaccagaagcugaucgccaaccaguucaacagcgccaucggcaagauccaggacucccugagcuccaccgccagcgcgcucgggaagcugcaggacguggucaaccagaacgcccaggcccugaacacgcucgugaagcagcuguccagcaacuucggcgccaucuccagcgugcugaacgacauccucucccgccuggacccgcccgaggccgaggugcagaucgaccggcugaucaccgggcgccuccagagccugcagaccuacgugacccagcagcugauccgggcggccgagauccgcgccagcgccaaccucgccgcgaccaagauguccgagugcguccugggccagagcaagcggguggacuucugcggcaagggguaccaccugauguccuucccccagagcgccccgcacggcguggucuuccuccacgugacguacguccccgcccaggagaagaacuucaccaccgcccccgcgaucugccacgacgggaaggcccacuucccccgcgagggcguguucguguccaacgggacccacugguucgucacgcagcggaacuucuacgagccgcagaucaucaccaccgacaacaccuucgugagcggcaacugcgacguggucaucggcaucgugaacaacacgguguacgacccccugcagcccgagcuggacuccuucaaggaggagcucgacaaguacuucaagaaccacaccagccccgacgucgaccugggggacaucuccggcaucaacgccagcguggugaacauccagaaggagaucgaccgccugaacgaggucgccaagaaccucaacgagucccugaucgaccugcaggagcucgggaaguacgagcaguacaucaaguggccgugguacaucuggcugggcuucaucgccggccugaucgcgaucgugauggugaccaucaugcucugcugcaugaccagcugcugcuccugccugaaggggugcugcagcugcggcuccugcugcaaguucgacgaggacgacagcgagcccguccugaagggggugaagcuccacuacacgugaggacuagucccuguucccagagcccacuuuuuuuucuuuuuuugaaauaaaauagccugucuuucagaucucaaaggcucuuuucagagccaccaaaaaaaaaaaaaaaaaaaaaaaaaaaaaaaaaaaaaaaaaaaaaaaaaaaaaaaaaaaaaaaaaaaaaaaaaaaaaaaaaaaaaaaaaaaaaaaaaaaaa

SEQ ID NO: 22799 - RNA, 4094 nt, Artificial Sequence
  SARS-CoV-2/Wuhan/WIV05/2019__EPI_ISL_402128 spike protein mRNA gc (1-1273)(N501Y_D614G)
aggagagucccgcagucggcguccagcggcucugcuuguucgugugugugucguugcaggccuuauucaagcuuaccauguucguguuccugguccuccugccccuggugagcucccagugcgugaaccucaccacccgcacgcagcugccgcccgccuacaccaacagcuucacccggggcgucuacuaccccgacaagguguuccgcuccagcgugcugcacuccacccaggaccucuuccugcccuucuucagcaacgucacgugguuccacgccauccacguguccgggaccaacggcaccaagcgguucgacaacccggugcugcccuucaacgacggggucuacuucgcgagcaccgagaaguccaacaucauccgcggcuggaucuucgggacgacccucgacagcaagacccagucccugcugaucgugaacaacgccaccaacguggucaucaaggugugcgaguuccaguucugcaacgaccccuuccucggcguguacuaccacaagaacaacaagagcuggauggaguccgaguuccgggucuacagcuccgccaacaacugcacguucgaguacgugagccagcccuuccugauggaccuggagggcaagcaggggaacuucaagaaccuccgcgaguucguguucaagaacaucgacggcuacuucaagaucuacuccaagcacaccccgaucaaccugguccgggaccugccccagggguucagcgcccucgagccccugguggaccugcccaucggcaucaacaucacccgcuuccagacccuccuggcccugcaccgguccuaccucacgccgggggacagcagcuccggcuggaccgcgggcgccgccgccuacuacgugggguaccugcagccccgcaccuuccugcucaaguacaacgagaacggcaccaucacggacgcggucgacugcgcccuggacccccugagcgagaccaagugcacccucaaguccuucaccguggagaaggggaucuaccagacgagcaacuuccgggugcagcccaccgaguccaucguccgcuucccgaacaucaccaaccugugccccuucggcgagguguucaacgccacccgguucgccagcgucuacgccuggaaccgcaagcggaucuccaacugcguggcggacuacagcgugcuguacaacuccgccagcuucuccacguucaagugcuacggcgucagccccaccaagcucaacgaccugugcuucaccaacguguacgccgacuccuucgugauccgcggggacgagguccggcagaucgcccccggccagaccgggaagaucgccgacuacaacuacaagcugccggacgacuucacgggcugcgugaucgcguggaacagcaacaaccucgacuccaaggucgggggcaacuacaacuaccuguaccgccuguuccgcaagagcaaccucaagcccuucgagcgggacaucuccaccgagaucuaccaggccggcagcacccccugcaacgggguggagggcuucaacugcuacuucccccugcaguccuacggguuccagccgaccuacggcgugggguaccagcccuaccggguggucgugcugagcuucgagcuccugcacgcccccgccacggugugcggccccaagaaguccaccaaccuggucaagaacaagugcgugaacuucaacuucaacggccucaccgggaccggcgugcugaccgagagcaacaagaaguuccugccguuccagcaguucgggcgcgacaucgccgacacgaccgacgcgguccgcgacccccagacccuggagauccucgacaucacccccugcagcuucggcgggguguccgugaucacgccgggcaccaacaccagcaaccaggucgccgugcuguaccagggcgugaacugcaccgagguccccguggccauccacgccgaccagcugacgcccaccuggcggguguacuccaccggcagcaacgucuuccagacccgcgccgggugccucaucggcgcggagcacgugaacaacuccuacgagugcgacauccccaucggggccggcaucugcgccagcuaccagacgcagaccaacuccccgcggcgcgcccggagcguggcgucccagagcaucaucgccuacaccaugucccugggcgccgagaacagcgucgccuacuccaacaacagcaucgccauccccaccaacuucacgaucuccgugaccaccgagauccugcccgugagcaugaccaagacgagcgucgacugcaccauguacaucugcggggacuccaccgagugcagcaaccuccugcugcaguacggcuccuucugcacccagcucaaccgcgcgcugacggggaucgccguggagcaggacaagaacacccaggagguguucgcccaggucaagcagaucuacaagacgcccccgaucaaggacuucggcggguucaacuucagccagauccugcccgaccccuccaagcccagcaagcgguccuucaucgaggaccuccuguucaacaaggugacccuggccgacgccggcuucaucaagcaguacggcgacugccucggggacaucgcggcccgcgaccugaucugcgcccagaaguucaacggccugaccgugcucccgccccugcugaccgacgagaugaucgcccaguacaccagcgcccuccuggcggggaccaucacguccggcuggaccuucggggccggcgccgcccugcagauccccuucgcgaugcagauggccuaccgguucaacggcaucggggucacccagaacgugcucuacgagaaccagaagcugaucgccaaccaguucaacagcgccaucggcaagauccaggacucccugagcuccaccgccagcgcgcucgggaagcugcaggacguggucaaccagaacgcccaggcccugaacacgcucgugaagcagcuguccagcaacuucggcgccaucuccagcgugcugaacgacauccucucccgccuggacaaggucgaggccgaggugcagaucgaccggcugaucaccgggcgccuccagagccugcagaccuacgugacccagcagcugauccgggcggccgagauccgcgccagcgccaaccucgccgcgaccaagauguccgagugcguccugggccagagcaagcggguggacuucugcggcaagggguaccaccugauguccuucccccagagcgccccgcacggcguggucuuccuccacgugacguacguccccgcccaggagaagaacuucaccaccgcccccgcgaucugccacgacgggaaggcccacuucccccgcgagggcguguucguguccaacgggacccacugguucgucacgcagcggaacuucuacgagccgcagaucaucaccaccgacaacaccuucgugagcggcaacugcgacguggucaucggcaucgugaacaacacgguguacgacccccugcagcccgagcuggacuccuucaaggaggagcucgacaaguacuucaagaaccacaccagccccgacgucgaccugggggacaucuccggcaucaacgccagcguggugaacauccagaaggagaucgaccgccugaacgaggucgccaagaaccucaacgagucccugaucgaccugcaggagcucgggaaguacgagcaguacaucaaguggccgugguacaucuggcugggcuucaucgccggccugaucgcgaucgugauggugaccaucaugcucugcugcaugaccagcugcugcuccugccugaaggggugcugcagcugcggcuccugcugcaaguucgacgaggacgacagcgagcccguccugaagggggugaagcuccacuacacgugaggacuagucccuguucccagagcccacuuuuuuuucuuuuuuugaaauaaaauagccugucuuucagaucucaaaggcucuuuucagagccaccaaaaaaaaaaaaaaaaaaaaaaaaaaaaaaaaaaaaaaaaaaaaaaaaaaaaaaaaaaaaaaaaaaaaaaaaaaaaaaaaaaaaaaaaaaaaaaaaaaaaa

SEQ ID NO: 22800 - RNA, 4094 nt, Artificial Sequence
  SARS-CoV-2/Wuhan/WIV05/2019__EPI_ISL_402128 spike protein mRNA gc (1-1273)(K986P_V987P_N501Y_D614G)
aggagagucccgcagucggcguccagcggcucugcuuguucgugugugugucguugcaggccuuauucaagcuuaccauguucguguuccugguccuccugccccuggugagcucccagugcgugaaccucaccacccgcacgcagcugccgcccgccuacaccaacagcuucacccggggcgucuacuaccccgacaagguguuccgcuccagcgugcugcacuccacccaggaccucuuccugcccuucuucagcaacgucacgugguuccacgccauccacguguccgggaccaacggcaccaagcgguucgacaacccggugcugcccuucaacgacggggucuacuucgcgagcaccgagaaguccaacaucauccgcggcuggaucuucgggacgacccucgacagcaagacccagucccugcugaucgugaacaacgccaccaacguggucaucaaggugugcgaguuccaguucugcaacgaccccuuccucggcguguacuaccacaagaacaacaagagcuggauggaguccgaguuccgggucuacagcuccgccaacaacugcacguucgaguacgugagccagcccuuccugauggaccuggagggcaagcaggggaacuucaagaaccuccgcgaguucguguucaagaacaucgacggcuacuucaagaucuacuccaagcacaccccgaucaaccugguccgggaccugccccagggguucagcgcccucgagccccugguggaccugcccaucggcaucaacaucacccgcuuccagacccuccuggcccugcaccgguccuaccucacgccgggggacagcagcuccggcuggaccgcgggcgccgccgccuacuacgugggguaccugcagccccgcaccuuccugcucaaguacaacgagaacggcaccaucacggacgcggucgacugcgcccuggacccccugagcgagaccaagugcacccucaaguccuucaccguggagaaggggaucuaccagacgagcaacuuccgggugcagcccaccgaguccaucguccgcuucccgaacaucaccaaccugugccccuucggcgagguguucaacgccacccgguucgccagcgucuacgccuggaaccgcaagcggaucuccaacugcguggcggacuacagcgugcuguacaacuccgccagcuucuccacguucaagugcuacggcgucagccccaccaagcucaacgaccugugcuucaccaacguguacgccgacuccuucgugauccgcggggacgagguccggcagaucgcccccggccagaccgggaagaucgccgacuacaacuacaagcugccggacgacuucacgggcugcgugaucgcguggaacagcaacaaccucgacuccaaggucgggggcaacuacaacuaccuguaccgccuguuccgcaagagcaaccucaagcccuucgagcgggacaucuccaccgagaucuaccaggccggcagcacccccugcaacgggguggagggcuucaacugcuacuucccccugcaguccuacggguuccagccgaccuacggcgugggguaccagcccuaccggguggucgugcugagcuucgagcuccugcacgcccccgccacggugugcggccccaagaaguccaccaaccuggucaagaacaagugcgugaacuucaacuucaacggccucaccgggaccggcgugcugaccgagagcaacaagaaguuccugccguuccagcaguucgggcgcgacaucgccgacacgaccgacgcgguccgcgacccccagacccuggagauccucgacaucacccccugcagcuucggcgggguguccgugaucacgccgggcaccaacaccagcaaccaggucgccgugcuguaccagggcgugaacugcaccgagguccccguggccauccacgccgaccagcugacgcccaccuggcggguguacuccaccggcagcaacgucuuccagacccgcgccgggugccucaucggcgcggagcacgugaacaacuccuacgagugcgacauccccaucggggccggcaucugcgccagcuaccagacgcagaccaacuccccgcggcgcgcccggagcguggcgucccagagcaucaucgccuacaccaugucccugggcgccgagaacagcgucgccuacuccaacaacagcaucgccauccccaccaacuucacgaucuccgugaccaccgagauccugcccgugagcaugaccaagacgagcgucgacugcaccauguacaucugcggggacuccaccgagugcagcaaccuccugcugcaguacggcuccuucugcacccagcucaaccgcgcgcugacggggaucgccguggagcaggacaagaacacccaggagguguucgcccaggucaagcagaucuacaagacgcccccgaucaaggacuucggcggguucaacuucagccagauccugcccgaccccuccaagcccagcaagcgguccuucaucgaggaccuccuguucaacaaggugacccuggccgacgccggcuucaucaagcaguacggcgacugccucggggacaucgcggcccgcgaccugaucugcgcccagaaguucaacggccugaccgugcucccgccccugcugaccgacgagaugaucgcccaguacaccagcgcccuccuggcggggaccaucacguccggcuggaccuucggggccggcgccgcccugcagauccccuucgcgaugcagauggccuaccgguucaacggcaucggggucacccagaacgugcucuacgagaaccagaagcugaucgccaaccaguucaacagcgccaucggcaagauccaggacucccugagcuccaccgccagcgcgcucgggaagcugcaggacguggucaaccagaacgcccaggcccugaacacgcucgugaagcagcuguccagcaacuucggcgccaucuccagcgugcugaacgacauccucucccgccuggacccgcccgaggccgaggugcagaucgaccggcugaucaccgggcgccuccagagccugcagaccuacgugacccagcagcugauccgggcggccgagauccgcgccagcgccaaccucgccgcgaccaagauguccgagugcguccugggccagagcaagcggguggacuucugcggcaagggguaccaccugauguccuucccccagagcgccccgcacggcguggucuuccuccacgugacguacguccccgcccaggagaagaacuucaccaccgcccccgcgaucugccacgacgggaaggcccacuucccccgcgagggcguguucguguccaacgggacccacugguucgucacgcagcggaacuucuacgagccgcagaucaucaccaccgacaacaccuucgugagcggcaacugcgacguggucaucggcaucgugaacaacacgguguacgacccccugcagcccgagcuggacuccuucaaggaggagcucgacaaguacuucaagaaccacaccagccccgacgucgaccugggggacaucuccggcaucaacgccagcguggugaacauccagaaggagaucgaccgccugaacgaggucgccaagaaccucaacgagucccugaucgaccugcaggagcucgggaaguacgagcaguacaucaaguggccgugguacaucuggcugggcuucaucgccggccugaucgcgaucgugauggugaccaucaugcucugcugcaugaccagcugcugcuccugccugaaggggugcugcagcugcggcuccugcugcaaguucgacgaggacgacagcgagcccguccugaagggggugaagcuccacuacacgugaggacuagucccuguucccagagcccacuuuuuuuucuuuuuuugaaauaaaauagccugucuuucagaucucaaaggcucuuuucagagccaccaaaaaaaaaaaaaaaaaaaaaaaaaaaaaaaaaaaaaaaaaaaaaaaaaaaaaaaaaaaaaaaaaaaaaaaaaaaaaaaaaaaaaaaaaaaaaaaaaaaaa

SEQ ID NO: 22801 - RNA, 4088 nt, Artificial Sequence
  SARS-CoV-2/Wuhan/WIV05/2019__EPI_ISL_402128 spike protein mRNA gc (1-1273)(H69del_V70del_D614G) R10274
aggagagucccgcagucggcguccagcggcucugcuuguucgugugugugucguugcaggccuuauucaagcuuaccauguucguguuccugguccuccugccccuggugagcucccagugcgugaaccucaccacccgcacgcagcugccgcccgccuacaccaacagcuucacccggggcgucuacuaccccgacaagguguuccgcuccagcgugcugcacuccacccaggaccucuuccugcccuucuucagcaacgucacgugguuccacgccaucuccgggaccaacggcaccaagcgguucgacaacccggugcugcccuucaacgacggggucuacuucgcgagcaccgagaaguccaacaucauccgcggcuggaucuucgggacgacccucgacagcaagacccagucccugcugaucgugaacaacgccaccaacguggucaucaaggugugcgaguuccaguucugcaacgaccccuuccucggcguguacuaccacaagaacaacaagagcuggauggaguccgaguuccgggucuacagcuccgccaacaacugcacguucgaguacgugagccagcccuuccugauggaccuggagggcaagcaggggaacuucaagaaccuccgcgaguucguguucaagaacaucgacggcuacuucaagaucuacuccaagcacaccccgaucaaccugguccgggaccugccccagggguucagcgcccucgagccccugguggaccugcccaucggcaucaacaucacccgcuuccagacccuccuggcccugcaccgguccuaccucacgccgggggacagcagcuccggcuggaccgcgggcgccgccgccuacuacgugggguaccugcagccccgcaccuuccugcucaaguacaacgagaacggcaccaucacggacgcggucgacugcgcccuggacccccugagcgagaccaagugcacccucaaguccuucaccguggagaaggggaucuaccagacgagcaacuuccgggugcagcccaccgaguccaucguccgcuucccgaacaucaccaaccugugccccuucggcgagguguucaacgccacccgguucgccagcgucuacgccuggaaccgcaagcggaucuccaacugcguggcggacuacagcgugcuguacaacuccgccagcuucuccacguucaagugcuacggcgucagccccaccaagcucaacgaccugugcuucaccaacguguacgccgacuccuucgugauccgcggggacgagguccggcagaucgcccccggccagaccgggaagaucgccgacuacaacuacaagcugccggacgacuucacgggcugcgugaucgcguggaacagcaacaaccucgacuccaaggucgggggcaacuacaacuaccuguaccgccuguuccgcaagagcaaccucaagcccuucgagcgggacaucuccaccgagaucuaccaggccggcagcacccccugcaacgggguggagggcuucaacugcuacuucccccugcaguccuacggguuccagccgaccaacggcgugggguaccagcccuaccggguggucgugcugagcuucgagcuccugcacgcccccgccacggugugcggccccaagaaguccaccaaccuggucaagaacaagugcgugaacuucaacuucaacggccucaccgggaccggcgugcugaccgagagcaacaagaaguuccugccguuccagcaguucgggcgcgacaucgccgacacgaccgacgcgguccgcgacccccagacccuggagauccucgacaucacccccugcagcuucggcgggguguccgugaucacgccgggcaccaacaccagcaaccaggucgccgugcuguaccagggcgugaacugcaccgagguccccguggccauccacgccgaccagcugacgcccaccuggcggguguacuccaccggcagcaacgucuuccagacccgcgccgggugccucaucggcgcggagcacgugaacaacuccuacgagugcgacauccccaucggggccggcaucugcgccagcuaccagacgcagaccaacuccccgcggcgcgcccggagcguggcgucccagagcaucaucgccuacaccaugucccugggcgccgagaacagcgucgccuacuccaacaacagcaucgccauccccaccaacuucacgaucuccgugaccaccgagauccugcccgugagcaugaccaagacgagcgucgacugcaccauguacaucugcggggacuccaccgagugcagcaaccuccugcugcaguacggcuccuucugcacccagcucaaccgcgcgcugacggggaucgccguggagcaggacaagaacacccaggagguguucgcccaggucaagcagaucuacaagacgcccccgaucaaggacuucggcggguucaacuucagccagauccugcccgaccccuccaagcccagcaagcgguccuucaucgaggaccuccuguucaacaaggugacccuggccgacgccggcuucaucaagcaguacggcgacugccucggggacaucgcggcccgcgaccugaucugcgcccagaaguucaacggccugaccgugcucccgccccugcugaccgacgagaugaucgcccaguacaccagcgcccuccuggcggggaccaucacguccggcuggaccuucggggccggcgccgcccugcagauccccuucgcgaugcagauggccuaccgguucaacggcaucggggucacccagaacgugcucuacgagaaccagaagcugaucgccaaccaguucaacagcgccaucggcaagauccaggacucccugagcuccaccgccagcgcgcucgggaagcugcaggacguggucaaccagaacgcccaggcccugaacacgcucgugaagcagcuguccagcaacuucggcgccaucuccagcgugcugaacgacauccucucccgccuggacaaggucgaggccgaggugcagaucgaccggcugaucaccgggcgccuccagagccugcagaccuacgugacccagcagcugauccgggcggccgagauccgcgccagcgccaaccucgccgcgaccaagauguccgagugcguccugggccagagcaagcggguggacuucugcggcaagggguaccaccugauguccuucccccagagcgccccgcacggcguggucuuccuccacgugacguacguccccgcccaggagaagaacuucaccaccgcccccgcgaucugccacgacgggaaggcccacuucccccgcgagggcguguucguguccaacgggacccacugguucgucacgcagcggaacuucuacgagccgcagaucaucaccaccgacaacaccuucgugagcggcaacugcgacguggucaucggcaucgugaacaacacgguguacgacccccugcagcccgagcuggacuccuucaaggaggagcucgacaaguacuucaagaaccacaccagccccgacgucgaccugggggacaucuccggcaucaacgccagcguggugaacauccagaaggagaucgaccgccugaacgaggucgccaagaaccucaacgagucccugaucgaccugcaggagcucgggaaguacgagcaguacaucaaguggccgugguacaucuggcugggcuucaucgccggccugaucgcgaucgugauggugaccaucaugcucugcugcaugaccagcugcugcuccugccugaaggggugcugcagcugcggcuccugcugcaaguucgacgaggacgacagcgagcccguccugaagggggugaagcuccacuacacgugaggacuagucccuguucccagagcccacuuuuuuuucuuuuuuugaaauaaaauagccugucuuucagaucucaaaggcucuuuucagagccaccaaaaaaaaaaaaaaaaaaaaaaaaaaaaaaaaaaaaaaaaaaaaaaaaaaaaaaaaaaaaaaaaaaaaaaaaaaaaaaaaaaaaaaaaaaaaaaaaaaaaa

SEQ ID NO: 22802 - RNA, 4088 nt, Artificial Sequence
  SARS-CoV-2/Wuhan/WIV05/2019__EPI_ISL_402128 spike protein mRNA gc (1-1273)(K986P_V987P_H69del_V70del_D614G) R10275
aggagagucccgcagucggcguccagcggcucugcuuguucgugugugugucguugcaggccuuauucaagcuuaccauguucguguuccugguccuccugccccuggugagcucccagugcgugaaccucaccacccgcacgcagcugccgcccgccuacaccaacagcuucacccggggcgucuacuaccccgacaagguguuccgcuccagcgugcugcacuccacccaggaccucuuccugcccuucuucagcaacgucacgugguuccacgccaucuccgggaccaacggcaccaagcgguucgacaacccggugcugcccuucaacgacggggucuacuucgcgagcaccgagaaguccaacaucauccgcggcuggaucuucgggacgacccucgacagcaagacccagucccugcugaucgugaacaacgccaccaacguggucaucaaggugugcgaguuccaguucugcaacgaccccuuccucggcguguacuaccacaagaacaacaagagcuggauggaguccgaguuccgggucuacagcuccgccaacaacugcacguucgaguacgugagccagcccuuccugauggaccuggagggcaagcaggggaacuucaagaaccuccgcgaguucguguucaagaacaucgacggcuacuucaagaucuacuccaagcacaccccgaucaaccugguccgggaccugccccagggguucagcgcccucgagccccugguggaccugcccaucggcaucaacaucacccgcuuccagacccuccuggcccugcaccgguccuaccucacgccgggggacagcagcuccggcuggaccgcgggcgccgccgccuacuacgugggguaccugcagccccgcaccuuccugcucaaguacaacgagaacggcaccaucacggacgcggucgacugcgcccuggacccccugagcgagaccaagugcacccucaaguccuucaccguggagaaggggaucuaccagacgagcaacuuccgggugcagcccaccgaguccaucguccgcuucccgaacaucaccaaccugugccccuucggcgagguguucaacgccacccgguucgccagcgucuacgccuggaaccgcaagcggaucuccaacugcguggcggacuacagcgugcuguacaacuccgccagcuucuccacguucaagugcuacggcgucagccccaccaagcucaacgaccugugcuucaccaacguguacgccgacuccuucgugauccgcggggacgagguccggcagaucgcccccggccagaccgggaagaucgccgacuacaacuacaagcugccggacgacuucacgggcugcgugaucgcguggaacagcaacaaccucgacuccaaggucgggggcaacuacaacuaccuguaccgccuguuccgcaagagcaaccucaagcccuucgagcgggacaucuccaccgagaucuaccaggccggcagcacccccugcaacgggguggagggcuucaacugcuacuucccccugcaguccuacggguuccagccgaccaacggcgugggguaccagcccuaccggguggucgugcugagcuucgagcuccugcacgcccccgccacggugugcggccccaagaaguccaccaaccuggucaagaacaagugcgugaacuucaacuucaacggccucaccgggaccggcgugcugaccgagagcaacaagaaguuccugccguuccagcaguucgggcgcgacaucgccgacacgaccgacgcgguccgcgacccccagacccuggagauccucgacaucacccccugcagcuucggcgggguguccgugaucacgccgggcaccaacaccagcaaccaggucgccgugcuguaccagggcgugaacugcaccgagguccccguggccauccacgccgaccagcugacgcccaccuggcggguguacuccaccggcagcaacgucuuccagacccgcgccgggugccucaucggcgcggagcacgugaacaacuccuacgagugcgacauccccaucggggccggcaucugcgccagcuaccagacgcagaccaacuccccgcggcgcgcccggagcguggcgucccagagcaucaucgccuacaccaugucccugggcgccgagaacagcgucgccuacuccaacaacagcaucgccauccccaccaacuucacgaucuccgugaccaccgagauccugcccgugagcaugaccaagacgagcgucgacugcaccauguacaucugcggggacuccaccgagugcagcaaccuccugcugcaguacggcuccuucugcacccagcucaaccgcgcgcugacggggaucgccguggagcaggacaagaacacccaggagguguucgcccaggucaagcagaucuacaagacgcccccgaucaaggacuucggcggguucaacuucagccagauccugcccgaccccuccaagcccagcaagcgguccuucaucgaggaccuccuguucaacaaggugacccuggccgacgccggcuucaucaagcaguacggcgacugccucggggacaucgcggcccgcgaccugaucugcgcccagaaguucaacggccugaccgugcucccgccccugcugaccgacgagaugaucgcccaguacaccagcgcccuccuggcggggaccaucacguccggcuggaccuucggggccggcgccgcccugcagauccccuucgcgaugcagauggccuaccgguucaacggcaucggggucacccagaacgugcucuacgagaaccagaagcugaucgccaaccaguucaacagcgccaucggcaagauccaggacucccugagcuccaccgccagcgcgcucgggaagcugcaggacguggucaaccagaacgcccaggcccugaacacgcucgugaagcagcuguccagcaacuucggcgccaucuccagcgugcugaacgacauccucucccgccuggacccgcccgaggccgaggugcagaucgaccggcugaucaccgggcgccuccagagccugcagaccuacgugacccagcagcugauccgggcggccgagauccgcgccagcgccaaccucgccgcgaccaagauguccgagugcguccugggccagagcaagcggguggacuucugcggcaagggguaccaccugauguccuucccccagagcgccccgcacggcguggucuuccuccacgugacguacguccccgcccaggagaagaacuucaccaccgcccccgcgaucugccacgacgggaaggcccacuucccccgcgagggcguguucguguccaacgggacccacugguucgucacgcagcggaacuucuacgagccgcagaucaucaccaccgacaacaccuucgugagcggcaacugcgacguggucaucggcaucgugaacaacacgguguacgacccccugcagcccgagcuggacuccuucaaggaggagcucgacaaguacuucaagaaccacaccagccccgacgucgaccugggggacaucuccggcaucaacgccagcguggugaacauccagaaggagaucgaccgccugaacgaggucgccaagaaccucaacgagucccugaucgaccugcaggagcucgggaaguacgagcaguacaucaaguggccgugguacaucuggcugggcuucaucgccggccugaucgcgaucgugauggugaccaucaugcucugcugcaugaccagcugcugcuccugccugaaggggugcugcagcugcggcuccugcugcaaguucgacgaggacgacagcgagcccguccugaagggggugaagcuccacuacacgugaggacuagucccuguucccagagcccacuuuuuuuucuuuuuuugaaauaaaauagccugucuuucagaucucaaaggcucuuuucagagccaccaaaaaaaaaaaaaaaaaaaaaaaaaaaaaaaaaaaaaaaaaaaaaaaaaaaaaaaaaaaaaaaaaaaaaaaaaaaaaaaaaaaaaaaaaaaaaaaaaaaaa

SEQ ID NO: 22803 - RNA, 4094 nt, Artificial Sequence
  SARS-CoV-2/Wuhan/WIV05/2019__EPI_ISL_402128 spike protein mRNA gc (1-1273)(Y453F_D614G) R10282
aggagagucccgcagucggcguccagcggcucugcuuguucgugugugugucguugcaggccuuauucaagcuuaccauguucguguuccugguccuccugccccuggugagcucccagugcgugaaccucaccacccgcacgcagcugccgcccgccuacaccaacagcuucacccggggcgucuacuaccccgacaagguguuccgcuccagcgugcugcacuccacccaggaccucuuccugcccuucuucagcaacgucacgugguuccacgccauccacguguccgggaccaacggcaccaagcgguucgacaacccggugcugcccuucaacgacggggucuacuucgcgagcaccgagaaguccaacaucauccgcggcuggaucuucgggacgacccucgacagcaagacccagucccugcugaucgugaacaacgccaccaacguggucaucaaggugugcgaguuccaguucugcaacgaccccuuccucggcguguacuaccacaagaacaacaagagcuggauggaguccgaguuccgggucuacagcuccgccaacaacugcacguucgaguacgugagccagcccuuccugauggaccuggagggcaagcaggggaacuucaagaaccuccgcgaguucguguucaagaacaucgacggcuacuucaagaucuacuccaagcacaccccgaucaaccugguccgggaccugccccagggguucagcgcccucgagccccugguggaccugcccaucggcaucaacaucacccgcuuccagacccuccuggcccugcaccgguccuaccucacgccgggggacagcagcuccggcuggaccgcgggcgccgccgccuacuacgugggguaccugcagccccgcaccuuccugcucaaguacaacgagaacggcaccaucacggacgcggucgacugcgcccuggacccccugagcgagaccaagugcacccucaaguccuucaccguggagaaggggaucuaccagacgagcaacuuccgggugcagcccaccgaguccaucguccgcuucccgaacaucaccaaccugugccccuucggcgagguguucaacgccacccgguucgccagcgucuacgccuggaaccgcaagcggaucuccaacugcguggcggacuacagcgugcuguacaacuccgccagcuucuccacguucaagugcuacggcgucagccccaccaagcucaacgaccugugcuucaccaacguguacgccgacuccuucgugauccgcggggacgagguccggcagaucgcccccggccagaccgggaagaucgccgacuacaacuacaagcugccggacgacuucacgggcugcgugaucgcguggaacagcaacaaccucgacuccaaggucgggggcaacuacaacuaccuguuccgccuguuccgcaagagcaaccucaagcccuucgagcgggacaucuccaccgagaucuaccaggccggcagcacccccugcaacgggguggagggcuucaacugcuacuucccccugcaguccuacggguuccagccgaccaacggcgugggguaccagcccuaccggguggucgugcugagcuucgagcuccugcacgcccccgccacggugugcggccccaagaaguccaccaaccuggucaagaacaagugcgugaacuucaacuucaacggccucaccgggaccggcgugcugaccgagagcaacaagaaguuccugccguuccagcaguucgggcgcgacaucgccgacacgaccgacgcgguccgcgacccccagacccuggagauccucgacaucacccccugcagcuucggcgggguguccgugaucacgccgggcaccaacaccagcaaccaggucgccgugcuguaccagggcgugaacugcaccgagguccccguggccauccacgccgaccagcugacgcccaccuggcggguguacuccaccggcagcaacgucuuccagacccgcgccgggugccucaucggcgcggagcacgugaacaacuccuacgagugcgacauccccaucggggccggcaucugcgccagcuaccagacgcagaccaacuccccgcggcgcgcccggagcguggcgucccagagcaucaucgccuacaccaugucccugggcgccgagaacagcgucgccuacuccaacaacagcaucgccauccccaccaacuucacgaucuccgugaccaccgagauccugcccgugagcaugaccaagacgagcgucgacugcaccauguacaucugcggggacuccaccgagugcagcaaccuccugcugcaguacggcuccuucugcacccagcucaaccgcgcgcugacggggaucgccguggagcaggacaagaacacccaggagguguucgcccaggucaagcagaucuacaagacgcccccgaucaaggacuucggcggguucaacuucagccagauccugcccgaccccuccaagcccagcaagcgguccuucaucgaggaccuccuguucaacaaggugacccuggccgacgccggcuucaucaagcaguacggcgacugccucggggacaucgcggcccgcgaccugaucugcgcccagaaguucaacggccugaccgugcucccgccccugcugaccgacgagaugaucgcccaguacaccagcgcccuccuggcggggaccaucacguccggcuggaccuucggggccggcgccgcccugcagauccccuucgcgaugcagauggccuaccgguucaacggcaucggggucacccagaacgugcucuacgagaaccagaagcugaucgccaaccaguucaacagcgccaucggcaagauccaggacucccugagcuccaccgccagcgcgcucgggaagcugcaggacguggucaaccagaacgcccaggcccugaacacgcucgugaagcagcuguccagcaacuucggcgccaucuccagcgugcugaacgacauccucucccgccuggacaaggucgaggccgaggugcagaucgaccggcugaucaccgggcgccuccagagccugcagaccuacgugacccagcagcugauccgggcggccgagauccgcgccagcgccaaccucgccgcgaccaagauguccgagugcguccugggccagagcaagcggguggacuucugcggcaagggguaccaccugauguccuucccccagagcgccccgcacggcguggucuuccuccacgugacguacguccccgcccaggagaagaacuucaccaccgcccccgcgaucugccacgacgggaaggcccacuucccccgcgagggcguguucguguccaacgggacccacugguucgucacgcagcggaacuucuacgagccgcagaucaucaccaccgacaacaccuucgugagcggcaacugcgacguggucaucggcaucgugaacaacacgguguacgacccccugcagcccgagcuggacuccuucaaggaggagcucgacaaguacuucaagaaccacaccagccccgacgucgaccugggggacaucuccggcaucaacgccagcguggugaacauccagaaggagaucgaccgccugaacgaggucgccaagaaccucaacgagucccugaucgaccugcaggagcucgggaaguacgagcaguacaucaaguggccgugguacaucuggcugggcuucaucgccggccugaucgcgaucgugauggugaccaucaugcucugcugcaugaccagcugcugcuccugccugaaggggugcugcagcugcggcuccugcugcaaguucgacgaggacgacagcgagcccguccugaagggggugaagcuccacuacacgugaggacuagucccuguucccagagcccacuuuuuuuucuuuuuuugaaauaaaauagccugucuuucagaucucaaaggcucuuuucagagccaccaaaaaaaaaaaaaaaaaaaaaaaaaaaaaaaaaaaaaaaaaaaaaaaaaaaaaaaaaaaaaaaaaaaaaaaaaaaaaaaaaaaaaaaaaaaaaaaaaaaaa

SEQ ID NO: 22804 - RNA, 4094 nt, Artificial Sequence
  SARS-CoV-2/Wuhan/WIV05/2019__EPI_ISL_402128 spike protein mRNA gc (1-1273)(K986P_V987P_Y453F_D614G) R10283
aggagagucccgcagucggcguccagcggcucugcuuguucgugugugugucguugcaggccuuauucaagcuuaccauguucguguuccugguccuccugccccuggugagcucccagugcgugaaccucaccacccgcacgcagcugccgcccgccuacaccaacagcuucacccggggcgucuacuaccccgacaagguguuccgcuccagcgugcugcacuccacccaggaccucuuccugcccuucuucagcaacgucacgugguuccacgccauccacguguccgggaccaacggcaccaagcgguucgacaacccggugcugcccuucaacgacggggucuacuucgcgagcaccgagaaguccaacaucauccgcggcuggaucuucgggacgacccucgacagcaagacccagucccugcugaucgugaacaacgccaccaacguggucaucaaggugugcgaguuccaguucugcaacgaccccuuccucggcguguacuaccacaagaacaacaagagcuggauggaguccgaguuccgggucuacagcuccgccaacaacugcacguucgaguacgugagccagcccuuccugauggaccuggagggcaagcaggggaacuucaagaaccuccgcgaguucguguucaagaacaucgacggcuacuucaagaucuacuccaagcacaccccgaucaaccugguccgggaccugccccagggguucagcgcccucgagccccugguggaccugcccaucggcaucaacaucacccgcuuccagacccuccuggcccugcaccgguccuaccucacgccgggggacagcagcuccggcuggaccgcgggcgccgccgccuacuacgugggguaccugcagccccgcaccuuccugcucaaguacaacgagaacggcaccaucacggacgcggucgacugcgcccuggacccccugagcgagaccaagugcacccucaaguccuucaccguggagaaggggaucuaccagacgagcaacuuccgggugcagcccaccgaguccaucguccgcuucccgaacaucaccaaccugugccccuucggcgagguguucaacgccacccgguucgccagcgucuacgccuggaaccgcaagcggaucuccaacugcguggcggacuacagcgugcuguacaacuccgccagcuucuccacguucaagugcuacggcgucagccccaccaagcucaacgaccugugcuucaccaacguguacgccgacuccuucgugauccgcggggacgagguccggcagaucgcccccggccagaccgggaagaucgccgacuacaacuacaagcugccggacgacuucacgggcugcgugaucgcguggaacagcaacaaccucgacuccaaggucgggggcaacuacaacuaccuguuccgccuguuccgcaagagcaaccucaagcccuucgagcgggacaucuccaccgagaucuaccaggccggcagcacccccugcaacgggguggagggcuucaacugcuacuucccccugcaguccuacggguuccagccgaccaacggcgugggguaccagcccuaccggguggucgugcugagcuucgagcuccugcacgcccccgccacggugugcggccccaagaaguccaccaaccuggucaagaacaagugcgugaacuucaacuucaacggccucaccgggaccggcgugcugaccgagagcaacaagaaguuccugccguuccagcaguucgggcgcgacaucgccgacacgaccgacgcgguccgcgacccccagacccuggagauccucgacaucacccccugcagcuucggcgggguguccgugaucacgccgggcaccaacaccagcaaccaggucgccgugcuguaccagggcgugaacugcaccgagguccccguggccauccacgccgaccagcugacgcccaccuggcggguguacuccaccggcagcaacgucuuccagacccgcgccgggugccucaucggcgcggagcacgugaacaacuccuacgagugcgacauccccaucggggccggcaucugcgccagcuaccagacgcagaccaacuccccgcggcgcgcccggagcguggcgucccagagcaucaucgccuacaccaugucccugggcgccgagaacagcgucgccuacuccaacaacagcaucgccauccccaccaacuucacgaucuccgugaccaccgagauccugcccgugagcaugaccaagacgagcgucgacugcaccauguacaucugcggggacuccaccgagugcagcaaccuccugcugcaguacggcuccuucugcacccagcucaaccgcgcgcugacggggaucgccguggagcaggacaagaacacccaggagguguucgcccaggucaagcagaucuacaagacgcccccgaucaaggacuucggcggguucaacuucagccagauccugcccgaccccuccaagcccagcaagcgguccuucaucgaggaccuccuguucaacaaggugacccuggccgacgccggcuucaucaagcaguacggcgacugccucggggacaucgcggcccgcgaccugaucugcgcccagaaguucaacggccugaccgugcucccgccccugcugaccgacgagaugaucgcccaguacaccagcgcccuccuggcggggaccaucacguccggcuggaccuucggggccggcgccgcccugcagauccccuucgcgaugcagauggccuaccgguucaacggcaucggggucacccagaacgugcucuacgagaaccagaagcugaucgccaaccaguucaacagcgccaucggcaagauccaggacucccugagcuccaccgccagcgcgcucgggaagcugcaggacguggucaaccagaacgcccaggcccugaacacgcucgugaagcagcuguccagcaacuucggcgccaucuccagcgugcugaacgacauccucucccgccuggacccgcccgaggccgaggugcagaucgaccggcugaucaccgggcgccuccagagccugcagaccuacgugacccagcagcugauccgggcggccgagauccgcgccagcgccaaccucgccgcgaccaagauguccgagugcguccugggccagagcaagcggguggacuucugcggcaagggguaccaccugauguccuucccccagagcgccccgcacggcguggucuuccuccacgugacguacguccccgcccaggagaagaacuucaccaccgcccccgcgaucugccacgacgggaaggcccacuucccccgcgagggcguguucguguccaacgggacccacugguucgucacgcagcggaacuucuacgagccgcagaucaucaccaccgacaacaccuucgugagcggcaacugcgacguggucaucggcaucgugaacaacacgguguacgacccccugcagcccgagcuggacuccuucaaggaggagcucgacaaguacuucaagaaccacaccagccccgacgucgaccugggggacaucuccggcaucaacgccagcguggugaacauccagaaggagaucgaccgccugaacgaggucgccaagaaccucaacgagucccugaucgaccugcaggagcucgggaaguacgagcaguacaucaaguggccgugguacaucuggcugggcuucaucgccggccugaucgcgaucgugauggugaccaucaugcucugcugcaugaccagcugcugcuccugccugaaggggugcugcagcugcggcuccugcugcaaguucgacgaggacgacagcgagcccguccugaagggggugaagcuccacuacacgugaggacuagucccuguucccagagcccacuuuuuuuucuuuuuuugaaauaaaauagccugucuuucagaucucaaaggcucuuuucagagccaccaaaaaaaaaaaaaaaaaaaaaaaaaaaaaaaaaaaaaaaaaaaaaaaaaaaaaaaaaaaaaaaaaaaaaaaaaaaaaaaaaaaaaaaaaaaaaaaaaaaaa

SEQ ID NO: 22805 - RNA, 4094 nt, Artificial Sequence
  SARS-CoV-2/Wuhan/WIV05/2019__EPI_ISL_402128 spike protein mRNA gc (1-1273)(D614G_I692V) R10290
aggagagucccgcagucggcguccagcggcucugcuuguucgugugugugucguugcaggccuuauucaagcuuaccauguucguguuccugguccuccugccccuggugagcucccagugcgugaaccucaccacccgcacgcagcugccgcccgccuacaccaacagcuucacccggggcgucuacuaccccgacaagguguuccgcuccagcgugcugcacuccacccaggaccucuuccugcccuucuucagcaacgucacgugguuccacgccauccacguguccgggaccaacggcaccaagcgguucgacaacccggugcugcccuucaacgacggggucuacuucgcgagcaccgagaaguccaacaucauccgcggcuggaucuucgggacgacccucgacagcaagacccagucccugcugaucgugaacaacgccaccaacguggucaucaaggugugcgaguuccaguucugcaacgaccccuuccucggcguguacuaccacaagaacaacaagagcuggauggaguccgaguuccgggucuacagcuccgccaacaacugcacguucgaguacgugagccagcccuuccugauggaccuggagggcaagcaggggaacuucaagaaccuccgcgaguucguguucaagaacaucgacggcuacuucaagaucuacuccaagcacaccccgaucaaccugguccgggaccugccccagggguucagcgcccucgagccccugguggaccugcccaucggcaucaacaucacccgcuuccagacccuccuggcccugcaccgguccuaccucacgccgggggacagcagcuccggcuggaccgcgggcgccgccgccuacuacgugggguaccugcagccccgcaccuuccugcucaaguacaacgagaacggcaccaucacggacgcggucgacugcgcccuggacccccugagcgagaccaagugcacccucaaguccuucaccguggagaaggggaucuaccagacgagcaacuuccgggugcagcccaccgaguccaucguccgcuucccgaacaucaccaaccugugccccuucggcgagguguucaacgccacccgguucgccagcgucuacgccuggaaccgcaagcggaucuccaacugcguggcggacuacagcgugcuguacaacuccgccagcuucuccacguucaagugcuacggcgucagccccaccaagcucaacgaccugugcuucaccaacguguacgccgacuccuucgugauccgcggggacgagguccggcagaucgcccccggccagaccgggaagaucgccgacuacaacuacaagcugccggacgacuucacgggcugcgugaucgcguggaacagcaacaaccucgacuccaaggucgggggcaacuacaacuaccuguaccgccuguuccgcaagagcaaccucaagcccuucgagcgggacaucuccaccgagaucuaccaggccggcagcacccccugcaacgggguggagggcuucaacugcuacuucccccugcaguccuacggguuccagccgaccaacggcgugggguaccagcccuaccggguggucgugcugagcuucgagcuccugcacgcccccgccacggugugcggccccaagaaguccaccaaccuggucaagaacaagugcgugaacuucaacuucaacggccucaccgggaccggcgugcugaccgagagcaacaagaaguuccugccguuccagcaguucgggcgcgacaucgccgacacgaccgacgcgguccgcgacccccagacccuggagauccucgacaucacccccugcagcuucggcgggguguccgugaucacgccgggcaccaacaccagcaaccaggucgccgugcuguaccagggcgugaacugcaccgagguccccguggccauccacgccgaccagcugacgcccaccuggcggguguacuccaccggcagcaacgucuuccagacccgcgccgggugccucaucggcgcggagcacgugaacaacuccuacgagugcgacauccccaucggggccggcaucugcgccagcuaccagacgcagaccaacuccccgcggcgcgcccggagcguggcgucccagagcgucaucgccuacaccaugucccugggcgccgagaacagcgucgccuacuccaacaacagcaucgccauccccaccaacuucacgaucuccgugaccaccgagauccugcccgugagcaugaccaagacgagcgucgacugcaccauguacaucugcggggacuccaccgagugcagcaaccuccugcugcaguacggcuccuucugcacccagcucaaccgcgcgcugacggggaucgccguggagcaggacaagaacacccaggagguguucgcccaggucaagcagaucuacaagacgcccccgaucaaggacuucggcggguucaacuucagccagauccugcccgaccccuccaagcccagcaagcgguccuucaucgaggaccuccuguucaacaaggugacccuggccgacgccggcuucaucaagcaguacggcgacugccucggggacaucgcggcccgcgaccugaucugcgcccagaaguucaacggccugaccgugcucccgccccugcugaccgacgagaugaucgcccaguacaccagcgcccuccuggcggggaccaucacguccggcuggaccuucggggccggcgccgcccugcagauccccuucgcgaugcagauggccuaccgguucaacggcaucggggucacccagaacgugcucuacgagaaccagaagcugaucgccaaccaguucaacagcgccaucggcaagauccaggacucccugagcuccaccgccagcgcgcucgggaagcugcaggacguggucaaccagaacgcccaggcccugaacacgcucgugaagcagcuguccagcaacuucggcgccaucuccagcgugcugaacgacauccucucccgccuggacaaggucgaggccgaggugcagaucgaccggcugaucaccgggcgccuccagagccugcagaccuacgugacccagcagcugauccgggcggccgagauccgcgccagcgccaaccucgccgcgaccaagauguccgagugcguccugggccagagcaagcggguggacuucugcggcaagggguaccaccugauguccuucccccagagcgccccgcacggcguggucuuccuccacgugacguacguccccgcccaggagaagaacuucaccaccgcccccgcgaucugccacgacgggaaggcccacuucccccgcgagggcguguucguguccaacgggacccacugguucgucacgcagcggaacuucuacgagccgcagaucaucaccaccgacaacaccuucgugagcggcaacugcgacguggucaucggcaucgugaacaacacgguguacgacccccugcagcccgagcuggacuccuucaaggaggagcucgacaaguacuucaagaaccacaccagccccgacgucgaccugggggacaucuccggcaucaacgccagcguggugaacauccagaaggagaucgaccgccugaacgaggucgccaagaaccucaacgagucccugaucgaccugcaggagcucgggaaguacgagcaguacaucaaguggccgugguacaucuggcugggcuucaucgccggccugaucgcgaucgugauggugaccaucaugcucugcugcaugaccagcugcugcuccugccugaaggggugcugcagcugcggcuccugcugcaaguucgacgaggacgacagcgagcccguccugaagggggugaagcuccacuacacgugaggacuagucccuguucccagagcccacuuuuuuuucuuuuuuugaaauaaaauagccugucuuucagaucucaaaggcucuuuucagagccaccaaaaaaaaaaaaaaaaaaaaaaaaaaaaaaaaaaaaaaaaaaaaaaaaaaaaaaaaaaaaaaaaaaaaaaaaaaaaaaaaaaaaaaaaaaaaaaaaaaaaa

SEQ ID NO: 22806 - RNA, 4094 nt, Artificial Sequence
  SARS-CoV-2/Wuhan/WIV05/2019__EPI_ISL_402128 spike protein mRNA gc (1-1273)(K986P_V987P_D614G_I692V) R10291
aggagagucccgcagucggcguccagcggcucugcuuguucgugugugugucguugcaggccuuauucaagcuuaccauguucguguuccugguccuccugccccuggugagcucccagugcgugaaccucaccacccgcacgcagcugccgcccgccuacaccaacagcuucacccggggcgucuacuaccccgacaagguguuccgcuccagcgugcugcacuccacccaggaccucuuccugcccuucuucagcaacgucacgugguuccacgccauccacguguccgggaccaacggcaccaagcgguucgacaacccggugcugcccuucaacgacggggucuacuucgcgagcaccgagaaguccaacaucauccgcggcuggaucuucgggacgacccucgacagcaagacccagucccugcugaucgugaacaacgccaccaacguggucaucaaggugugcgaguuccaguucugcaacgaccccuuccucggcguguacuaccacaagaacaacaagagcuggauggaguccgaguuccgggucuacagcuccgccaacaacugcacguucgaguacgugagccagcccuuccugauggaccuggagggcaagcaggggaacuucaagaaccuccgcgaguucguguucaagaacaucgacggcuacuucaagaucuacuccaagcacaccccgaucaaccugguccgggaccugccccagggguucagcgcccucgagccccugguggaccugcccaucggcaucaacaucacccgcuuccagacccuccuggcccugcaccgguccuaccucacgccgggggacagcagcuccggcuggaccgcgggcgccgccgccuacuacgugggguaccugcagccccgcaccuuccugcucaaguacaacgagaacggcaccaucacggacgcggucgacugcgcccuggacccccugagcgagaccaagugcacccucaaguccuucaccguggagaaggggaucuaccagacgagcaacuuccgggugcagcccaccgaguccaucguccgcuucccgaacaucaccaaccugugccccuucggcgagguguucaacgccacccgguucgccagcgucuacgccuggaaccgcaagcggaucuccaacugcguggcggacuacagcgugcuguacaacuccgccagcuucuccacguucaagugcuacggcgucagccccaccaagcucaacgaccugugcuucaccaacguguacgccgacuccuucgugauccgcggggacgagguccggcagaucgcccccggccagaccgggaagaucgccgacuacaacuacaagcugccggacgacuucacgggcugcgugaucgcguggaacagcaacaaccucgacuccaaggucgggggcaacuacaacuaccuguaccgccuguuccgcaagagcaaccucaagcccuucgagcgggacaucuccaccgagaucuaccaggccggcagcacccccugcaacgggguggagggcuucaacugcuacuucccccugcaguccuacggguuccagccgaccaacggcgugggguaccagcccuaccggguggucgugcugagcuucgagcuccugcacgcccccgccacggugugcggccccaagaaguccaccaaccuggucaagaacaagugcgugaacuucaacuucaacggccucaccgggaccggcgugcugaccgagagcaacaagaaguuccugccguuccagcaguucgggcgcgacaucgccgacacgaccgacgcgguccgcgacccccagacccuggagauccucgacaucacccccugcagcuucggcgggguguccgugaucacgccgggcaccaacaccagcaaccaggucgccgugcuguaccagggcgugaacugcaccgagguccccguggccauccacgccgaccagcugacgcccaccuggcggguguacuccaccggcagcaacgucuuccagacccgcgccgggugccucaucggcgcggagcacgugaacaacuccuacgagugcgacauccccaucggggccggcaucugcgccagcuaccagacgcagaccaacuccccgcggcgcgcccggagcguggcgucccagagcgucaucgccuacaccaugucccugggcgccgagaacagcgucgccuacuccaacaacagcaucgccauccccaccaacuucacgaucuccgugaccaccgagauccugcccgugagcaugaccaagacgagcgucgacugcaccauguacaucugcggggacuccaccgagugcagcaaccuccugcugcaguacggcuccuucugcacccagcucaaccgcgcgcugacggggaucgccguggagcaggacaagaacacccaggagguguucgcccaggucaagcagaucuacaagacgcccccgaucaaggacuucggcggguucaacuucagccagauccugcccgaccccuccaagcccagcaagcgguccuucaucgaggaccuccuguucaacaaggugacccuggccgacgccggcuucaucaagcaguacggcgacugccucggggacaucgcggcccgcgaccugaucugcgcccagaaguucaacggccugaccgugcucccgccccugcugaccgacgagaugaucgcccaguacaccagcgcccuccuggcggggaccaucacguccggcuggaccuucggggccggcgccgcccugcagauccccuucgcgaugcagauggccuaccgguucaacggcaucggggucacccagaacgugcucuacgagaaccagaagcugaucgccaaccaguucaacagcgccaucggcaagauccaggacucccugagcuccaccgccagcgcgcucgggaagcugcaggacguggucaaccagaacgcccaggcccugaacacgcucgugaagcagcuguccagcaacuucggcgccaucuccagcgugcugaacgacauccucucccgccuggacccgcccgaggccgaggugcagaucgaccggcugaucaccgggcgccuccagagccugcagaccuacgugacccagcagcugauccgggcggccgagauccgcgccagcgccaaccucgccgcgaccaagauguccgagugcguccugggccagagcaagcggguggacuucugcggcaagggguaccaccugauguccuucccccagagcgccccgcacggcguggucuuccuccacgugacguacguccccgcccaggagaagaacuucaccaccgcccccgcgaucugccacgacgggaaggcccacuucccccgcgagggcguguucguguccaacgggacccacugguucgucacgcagcggaacuucuacgagccgcagaucaucaccaccgacaacaccuucgugagcggcaacugcgacguggucaucggcaucgugaacaacacgguguacgacccccugcagcccgagcuggacuccuucaaggaggagcucgacaaguacuucaagaaccacaccagccccgacgucgaccugggggacaucuccggcaucaacgccagcguggugaacauccagaaggagaucgaccgccugaacgaggucgccaagaaccucaacgagucccugaucgaccugcaggagcucgggaaguacgagcaguacaucaaguggccgugguacaucuggcugggcuucaucgccggccugaucgcgaucgugauggugaccaucaugcucugcugcaugaccagcugcugcuccugccugaaggggugcugcagcugcggcuccugcugcaaguucgacgaggacgacagcgagcccguccugaagggggugaagcuccacuacacgugaggacuagucccuguucccagagcccacuuuuuuuucuuuuuuugaaauaaaauagccugucuuucagaucucaaaggcucuuuucagagccaccaaaaaaaaaaaaaaaaaaaaaaaaaaaaaaaaaaaaaaaaaaaaaaaaaaaaaaaaaaaaaaaaaaaaaaaaaaaaaaaaaaaaaaaaaaaaaaaaaaaaa

SEQ ID NO: 22807 - RNA, 4094 nt, Artificial Sequence
  SARS-CoV-2/Wuhan/WIV05/2019__EPI_ISL_402128 spike protein mRNA gc (1-1273)(D614G_M1229I)
aggagagucccgcagucggcguccagcggcucugcuuguucgugugugugucguugcaggccuuauucaagcuuaccauguucguguuccugguccuccugccccuggugagcucccagugcgugaaccucaccacccgcacgcagcugccgcccgccuacaccaacagcuucacccggggcgucuacuaccccgacaagguguuccgcuccagcgugcugcacuccacccaggaccucuuccugcccuucuucagcaacgucacgugguuccacgccauccacguguccgggaccaacggcaccaagcgguucgacaacccggugcugcccuucaacgacggggucuacuucgcgagcaccgagaaguccaacaucauccgcggcuggaucuucgggacgacccucgacagcaagacccagucccugcugaucgugaacaacgccaccaacguggucaucaaggugugcgaguuccaguucugcaacgaccccuuccucggcguguacuaccacaagaacaacaagagcuggauggaguccgaguuccgggucuacagcuccgccaacaacugcacguucgaguacgugagccagcccuuccugauggaccuggagggcaagcaggggaacuucaagaaccuccgcgaguucguguucaagaacaucgacggcuacuucaagaucuacuccaagcacaccccgaucaaccugguccgggaccugccccagggguucagcgcccucgagccccugguggaccugcccaucggcaucaacaucacccgcuuccagacccuccuggcccugcaccgguccuaccucacgccgggggacagcagcuccggcuggaccgcgggcgccgccgccuacuacgugggguaccugcagccccgcaccuuccugcucaaguacaacgagaacggcaccaucacggacgcggucgacugcgcccuggacccccugagcgagaccaagugcacccucaaguccuucaccguggagaaggggaucuaccagacgagcaacuuccgggugcagcccaccgaguccaucguccgcuucccgaacaucaccaaccugugccccuucggcgagguguucaacgccacccgguucgccagcgucuacgccuggaaccgcaagcggaucuccaacugcguggcggacuacagcgugcuguacaacuccgccagcuucuccacguucaagugcuacggcgucagccccaccaagcucaacgaccugugcuucaccaacguguacgccgacuccuucgugauccgcggggacgagguccggcagaucgcccccggccagaccgggaagaucgccgacuacaacuacaagcugccggacgacuucacgggcugcgugaucgcguggaacagcaacaaccucgacuccaaggucgggggcaacuacaacuaccuguaccgccuguuccgcaagagcaaccucaagcccuucgagcgggacaucuccaccgagaucuaccaggccggcagcacccccugcaacgggguggagggcuucaacugcuacuucccccugcaguccuacggguuccagccgaccaacggcgugggguaccagcccuaccggguggucgugcugagcuucgagcuccugcacgcccccgccacggugugcggccccaagaaguccaccaaccuggucaagaacaagugcgugaacuucaacuucaacggccucaccgggaccggcgugcugaccgagagcaacaagaaguuccugccguuccagcaguucgggcgcgacaucgccgacacgaccgacgcgguccgcgacccccagacccuggagauccucgacaucacccccugcagcuucggcgggguguccgugaucacgccgggcaccaacaccagcaaccaggucgccgugcuguaccagggcgugaacugcaccgagguccccguggccauccacgccgaccagcugacgcccaccuggcggguguacuccaccggcagcaacgucuuccagacccgcgccgggugccucaucggcgcggagcacgugaacaacuccuacgagugcgacauccccaucggggccggcaucugcgccagcuaccagacgcagaccaacuccccgcggcgcgcccggagcguggcgucccagagcaucaucgccuacaccaugucccugggcgccgagaacagcgucgccuacuccaacaacagcaucgccauccccaccaacuucacgaucuccgugaccaccgagauccugcccgugagcaugaccaagacgagcgucgacugcaccauguacaucugcggggacuccaccgagugcagcaaccuccugcugcaguacggcuccuucugcacccagcucaaccgcgcgcugacggggaucgccguggagcaggacaagaacacccaggagguguucgcccaggucaagcagaucuacaagacgcccccgaucaaggacuucggcggguucaacuucagccagauccugcccgaccccuccaagcccagcaagcgguccuucaucgaggaccuccuguucaacaaggugacccuggccgacgccggcuucaucaagcaguacggcgacugccucggggacaucgcggcccgcgaccugaucugcgcccagaaguucaacggccugaccgugcucccgccccugcugaccgacgagaugaucgcccaguacaccagcgcccuccuggcggggaccaucacguccggcuggaccuucggggccggcgccgcccugcagauccccuucgcgaugcagauggccuaccgguucaacggcaucggggucacccagaacgugcucuacgagaaccagaagcugaucgccaaccaguucaacagcgccaucggcaagauccaggacucccugagcuccaccgccagcgcgcucgggaagcugcaggacguggucaaccagaacgcccaggcccugaacacgcucgugaagcagcuguccagcaacuucggcgccaucuccagcgugcugaacgacauccucucccgccuggacaaggucgaggccgaggugcagaucgaccggcugaucaccgggcgccuccagagccugcagaccuacgugacccagcagcugauccgggcggccgagauccgcgccagcgccaaccucgccgcgaccaagauguccgagugcguccugggccagagcaagcggguggacuucugcggcaagggguaccaccugauguccuucccccagagcgccccgcacggcguggucuuccuccacgugacguacguccccgcccaggagaagaacuucaccaccgcccccgcgaucugccacgacgggaaggcccacuucccccgcgagggcguguucguguccaacgggacccacugguucgucacgcagcggaacuucuacgagccgcagaucaucaccaccgacaacaccuucgugagcggcaacugcgacguggucaucggcaucgugaacaacacgguguacgacccccugcagcccgagcuggacuccuucaaggaggagcucgacaaguacuucaagaaccacaccagccccgacgucgaccugggggacaucuccggcaucaacgccagcguggugaacauccagaaggagaucgaccgccugaacgaggucgccaagaaccucaacgagucccugaucgaccugcaggagcucgggaaguacgagcaguacaucaaguggccgugguacaucuggcugggcuucaucgccggccugaucgcgaucgugaucgugaccaucaugcucugcugcaugaccagcugcugcuccugccugaaggggugcugcagcugcggcuccugcugcaaguucgacgaggacgacagcgagcccguccugaagggggugaagcuccacuacacgugaggacuagucccuguucccagagcccacuuuuuuuucuuuuuuugaaauaaaauagccugucuuucagaucucaaaggcucuuuucagagccaccaaaaaaaaaaaaaaaaaaaaaaaaaaaaaaaaaaaaaaaaaaaaaaaaaaaaaaaaaaaaaaaaaaaaaaaaaaaaaaaaaaaaaaaaaaaaaaaaaaaaa

SEQ ID NO: 22808 - RNA, 4094 nt, Artificial Sequence
  SARS-CoV-2/Wuhan/WIV05/2019__EPI_ISL_402128 spike protein mRNA gc (1-1273)(K986P_V987P_D614G_M1229I)
aggagagucccgcagucggcguccagcggcucugcuuguucgugugugugucguugcaggccuuauucaagcuuaccauguucguguuccugguccuccugccccuggugagcucccagugcgugaaccucaccacccgcacgcagcugccgcccgccuacaccaacagcuucacccggggcgucuacuaccccgacaagguguuccgcuccagcgugcugcacuccacccaggaccucuuccugcccuucuucagcaacgucacgugguuccacgccauccacguguccgggaccaacggcaccaagcgguucgacaacccggugcugcccuucaacgacggggucuacuucgcgagcaccgagaaguccaacaucauccgcggcuggaucuucgggacgacccucgacagcaagacccagucccugcugaucgugaacaacgccaccaacguggucaucaaggugugcgaguuccaguucugcaacgaccccuuccucggcguguacuaccacaagaacaacaagagcuggauggaguccgaguuccgggucuacagcuccgccaacaacugcacguucgaguacgugagccagcccuuccugauggaccuggagggcaagcaggggaacuucaagaaccuccgcgaguucguguucaagaacaucgacggcuacuucaagaucuacuccaagcacaccccgaucaaccugguccgggaccugccccagggguucagcgcccucgagccccugguggaccugcccaucggcaucaacaucacccgcuuccagacccuccuggcccugcaccgguccuaccucacgccgggggacagcagcuccggcuggaccgcgggcgccgccgccuacuacgugggguaccugcagccccgcaccuuccugcucaaguacaacgagaacggcaccaucacggacgcggucgacugcgcccuggacccccugagcgagaccaagugcacccucaaguccuucaccguggagaaggggaucuaccagacgagcaacuuccgggugcagcccaccgaguccaucguccgcuucccgaacaucaccaaccugugccccuucggcgagguguucaacgccacccgguucgccagcgucuacgccuggaaccgcaagcggaucuccaacugcguggcggacuacagcgugcuguacaacuccgccagcuucuccacguucaagugcuacggcgucagccccaccaagcucaacgaccugugcuucaccaacguguacgccgacuccuucgugauccgcggggacgagguccggcagaucgcccccggccagaccgggaagaucgccgacuacaacuacaagcugccggacgacuucacgggcugcgugaucgcguggaacagcaacaaccucgacuccaaggucgggggcaacuacaacuaccuguaccgccuguuccgcaagagcaaccucaagcccuucgagcgggacaucuccaccgagaucuaccaggccggcagcacccccugcaacgggguggagggcuucaacugcuacuucccccugcaguccuacggguuccagccgaccaacggcgugggguaccagcccuaccggguggucgugcugagcuucgagcuccugcacgcccccgccacggugugcggccccaagaaguccaccaaccuggucaagaacaagugcgugaacuucaacuucaacggccucaccgggaccggcgugcugaccgagagcaacaagaaguuccugccguuccagcaguucgggcgcgacaucgccgacacgaccgacgcgguccgcgacccccagacccuggagauccucgacaucacccccugcagcuucggcgggguguccgugaucacgccgggcaccaacaccagcaaccaggucgccgugcuguaccagggcgugaacugcaccgagguccccguggccauccacgccgaccagcugacgcccaccuggcggguguacuccaccggcagcaacgucuuccagacccgcgccgggugccucaucggcgcggagcacgugaacaacuccuacgagugcgacauccccaucggggccggcaucugcgccagcuaccagacgcagaccaacuccccgcggcgcgcccggagcguggcgucccagagcaucaucgccuacaccaugucccugggcgccgagaacagcgucgccuacuccaacaacagcaucgccauccccaccaacuucacgaucuccgugaccaccgagauccugcccgugagcaugaccaagacgagcgucgacugcaccauguacaucugcggggacuccaccgagugcagcaaccuccugcugcaguacggcuccuucugcacccagcucaaccgcgcgcugacggggaucgccguggagcaggacaagaacacccaggagguguucgcccaggucaagcagaucuacaagacgcccccgaucaaggacuucggcggguucaacuucagccagauccugcccgaccccuccaagcccagcaagcgguccuucaucgaggaccuccuguucaacaaggugacccuggccgacgccggcuucaucaagcaguacggcgacugccucggggacaucgcggcccgcgaccugaucugcgcccagaaguucaacggccugaccgugcucccgccccugcugaccgacgagaugaucgcccaguacaccagcgcccuccuggcggggaccaucacguccggcuggaccuucggggccggcgccgcccugcagauccccuucgcgaugcagauggccuaccgguucaacggcaucggggucacccagaacgugcucuacgagaaccagaagcugaucgccaaccaguucaacagcgccaucggcaagauccaggacucccugagcuccaccgccagcgcgcucgggaagcugcaggacguggucaaccagaacgcccaggcccugaacacgcucgugaagcagcuguccagcaacuucggcgccaucuccagcgugcugaacgacauccucucccgccuggacccgcccgaggccgaggugcagaucgaccggcugaucaccgggcgccuccagagccugcagaccuacgugacccagcagcugauccgggcggccgagauccgcgccagcgccaaccucgccgcgaccaagauguccgagugcguccugggccagagcaagcggguggacuucugcggcaagggguaccaccugauguccuucccccagagcgccccgcacggcguggucuuccuccacgugacguacguccccgcccaggagaagaacuucaccaccgcccccgcgaucugccacgacgggaaggcccacuucccccgcgagggcguguucguguccaacgggacccacugguucgucacgcagcggaacuucuacgagccgcagaucaucaccaccgacaacaccuucgugagcggcaacugcgacguggucaucggcaucgugaacaacacgguguacgacccccugcagcccgagcuggacuccuucaaggaggagcucgacaaguacuucaagaaccacaccagccccgacgucgaccugggggacaucuccggcaucaacgccagcguggugaacauccagaaggagaucgaccgccugaacgaggucgccaagaaccucaacgagucccugaucgaccugcaggagcucgggaaguacgagcaguacaucaaguggccgugguacaucuggcugggcuucaucgccggccugaucgcgaucgugaucgugaccaucaugcucugcugcaugaccagcugcugcuccugccugaaggggugcugcagcugcggcuccugcugcaaguucgacgaggacgacagcgagcccguccugaagggggugaagcuccacuacacgugaggacuagucccuguucccagagcccacuuuuuuuucuuuuuuugaaauaaaauagccugucuuucagaucucaaaggcucuuuucagagccaccaaaaaaaaaaaaaaaaaaaaaaaaaaaaaaaaaaaaaaaaaaaaaaaaaaaaaaaaaaaaaaaaaaaaaaaaaaaaaaaaaaaaaaaaaaaaaaaaaaaaa

SEQ ID NO: 22809 - RNA, 4088 nt, Artificial Sequence
  SARS-CoV-2/Wuhan/WIV05/2019__EPI_ISL_402128 spike protein mRNA gc (1-1273)(H69del_V70del_A222V_Y453F_S477N_D614G_I692V) R10294
aggagagucccgcagucggcguccagcggcucugcuuguucgugugugugucguugcaggccuuauucaagcuuaccauguucguguuccugguccuccugccccuggugagcucccagugcgugaaccucaccacccgcacgcagcugccgcccgccuacaccaacagcuucacccggggcgucuacuaccccgacaagguguuccgcuccagcgugcugcacuccacccaggaccucuuccugcccuucuucagcaacgucacgugguuccacgccaucuccgggaccaacggcaccaagcgguucgacaacccggugcugcccuucaacgacggggucuacuucgcgagcaccgagaaguccaacaucauccgcggcuggaucuucgggacgacccucgacagcaagacccagucccugcugaucgugaacaacgccaccaacguggucaucaaggugugcgaguuccaguucugcaacgaccccuuccucggcguguacuaccacaagaacaacaagagcuggauggaguccgaguuccgggucuacagcuccgccaacaacugcacguucgaguacgugagccagcccuuccugauggaccuggagggcaagcaggggaacuucaagaaccuccgcgaguucguguucaagaacaucgacggcuacuucaagaucuacuccaagcacaccccgaucaaccugguccgggaccugccccagggguucagcguccucgagccccugguggaccugcccaucggcaucaacaucacccgcuuccagacccuccuggcccugcaccgguccuaccucacgccgggggacagcagcuccggcuggaccgcgggcgccgccgccuacuacgugggguaccugcagccccgcaccuuccugcucaaguacaacgagaacggcaccaucacggacgcggucgacugcgcccuggacccccugagcgagaccaagugcacccucaaguccuucaccguggagaaggggaucuaccagacgagcaacuuccgggugcagcccaccgaguccaucguccgcuucccgaacaucaccaaccugugccccuucggcgagguguucaacgccacccgguucgccagcgucuacgccuggaaccgcaagcggaucuccaacugcguggcggacuacagcgugcuguacaacuccgccagcuucuccacguucaagugcuacggcgucagccccaccaagcucaacgaccugugcuucaccaacguguacgccgacuccuucgugauccgcggggacgagguccggcagaucgcccccggccagaccgggaagaucgccgacuacaacuacaagcugccggacgacuucacgggcugcgugaucgcguggaacagcaacaaccucgacuccaaggucgggggcaacuacaacuaccuguuccgccuguuccgcaagagcaaccucaagcccuucgagcgggacaucuccaccgagaucuaccaggccggcaacacccccugcaacgggguggagggcuucaacugcuacuucccccugcaguccuacggguuccagccgaccaacggcgugggguaccagcccuaccggguggucgugcugagcuucgagcuccugcacgcccccgccacggugugcggccccaagaaguccaccaaccuggucaagaacaagugcgugaacuucaacuucaacggccucaccgggaccggcgugcugaccgagagcaacaagaaguuccugccguuccagcaguucgggcgcgacaucgccgacacgaccgacgcgguccgcgacccccagacccuggagauccucgacaucacccccugcagcuucggcgggguguccgugaucacgccgggcaccaacaccagcaaccaggucgccgugcuguaccagggcgugaacugcaccgagguccccguggccauccacgccgaccagcugacgcccaccuggcggguguacuccaccggcagcaacgucuuccagacccgcgccgggugccucaucggcgcggagcacgugaacaacuccuacgagugcgacauccccaucggggccggcaucugcgccagcuaccagacgcagaccaacuccccgcggcgcgcccggagcguggcgucccagagcgucaucgccuacaccaugucccugggcgccgagaacagcgucgccuacuccaacaacagcaucgccauccccaccaacuucacgaucuccgugaccaccgagauccugcccgugagcaugaccaagacgagcgucgacugcaccauguacaucugcggggacuccaccgagugcagcaaccuccugcugcaguacggcuccuucugcacccagcucaaccgcgcgcugacggggaucgccguggagcaggacaagaacacccaggagguguucgcccaggucaagcagaucuacaagacgcccccgaucaaggacuucggcggguucaacuucagccagauccugcccgaccccuccaagcccagcaagcgguccuucaucgaggaccuccuguucaacaaggugacccuggccgacgccggcuucaucaagcaguacggcgacugccucggggacaucgcggcccgcgaccugaucugcgcccagaaguucaacggccugaccgugcucccgccccugcugaccgacgagaugaucgcccaguacaccagcgcccuccuggcggggaccaucacguccggcuggaccuucggggccggcgccgcccugcagauccccuucgcgaugcagauggccuaccgguucaacggcaucggggucacccagaacgugcucuacgagaaccagaagcugaucgccaaccaguucaacagcgccaucggcaagauccaggacucccugagcuccaccgccagcgcgcucgggaagcugcaggacguggucaaccagaacgcccaggcccugaacacgcucgugaagcagcuguccagcaacuucggcgccaucuccagcgugcugaacgacauccucucccgccuggacaaggucgaggccgaggugcagaucgaccggcugaucaccgggcgccuccagagccugcagaccuacgugacccagcagcugauccgggcggccgagauccgcgccagcgccaaccucgccgcgaccaagauguccgagugcguccugggccagagcaagcggguggacuucugcggcaagggguaccaccugauguccuucccccagagcgccccgcacggcguggucuuccuccacgugacguacguccccgcccaggagaagaacuucaccaccgcccccgcgaucugccacgacgggaaggcccacuucccccgcgagggcguguucguguccaacgggacccacugguucgucacgcagcggaacuucuacgagccgcagaucaucaccaccgacaacaccuucgugagcggcaacugcgacguggucaucggcaucgugaacaacacgguguacgacccccugcagcccgagcuggacuccuucaaggaggagcucgacaaguacuucaagaaccacaccagccccgacgucgaccugggggacaucuccggcaucaacgccagcguggugaacauccagaaggagaucgaccgccugaacgaggucgccaagaaccucaacgagucccugaucgaccugcaggagcucgggaaguacgagcaguacaucaaguggccgugguacaucuggcugggcuucaucgccggccugaucgcgaucgugauggugaccaucaugcucugcugcaugaccagcugcugcuccugccugaaggggugcugcagcugcggcuccugcugcaaguucgacgaggacgacagcgagcccguccugaagggggugaagcuccacuacacgugaggacuagucccuguucccagagcccacuuuuuuuucuuuuuuugaaauaaaauagccugucuuucagaucucaaaggcucuuuucagagccaccaaaaaaaaaaaaaaaaaaaaaaaaaaaaaaaaaaaaaaaaaaaaaaaaaaaaaaaaaaaaaaaaaaaaaaaaaaaaaaaaaaaaaaaaaaaaaaaaaaaaa

SEQ ID NO: 22810 - RNA, 4088 nt, Artificial Sequence
  SARS-CoV-2/Wuhan/WIV05/2019__EPI_ISL_402128 spike protein mRNA gc (1-1273)(K986P_V987P_H69del_V70del_A222V_Y453F_S477N_D614G_I692V) R10295
aggagagucccgcagucggcguccagcggcucugcuuguucgugugugugucguugcaggccuuauucaagcuuaccauguucguguuccugguccuccugccccuggugagcucccagugcgugaaccucaccacccgcacgcagcugccgcccgccuacaccaacagcuucacccggggcgucuacuaccccgacaagguguuccgcuccagcgugcugcacuccacccaggaccucuuccugcccuucuucagcaacgucacgugguuccacgccaucuccgggaccaacggcaccaagcgguucgacaacccggugcugcccuucaacgacggggucuacuucgcgagcaccgagaaguccaacaucauccgcggcuggaucuucgggacgacccucgacagcaagacccagucccugcugaucgugaacaacgccaccaacguggucaucaaggugugcgaguuccaguucugcaacgaccccuuccucggcguguacuaccacaagaacaacaagagcuggauggaguccgaguuccgggucuacagcuccgccaacaacugcacguucgaguacgugagccagcccuuccugauggaccuggagggcaagcaggggaacuucaagaaccuccgcgaguucguguucaagaacaucgacggcuacuucaagaucuacuccaagcacaccccgaucaaccugguccgggaccugccccagggguucagcguccucgagccccugguggaccugcccaucggcaucaacaucacccgcuuccagacccuccuggcccugcaccgguccuaccucacgccgggggacagcagcuccggcuggaccgcgggcgccgccgccuacuacgugggguaccugcagccccgcaccuuccugcucaaguacaacgagaacggcaccaucacggacgcggucgacugcgcccuggacccccugagcgagaccaagugcacccucaaguccuucaccguggagaaggggaucuaccagacgagcaacuuccgggugcagcccaccgaguccaucguccgcuucccgaacaucaccaaccugugccccuucggcgagguguucaacgccacccgguucgccagcgucuacgccuggaaccgcaagcggaucuccaacugcguggcggacuacagcgugcuguacaacuccgccagcuucuccacguucaagugcuacggcgucagccccaccaagcucaacgaccugugcuucaccaacguguacgccgacuccuucgugauccgcggggacgagguccggcagaucgcccccggccagaccgggaagaucgccgacuacaacuacaagcugccggacgacuucacgggcugcgugaucgcguggaacagcaacaaccucgacuccaaggucgggggcaacuacaacuaccuguuccgccuguuccgcaagagcaaccucaagcccuucgagcgggacaucuccaccgagaucuaccaggccggcaacacccccugcaacgggguggagggcuucaacugcuacuucccccugcaguccuacggguuccagccgaccaacggcgugggguaccagcccuaccggguggucgugcugagcuucgagcuccugcacgcccccgccacggugugcggccccaagaaguccaccaaccuggucaagaacaagugcgugaacuucaacuucaacggccucaccgggaccggcgugcugaccgagagcaacaagaaguuccugccguuccagcaguucgggcgcgacaucgccgacacgaccgacgcgguccgcgacccccagacccuggagauccucgacaucacccccugcagcuucggcgggguguccgugaucacgccgggcaccaacaccagcaaccaggucgccgugcuguaccagggcgugaacugcaccgagguccccguggccauccacgccgaccagcugacgcccaccuggcggguguacuccaccggcagcaacgucuuccagacccgcgccgggugccucaucggcgcggagcacgugaacaacuccuacgagugcgacauccccaucggggccggcaucugcgccagcuaccagacgcagaccaacuccccgcggcgcgcccggagcguggcgucccagagcgucaucgccuacaccaugucccugggcgccgagaacagcgucgccuacuccaacaacagcaucgccauccccaccaacuucacgaucuccgugaccaccgagauccugcccgugagcaugaccaagacgagcgucgacugcaccauguacaucugcggggacuccaccgagugcagcaaccuccugcugcaguacggcuccuucugcacccagcucaaccgcgcgcugacggggaucgccguggagcaggacaagaacacccaggagguguucgcccaggucaagcagaucuacaagacgcccccgaucaaggacuucggcggguucaacuucagccagauccugcccgaccccuccaagcccagcaagcgguccuucaucgaggaccuccuguucaacaaggugacccuggccgacgccggcuucaucaagcaguacggcgacugccucggggacaucgcggcccgcgaccugaucugcgcccagaaguucaacggccugaccgugcucccgccccugcugaccgacgagaugaucgcccaguacaccagcgcccuccuggcggggaccaucacguccggcuggaccuucggggccggcgccgcccugcagauccccuucgcgaugcagauggccuaccgguucaacggcaucggggucacccagaacgugcucuacgagaaccagaagcugaucgccaaccaguucaacagcgccaucggcaagauccaggacucccugagcuccaccgccagcgcgcucgggaagcugcaggacguggucaaccagaacgcccaggcccugaacacgcucgugaagcagcuguccagcaacuucggcgccaucuccagcgugcugaacgacauccucucccgccuggacccgcccgaggccgaggugcagaucgaccggcugaucaccgggcgccuccagagccugcagaccuacgugacccagcagcugauccgggcggccgagauccgcgccagcgccaaccucgccgcgaccaagauguccgagugcguccugggccagagcaagcggguggacuucugcggcaagggguaccaccugauguccuucccccagagcgccccgcacggcguggucuuccuccacgugacguacguccccgcccaggagaagaacuucaccaccgcccccgcgaucugccacgacgggaaggcccacuucccccgcgagggcguguucguguccaacgggacccacugguucgucacgcagcggaacuucuacgagccgcagaucaucaccaccgacaacaccuucgugagcggcaacugcgacguggucaucggcaucgugaacaacacgguguacgacccccugcagcccgagcuggacuccuucaaggaggagcucgacaaguacuucaagaaccacaccagccccgacgucgaccugggggacaucuccggcaucaacgccagcguggugaacauccagaaggagaucgaccgccugaacgaggucgccaagaaccucaacgagucccugaucgaccugcaggagcucgggaaguacgagcaguacaucaaguggccgugguacaucuggcugggcuucaucgccggccugaucgcgaucgugauggugaccaucaugcucugcugcaugaccagcugcugcuccugccugaaggggugcugcagcugcggcuccugcugcaaguucgacgaggacgacagcgagcccguccugaagggggugaagcuccacuacacgugaggacuagucccuguucccagagcccacuuuuuuuucuuuuuuugaaauaaaauagccugucuuucagaucucaaaggcucuuuucagagccaccaaaaaaaaaaaaaaaaaaaaaaaaaaaaaaaaaaaaaaaaaaaaaaaaaaaaaaaaaaaaaaaaaaaaaaaaaaaaaaaaaaaaaaaaaaaaaaaaaaaaa

SEQ ID NO: 22811 - RNA, 4088 nt, Artificial Sequence
  SARS-CoV-2/Wuhan/WIV05/2019__EPI_ISL_402128 spike protein mRNA gc (1-1273)(H69del_V70del_Y453F_D614G_I692V_M1229I)
aggagagucccgcagucggcguccagcggcucugcuuguucgugugugugucguugcaggccuuauucaagcuuaccauguucguguuccugguccuccugccccuggugagcucccagugcgugaaccucaccacccgcacgcagcugccgcccgccuacaccaacagcuucacccggggcgucuacuaccccgacaagguguuccgcuccagcgugcugcacuccacccaggaccucuuccugcccuucuucagcaacgucacgugguuccacgccaucuccgggaccaacggcaccaagcgguucgacaacccggugcugcccuucaacgacggggucuacuucgcgagcaccgagaaguccaacaucauccgcggcuggaucuucgggacgacccucgacagcaagacccagucccugcugaucgugaacaacgccaccaacguggucaucaaggugugcgaguuccaguucugcaacgaccccuuccucggcguguacuaccacaagaacaacaagagcuggauggaguccgaguuccgggucuacagcuccgccaacaacugcacguucgaguacgugagccagcccuuccugauggaccuggagggcaagcaggggaacuucaagaaccuccgcgaguucguguucaagaacaucgacggcuacuucaagaucuacuccaagcacaccccgaucaaccugguccgggaccugccccagggguucagcgcccucgagccccugguggaccugcccaucggcaucaacaucacccgcuuccagacccuccuggcccugcaccgguccuaccucacgccgggggacagcagcuccggcuggaccgcgggcgccgccgccuacuacgugggguaccugcagccccgcaccuuccugcucaaguacaacgagaacggcaccaucacggacgcggucgacugcgcccuggacccccugagcgagaccaagugcacccucaaguccuucaccguggagaaggggaucuaccagacgagcaacuuccgggugcagcccaccgaguccaucguccgcuucccgaacaucaccaaccugugccccuucggcgagguguucaacgccacccgguucgccagcgucuacgccuggaaccgcaagcggaucuccaacugcguggcggacuacagcgugcuguacaacuccgccagcuucuccacguucaagugcuacggcgucagccccaccaagcucaacgaccugugcuucaccaacguguacgccgacuccuucgugauccgcggggacgagguccggcagaucgcccccggccagaccgggaagaucgccgacuacaacuacaagcugccggacgacuucacgggcugcgugaucgcguggaacagcaacaaccucgacuccaaggucgggggcaacuacaacuaccuguuccgccuguuccgcaagagcaaccucaagcccuucgagcgggacaucuccaccgagaucuaccaggccggcagcacccccugcaacgggguggagggcuucaacugcuacuucccccugcaguccuacggguuccagccgaccaacggcgugggguaccagcccuaccggguggucgugcugagcuucgagcuccugcacgcccccgccacggugugcggccccaagaaguccaccaaccuggucaagaacaagugcgugaacuucaacuucaacggccucaccgggaccggcgugcugaccgagagcaacaagaaguuccugccguuccagcaguucgggcgcgacaucgccgacacgaccgacgcgguccgcgacccccagacccuggagauccucgacaucacccccugcagcuucggcgggguguccgugaucacgccgggcaccaacaccagcaaccaggucgccgugcuguaccagggcgugaacugcaccgagguccccguggccauccacgccgaccagcugacgcccaccuggcggguguacuccaccggcagcaacgucuuccagacccgcgccgggugccucaucggcgcggagcacgugaacaacuccuacgagugcgacauccccaucggggccggcaucugcgccagcuaccagacgcagaccaacuccccgcggcgcgcccggagcguggcgucccagagcgugaucgccuacaccaugucccugggcgccgagaacagcgucgccuacuccaacaacagcaucgccauccccaccaacuucacgaucuccgugaccaccgagauccugcccgugagcaugaccaagacgagcgucgacugcaccauguacaucugcggggacuccaccgagugcagcaaccuccugcugcaguacggcuccuucugcacccagcucaaccgcgcgcugacggggaucgccguggagcaggacaagaacacccaggagguguucgcccaggucaagcagaucuacaagacgcccccgaucaaggacuucggcggguucaacuucagccagauccugcccgaccccuccaagcccagcaagcgguccuucaucgaggaccuccuguucaacaaggugacccuggccgacgccggcuucaucaagcaguacggcgacugccucggggacaucgcggcccgcgaccugaucugcgcccagaaguucaacggccugaccgugcucccgccccugcugaccgacgagaugaucgcccaguacaccagcgcccuccuggcggggaccaucacguccggcuggaccuucggggccggcgccgcccugcagauccccuucgcgaugcagauggccuaccgguucaacggcaucggggucacccagaacgugcucuacgagaaccagaagcugaucgccaaccaguucaacagcgccaucggcaagauccaggacucccugagcuccaccgccagcgcgcucgggaagcugcaggacguggucaaccagaacgcccaggcccugaacacgcucgugaagcagcuguccagcaacuucggcgccaucuccagcgugcugaacgacauccucucccgccuggacaaggucgaggccgaggugcagaucgaccggcugaucaccgggcgccuccagagccugcagaccuacgugacccagcagcugauccgggcggccgagauccgcgccagcgccaaccucgccgcgaccaagauguccgagugcguccugggccagagcaagcggguggacuucugcggcaagggguaccaccugauguccuucccccagagcgccccgcacggcguggucuuccuccacgugacguacguccccgcccaggagaagaacuucaccaccgcccccgcgaucugccacgacgggaaggcccacuucccccgcgagggcguguucguguccaacgggacccacugguucgucacgcagcggaacuucuacgagccgcagaucaucaccaccgacaacaccuucgugagcggcaacugcgacguggucaucggcaucgugaacaacacgguguacgacccccugcagcccgagcuggacuccuucaaggaggagcucgacaaguacuucaagaaccacaccagccccgacgucgaccugggggacaucuccggcaucaacgccagcguggugaacauccagaaggagaucgaccgccugaacgaggucgccaagaaccucaacgagucccugaucgaccugcaggagcucgggaaguacgagcaguacaucaaguggccgugguacaucuggcugggcuucaucgccggccugaucgcgaucgugaucgugaccaucaugcucugcugcaugaccagcugcugcuccugccugaaggggugcugcagcugcggcuccugcugcaaguucgacgaggacgacagcgagcccguccugaagggggugaagcuccacuacacgugaggacuagucccuguucccagagcccacuuuuuuuucuuuuuuugaaauaaaauagccugucuuucagaucucaaaggcucuuuucagagccaccaaaaaaaaaaaaaaaaaaaaaaaaaaaaaaaaaaaaaaaaaaaaaaaaaaaaaaaaaaaaaaaaaaaaaaaaaaaaaaaaaaaaaaaaaaaaaaaaaaaaa

SEQ ID NO: 22812 - RNA, 4088 nt, Artificial Sequence
  SARS-CoV-2/Wuhan/WIV05/2019__EPI_ISL_402128 spike protein mRNA gc (1-1273)(K986P_V987P_H69del_V70del_Y453F_D614G_I692V_M1229I)
aggagagucccgcagucggcguccagcggcucugcuuguucgugugugugucguugcaggccuuauucaagcuuaccauguucguguuccugguccuccugccccuggugagcucccagugcgugaaccucaccacccgcacgcagcugccgcccgccuacaccaacagcuucacccggggcgucuacuaccccgacaagguguuccgcuccagcgugcugcacuccacccaggaccucuuccugcccuucuucagcaacgucacgugguuccacgccaucuccgggaccaacggcaccaagcgguucgacaacccggugcugcccuucaacgacggggucuacuucgcgagcaccgagaaguccaacaucauccgcggcuggaucuucgggacgacccucgacagcaagacccagucccugcugaucgugaacaacgccaccaacguggucaucaaggugugcgaguuccaguucugcaacgaccccuuccucggcguguacuaccacaagaacaacaagagcuggauggaguccgaguuccgggucuacagcuccgccaacaacugcacguucgaguacgugagccagcccuuccugauggaccuggagggcaagcaggggaacuucaagaaccuccgcgaguucguguucaagaacaucgacggcuacuucaagaucuacuccaagcacaccccgaucaaccugguccgggaccugccccagggguucagcgcccucgagccccugguggaccugcccaucggcaucaacaucacccgcuuccagacccuccuggcccugcaccgguccuaccucacgccgggggacagcagcuccggcuggaccgcgggcgccgccgccuacuacgugggguaccugcagccccgcaccuuccugcucaaguacaacgagaacggcaccaucacggacgcggucgacugcgcccuggacccccugagcgagaccaagugcacccucaaguccuucaccguggagaaggggaucuaccagacgagcaacuuccgggugcagcccaccgaguccaucguccgcuucccgaacaucaccaaccugugccccuucggcgagguguucaacgccacccgguucgccagcgucuacgccuggaaccgcaagcggaucuccaacugcguggcggacuacagcgugcuguacaacuccgccagcuucuccacguucaagugcuacggcgucagccccaccaagcucaacgaccugugcuucaccaacguguacgccgacuccuucgugauccgcggggacgagguccggcagaucgcccccggccagaccgggaagaucgccgacuacaacuacaagcugccggacgacuucacgggcugcgugaucgcguggaacagcaacaaccucgacuccaaggucgggggcaacuacaacuaccuguuccgccuguuccgcaagagcaaccucaagcccuucgagcgggacaucuccaccgagaucuaccaggccggcagcacccccugcaacgggguggagggcuucaacugcuacuucccccugcaguccuacggguuccagccgaccaacggcgugggguaccagcccuaccggguggucgugcugagcuucgagcuccugcacgcccccgccacggugugcggccccaagaaguccaccaaccuggucaagaacaagugcgugaacuucaacuucaacggccucaccgggaccggcgugcugaccgagagcaacaagaaguuccugccguuccagcaguucgggcgcgacaucgccgacacgaccgacgcgguccgcgacccccagacccuggagauccucgacaucacccccugcagcuucggcgggguguccgugaucacgccgggcaccaacaccagcaaccaggucgccgugcuguaccagggcgugaacugcaccgagguccccguggccauccacgccgaccagcugacgcccaccuggcggguguacuccaccggcagcaacgucuuccagacccgcgccgggugccucaucggcgcggagcacgugaacaacuccuacgagugcgacauccccaucggggccggcaucugcgccagcuaccagacgcagaccaacuccccgcggcgcgcccggagcguggcgucccagagcgugaucgccuacaccaugucccugggcgccgagaacagcgucgccuacuccaacaacagcaucgccauccccaccaacuucacgaucuccgugaccaccgagauccugcccgugagcaugaccaagacgagcgucgacugcaccauguacaucugcggggacuccaccgagugcagcaaccuccugcugcaguacggcuccuucugcacccagcucaaccgcgcgcugacggggaucgccguggagcaggacaagaacacccaggagguguucgcccaggucaagcagaucuacaagacgcccccgaucaaggacuucggcggguucaacuucagccagauccugcccgaccccuccaagcccagcaagcgguccuucaucgaggaccuccuguucaacaaggugacccuggccgacgccggcuucaucaagcaguacggcgacugccucggggacaucgcggcccgcgaccugaucugcgcccagaaguucaacggccugaccgugcucccgccccugcugaccgacgagaugaucgcccaguacaccagcgcccuccuggcggggaccaucacguccggcuggaccuucggggccggcgccgcccugcagauccccuucgcgaugcagauggccuaccgguucaacggcaucggggucacccagaacgugcucuacgagaaccagaagcugaucgccaaccaguucaacagcgccaucggcaagauccaggacucccugagcuccaccgccagcgcgcucgggaagcugcaggacguggucaaccagaacgcccaggcccugaacacgcucgugaagcagcuguccagcaacuucggcgccaucuccagcgugcugaacgacauccucucccgccuggacccgcccgaggccgaggugcagaucgaccggcugaucaccgggcgccuccagagccugcagaccuacgugacccagcagcugauccgggcggccgagauccgcgccagcgccaaccucgccgcgaccaagauguccgagugcguccugggccagagcaagcggguggacuucugcggcaagggguaccaccugauguccuucccccagagcgccccgcacggcguggucuuccuccacgugacguacguccccgcccaggagaagaacuucaccaccgcccccgcgaucugccacgacgggaaggcccacuucccccgcgagggcguguucguguccaacgggacccacugguucgucacgcagcggaacuucuacgagccgcagaucaucaccaccgacaacaccuucgugagcggcaacugcgacguggucaucggcaucgugaacaacacgguguacgacccccugcagcccgagcuggacuccuucaaggaggagcucgacaaguacuucaagaaccacaccagccccgacgucgaccugggggacaucuccggcaucaacgccagcguggugaacauccagaaggagaucgaccgccugaacgaggucgccaagaaccucaacgagucccugaucgaccugcaggagcucgggaaguacgagcaguacaucaaguggccgugguacaucuggcugggcuucaucgccggccugaucgcgaucgugaucgugaccaucaugcucugcugcaugaccagcugcugcuccugccugaaggggugcugcagcugcggcuccugcugcaaguucgacgaggacgacagcgagcccguccugaagggggugaagcuccacuacacgugaggacuagucccuguucccagagcccacuuuuuuuucuuuuuuugaaauaaaauagccugucuuucagaucucaaaggcucuuuucagagccaccaaaaaaaaaaaaaaaaaaaaaaaaaaaaaaaaaaaaaaaaaaaaaaaaaaaaaaaaaaaaaaaaaaaaaaaaaaaaaaaaaaaaaaaaaaaaaaaaaaaaa

SEQ ID NO: 22813 - RNA, 4039 nt, Artificial Sequence
  SARS-CoV-2/Wuhan/WIV05/2019__EPI_ISL_402128 spike protein mRNA gc (1-1273)(K986P_V987P_F817P_A892P_A899P_A942P) R9848
aggagaaagcuuaccauguucguguuccugguccuccugccccuggugagcucccagugcgugaaccucaccacccgcacgcagcugccgcccgccuacaccaacagcuucacccggggcgucuacuaccccgacaagguguuccgcuccagcgugcugcacuccacccaggaccucuuccugcccuucuucagcaacgucacgugguuccacgccauccacguguccgggaccaacggcaccaagcgguucgacaacccggugcugcccuucaacgacggggucuacuucgcgagcaccgagaaguccaacaucauccgcggcuggaucuucgggacgacccucgacagcaagacccagucccugcugaucgugaacaacgccaccaacguggucaucaaggugugcgaguuccaguucugcaacgaccccuuccucggcguguacuaccacaagaacaacaagagcuggauggaguccgaguuccgggucuacagcuccgccaacaacugcacguucgaguacgugagccagcccuuccugauggaccuggagggcaagcaggggaacuucaagaaccuccgcgaguucguguucaagaacaucgacggcuacuucaagaucuacuccaagcacaccccgaucaaccugguccgggaccugccccagggguucagcgcccucgagccccugguggaccugcccaucggcaucaacaucacccgcuuccagacccuccuggcccugcaccgguccuaccucacgccgggggacagcagcuccggcuggaccgcgggcgccgccgccuacuacgugggguaccugcagccccgcaccuuccugcucaaguacaacgagaacggcaccaucacggacgcggucgacugcgcccuggacccccugagcgagaccaagugcacccucaaguccuucaccguggagaaggggaucuaccagacgagcaacuuccgggugcagcccaccgaguccaucguccgcuucccgaacaucaccaaccugugccccuucggcgagguguucaacgccacccgguucgccagcgucuacgccuggaaccgcaagcggaucuccaacugcguggcggacuacagcgugcuguacaacuccgccagcuucuccacguucaagugcuacggcgucagccccaccaagcucaacgaccugugcuucaccaacguguacgccgacuccuucgugauccgcggggacgagguccggcagaucgcccccggccagaccgggaagaucgccgacuacaacuacaagcugccggacgacuucacgggcugcgugaucgcguggaacagcaacaaccucgacuccaaggucgggggcaacuacaacuaccuguaccgccuguuccgcaagagcaaccucaagcccuucgagcgggacaucuccaccgagaucuaccaggccggcagcacccccugcaacgggguggagggcuucaacugcuacuucccccugcaguccuacggguuccagccgaccaacggcgugggguaccagcccuaccggguggucgugcugagcuucgagcuccugcacgcccccgccacggugugcggccccaagaaguccaccaaccuggucaagaacaagugcgugaacuucaacuucaacggccucaccgggaccggcgugcugaccgagagcaacaagaaguuccugccguuccagcaguucgggcgcgacaucgccgacacgaccgacgcgguccgcgacccccagacccuggagauccucgacaucacccccugcagcuucggcgggguguccgugaucacgccgggcaccaacaccagcaaccaggucgccgugcuguaccaggacgugaacugcaccgagguccccguggccauccacgccgaccagcugacgcccaccuggcggguguacuccaccggcagcaacgucuuccagacccgcgccgggugccucaucggcgcggagcacgugaacaacuccuacgagugcgacauccccaucggggccggcaucugcgccagcuaccagacgcagaccaacuccccgcggcgcgcccggagcguggcgucccagagcaucaucgccuacaccaugucccugggcgccgagaacagcgucgccuacuccaacaacagcaucgccauccccaccaacuucacgaucuccgugaccaccgagauccugcccgugagcaugaccaagacgagcgucgacugcaccauguacaucugcggggacuccaccgagugcagcaaccuccugcugcaguacggcuccuucugcacccagcucaaccgcgcgcugacggggaucgccguggagcaggacaagaacacccaggagguguucgcccaggucaagcagaucuacaagacgcccccgaucaaggacuucggcggguucaacuucagccagauccugcccgaccccuccaagcccagcaagcggucccccaucgaggaccuccuguucaacaaggugacccuggccgacgccggcuucaucaagcaguacggcgacugccucggggacaucgcggcccgcgaccugaucugcgcccagaaguucaacggccugaccgugcucccgccccugcugaccgacgagaugaucgcccaguacaccagcgcccuccuggcggggaccaucacguccggcuggaccuucggggccggccccgcccugcagauccccuucccgaugcagauggccuaccgguucaacggcaucggggucacccagaacgugcucuacgagaaccagaagcugaucgccaaccaguucaacagcgccaucggcaagauccaggacucccugagcuccacccccagcgcgcucgggaagcugcaggacguggucaaccagaacgcccaggcccugaacacgcucgugaagcagcuguccagcaacuucggcgccaucuccagcgugcugaacgacauccucucccgccuggacccgcccgaggccgaggugcagaucgaccggcugaucaccgggcgccuccagagccugcagaccuacgugacccagcagcugauccgggcggccgagauccgcgccagcgccaaccucgccgcgaccaagauguccgagugcguccugggccagagcaagcggguggacuucugcggcaagggguaccaccugauguccuucccccagagcgccccgcacggcguggucuuccuccacgugacguacguccccgcccaggagaagaacuucaccaccgcccccgcgaucugccacgacgggaaggcccacuucccccgcgagggcguguucguguccaacgggacccacugguucgucacgcagcggaacuucuacgagccgcagaucaucaccaccgacaacaccuucgugagcggcaacugcgacguggucaucggcaucgugaacaacacgguguacgacccccugcagcccgagcuggacuccuucaaggaggagcucgacaaguacuucaagaaccacaccagccccgacgucgaccugggggacaucuccggcaucaacgccagcguggugaacauccagaaggagaucgaccgccugaacgaggucgccaagaaccucaacgagucccugaucgaccugcaggagcucgggaaguacgagcaguacaucaaguggccgugguacaucuggcugggcuucaucgccggccugaucgcgaucgugauggugaccaucaugcucugcugcaugaccagcugcugcuccugccugaaggggugcugcagcugcggcuccugcugcaaguucgacgaggacgacagcgagcccguccugaagggggugaagcuccacuacacgugaggacuaguuauaagacugacuagcccgaugggccucccaacgggcccuccuccccuccuugcaccgagauuaauaaaaaaaaaaaaaaaaaaaaaaaaaaaaaaaaaaaaaaaaaaaaaaaaaaaaaaaaaaaaaaaaugcaucccccccccccccccccccccccccccccccaaaggcucuuuucagagccaccagaauu

SEQ ID NO: 22814 - RNA, 1369 nt, Artificial Sequence
  SARS-CoV-2/Wuhan/WIV05/2019__EPI_ISL_402128 spike protein mRNA gc (1-15,334-528) Ferritin construct R10337
aggagaaagcuuaccauguucguguuccugguccuccugccccuggugagcucccagugcaaccugugccccuucggcgagguguucaacgccacccgguucgccagcgucuacgccuggaaccgcaagcggaucuccaacugcguggcggacuacagcgugcuguacaacuccgccagcuucuccacguucaagugcuacggcgucagccccaccaagcucaacgaccugugcuucaccaacguguacgccgacuccuucgugauccgcggggacgagguccggcagaucgcccccggccagaccgggaagaucgccgacuacaacuacaagcugccggacgacuucacgggcugcgugaucgcguggaacagcaacaaccucgacuccaaggucgggggcaacuacaacuaccuguaccgccuguuccgcaagagcaaccucaagcccuucgagcgggacaucuccaccgagaucuaccaggccggcagcacccccugcaacgggguggagggcuucaacugcuacuucccccugcaguccuacggguuccagccgaccaacggcgugggguaccagcccuaccggguggucgugcugagcuucgagcuccugcacgcccccgccacggugugcggccccaagggcggggguggaagcggcggggguggaagugacaucaucaagcuccugaacgagcaggucaacaaggagaugcaguccagcaaccuguacauguccaugagcuccuggugcuacacccacagccucgacggcgccgggcuguuccuguucgaccacgccgcggaggaguacgagcacgccaagaagcucaucaucuuccugaacgagaacaacgugcccgugcagcugaccuccaucagcgccccggagcacaaguucgagggccucacgcagaucuuccagaaggccuacgagcacgagcagcacaucuccgagagcaucaacaacaucguggaccacgccaucaaguccaaggaccacgcgaccuucaacuuccugcagugguacgucgccgagcagcacgaggaggaggugcuguucaaggacauccucgacaagaucgagcugaucgggaacgagaaccacggccuguaccucgccgaccaguacgugaaggggaucgccaagagccgcaaguccugaggacuaguuauaagacugacuagcccgaugggccucccaacgggcccuccuccccuccuugcaccgagauuaauaaaaaaaaaaaaaaaaaaaaaaaaaaaaaaaaaaaaaaaaaaaaaaaaaaaaaaaaaaaaaaaaugcaucccccccccccccccccccccccccccccccaaaggcucuuuucagagccaccagaauu

SEQ ID NO: 22815 - RNA, 967 nt, Artificial Sequence
  SARS-CoV-2/Wuhan/WIV05/2019__EPI_ISL_402128 spike protein mRNA gc (334-528) Foldon construct R9926
aggagaaagcuuaccaugcccaugggcagccugcagccgcucgccacccuguaccugcucgggaugcugguggccuccguccuggcgaaccugugccccuucggcgagguguucaacgccacccgguucgccagcgucuacgccuggaaccgcaagcggaucuccaacugcguggcggacuacagcgugcuguacaacuccgccagcuucuccacguucaagugcuacggcgucagccccaccaagcucaacgaccugugcuucaccaacguguacgccgacuccuucgugauccgcggggacgagguccggcagaucgcccccggccagaccgggaagaucgccgacuacaacuacaagcugccggacgacuucacgggcugcgugaucgcguggaacagcaacaaccucgacuccaaggucgggggcaacuacaacuaccuguaccgccuguuccgcaagagcaaccucaagcccuucgagcgggacaucuccaccgagaucuaccaggccggcagcacccccugcaacgggguggagggcuucaacugcuacuucccccugcaguccuacggguuccagccgaccaacggcgugggguaccagcccuaccggguggucgugcugagcuucgagcuccugcacgcccccgccacggugugcggccccaagggcagcggcggguacauccccgaggccccgcgcgacggccaggccuacgugcggaaggacggcgaguggguccugcugagcaccuuccucugaggacuaguuauaagacugacuagcccgaugggccucccaacgggcccuccuccccuccuugcaccgagauuaauaaaaaaaaaaaaaaaaaaaaaaaaaaaaaaaaaaaaaaaaaaaaaaaaaaaaaaaaaaaaaaaaugcaucccccccccccccccccccccccccccccccaaaggcucuuuucagagccaccagaauu

SEQ ID NO: 22816 - RNA, 1345 nt, Artificial Sequence
  SARS-CoV-2/Wuhan/WIV05/2019__EPI_ISL_402128 spike protein mRNA gc (1-15,334-528) LumSynth construct R10335
aggagaaagcuuaccauguucguguuccugguccuccugccccuggugagcucccagugcaaccugugccccuucggcgagguguucaacgccacccgguucgccagcgucuacgccuggaaccgcaagcggaucuccaacugcguggcggacuacagcgugcuguacaacuccgccagcuucuccacguucaagugcuacggcgucagccccaccaagcucaacgaccugugcuucaccaacguguacgccgacuccuucgugauccgcggggacgagguccggcagaucgcccccggccagaccgggaagaucgccgacuacaacuacaagcugccggacgacuucacgggcugcgugaucgcguggaacagcaacaaccucgacuccaaggucgggggcaacuacaacuaccuguaccgccuguuccgcaagagcaaccucaagcccuucgagcgggacaucuccaccgagaucuaccaggccggcagcacccccugcaacgggguggagggcuucaacugcuacuucccccugcaguccuacggguuccagccgaccaacggcgugggguaccagcccuaccggguggucgugcugagcuucgagcuccugcacgcccccgccacggugugcggccccaagggcggcggcggcuccggaggcggagguagcgggggacagaucuacgagggcaagcugaccgccgaggggcuccgcuucggcaucguggccagccgguucaaccacgcgcuggucgaccgccugguggagggggccaucgacgccaucgugcggcacggcgggcgcgaggaggacaucacccucguccgggugcccggcuccugggagaucccgguggccgccggcgagcuggcccgcaaggaggacaucgacgcggucaucgccaucggggugcugauccggggcgccacgccccacuucgacuacaucgccagcgagguguccaaggggcucgcggaccugagccuggagcuccgcaagcccaucaccuucggcgucaucaccgccgacacccuggagcaggccaucgagcgggccgggacgaagcacggcaacaagggcugggaggccgcgcuguccgccaucgagauggccaaccucuucaagagccugcgcugaggacuaguuauaagacugacuagcccgaugggccucccaacgggcccuccuccccuccuugcaccgagauuaauaaaaaaaaaaaaaaaaaaaaaaaaaaaaaaaaaaaaaaaaaaaaaaaaaaaaaaaaaaaaaaaaugcaucccccccccccccccccccccccccccccccaaaggcucuuuucagagccaccagaauu

SEQ ID NO: 22817 - RNA, 1306 nt, Artificial Sequence
  SARS-CoV-2/Wuhan/WIV05/2019__EPI_ISL_402128 spike protein mRNA gc (334-528) LumSynth construct R10336
aggagaaagcuuaccaugcagaucuacgagggcaagcugaccgccgaggggcuccgcuucggcaucguggccagccgguucaaccacgcgcuggucgaccgccugguggagggggccaucgacgccaucgugcggcacggcgggcgcgaggaggacaucacccucguccgggugcccggcuccugggagaucccgguggccgccggcgagcuggcccgcaaggaggacaucgacgcggucaucgccaucggggugcugauccggggcgccacgccccacuucgacuacaucgccagcgagguguccaaggggcucgcggaccugagccuggagcuccgcaagcccaucaccuucggcgucaucaccgccgacacccuggagcaggccaucgagcgggccgggacgaagcacggcaacaagggcugggaggccgcgcuguccgccaucgagauggccaaccucuucaagagccugcgcggcgggggcgggagcggcgggggcggcuccgggggcgggaaccugugccccuucggcgagguguucaacgccacccgguucgccagcgucuacgccuggaaccgcaagcggaucuccaacugcguggcggacuacagcgugcuguacaacuccgccagcuucuccacguucaagugcuacggcgucagccccaccaagcucaacgaccugugcuucaccaacguguacgccgacuccuucgugauccgcggggacgagguccggcagaucgcccccggccagaccgggaagaucgccgacuacaacuacaagcugccggacgacuucacgggcugcgugaucgcguggaacagcaacaaccucgacuccaaggucgggggcaacuacaacuaccuguaccgccuguuccgcaagagcaaccucaagcccuucgagcgggacaucuccaccgagaucuaccaggccggcagcacccccugcaacgggguggagggcuucaacugcuacuucccccugcaguccuacggguuccagccgaccaacggcgugggguaccagcccuaccggguggucgugcugagcuucgagcuccugcacgcccccgccacggugugcggccccaagugaggacuaguuauaagacugacuagcccgaugggccucccaacgggcccuccuccccuccuugcaccgagauuaauaaaaaaaaaaaaaaaaaaaaaaaaaaaaaaaaaaaaaaaaaaaaaaaaaaaaaaaaaaaaaaaaugcaucccccccccccccccccccccccccccccccaaaggcucuuuucagagccaccagaauu

SEQ ID NO: 22818 - RNA, 4039 nt, Artificial Sequence
  SARS-CoV-2/Wuhan/WIV05/2019__EPI_ISL_402128 spike protein mRNA gc (1-1273)(D614G)
aggagaaagcuuaccauguucguguuccugguccuccugccccuggugagcucccagugcgugaaccucaccacccgcacgcagcugccgcccgccuacaccaacagcuucacccggggcgucuacuaccccgacaagguguuccgcuccagcgugcugcacuccacccaggaccucuuccugcccuucuucagcaacgucacgugguuccacgccauccacguguccgggaccaacggcaccaagcgguucgacaacccggugcugcccuucaacgacggggucuacuucgcgagcaccgagaaguccaacaucauccgcggcuggaucuucgggacgacccucgacagcaagacccagucccugcugaucgugaacaacgccaccaacguggucaucaaggugugcgaguuccaguucugcaacgaccccuuccucggcguguacuaccacaagaacaacaagagcuggauggaguccgaguuccgggucuacagcuccgccaacaacugcacguucgaguacgugagccagcccuuccugauggaccuggagggcaagcaggggaacuucaagaaccuccgcgaguucguguucaagaacaucgacggcuacuucaagaucuacuccaagcacaccccgaucaaccugguccgggaccugccccagggguucagcgcccucgagccccugguggaccugcccaucggcaucaacaucacccgcuuccagacccuccuggcccugcaccgguccuaccucacgccgggggacagcagcuccggcuggaccgcgggcgccgccgccuacuacgugggguaccugcagccccgcaccuuccugcucaaguacaacgagaacggcaccaucacggacgcggucgacugcgcccuggacccccugagcgagaccaagugcacccucaaguccuucaccguggagaaggggaucuaccagacgagcaacuuccgggugcagcccaccgaguccaucguccgcuucccgaacaucaccaaccugugccccuucggcgagguguucaacgccacccgguucgccagcgucuacgccuggaaccgcaagcggaucuccaacugcguggcggacuacagcgugcuguacaacuccgccagcuucuccacguucaagugcuacggcgucagccccaccaagcucaacgaccugugcuucaccaacguguacgccgacuccuucgugauccgcggggacgagguccggcagaucgcccccggccagaccgggaagaucgccgacuacaacuacaagcugccggacgacuucacgggcugcgugaucgcguggaacagcaacaaccucgacuccaaggucgggggcaacuacaacuaccuguaccgccuguuccgcaagagcaaccucaagcccuucgagcgggacaucuccaccgagaucuaccaggccggcagcacccccugcaacgggguggagggcuucaacugcuacuucccccugcaguccuacggguuccagccgaccaacggcgugggguaccagcccuaccggguggucgugcugagcuucgagcuccugcacgcccccgccacggugugcggccccaagaaguccaccaaccuggucaagaacaagugcgugaacuucaacuucaacggccucaccgggaccggcgugcugaccgagagcaacaagaaguuccugccguuccagcaguucgggcgcgacaucgccgacacgaccgacgcgguccgcgacccccagacccuggagauccucgacaucacccccugcagcuucggcgggguguccgugaucacgccgggcaccaacaccagcaaccaggucgccgugcuguaccagggcgugaacugcaccgagguccccguggccauccacgccgaccagcugacgcccaccuggcggguguacuccaccggcagcaacgucuuccagacccgcgccgggugccucaucggcgcggagcacgugaacaacuccuacgagugcgacauccccaucggggccggcaucugcgccagcuaccagacgcagaccaacuccccgcggcgcgcccggagcguggcgucccagagcaucaucgccuacaccaugucccugggcgccgagaacagcgucgccuacuccaacaacagcaucgccauccccaccaacuucacgaucuccgugaccaccgagauccugcccgugagcaugaccaagacgagcgucgacugcaccauguacaucugcggggacuccaccgagugcagcaaccuccugcugcaguacggcuccuucugcacccagcucaaccgcgcgcugacggggaucgccguggagcaggacaagaacacccaggagguguucgcccaggucaagcagaucuacaagacgcccccgaucaaggacuucggcggguucaacuucagccagauccugcccgaccccuccaagcccagcaagcgguccuucaucgaggaccuccuguucaacaaggugacccuggccgacgccggcuucaucaagcaguacggcgacugccucggggacaucgcggcccgcgaccugaucugcgcccagaaguucaacggccugaccgugcucccgccccugcugaccgacgagaugaucgcccaguacaccagcgcccuccuggcggggaccaucacguccggcuggaccuucggggccggcgccgcccugcagauccccuucgcgaugcagauggccuaccgguucaacggcaucggggucacccagaacgugcucuacgagaaccagaagcugaucgccaaccaguucaacagcgccaucggcaagauccaggacucccugagcuccaccgccagcgcgcucgggaagcugcaggacguggucaaccagaacgcccaggcccugaacacgcucgugaagcagcuguccagcaacuucggcgccaucuccagcgugcugaacgacauccucucccgccuggacaaggucgaggccgaggugcagaucgaccggcugaucaccgggcgccuccagagccugcagaccuacgugacccagcagcugauccgggcggccgagauccgcgccagcgccaaccucgccgcgaccaagauguccgagugcguccugggccagagcaagcggguggacuucugcggcaagggguaccaccugauguccuucccccagagcgccccgcacggcguggucuuccuccacgugacguacguccccgcccaggagaagaacuucaccaccgcccccgcgaucugccacgacgggaaggcccacuucccccgcgagggcguguucguguccaacgggacccacugguucgucacgcagcggaacuucuacgagccgcagaucaucaccaccgacaacaccuucgugagcggcaacugcgacguggucaucggcaucgugaacaacacgguguacgacccccugcagcccgagcuggacuccuucaaggaggagcucgacaaguacuucaagaaccacaccagccccgacgucgaccugggggacaucuccggcaucaacgccagcguggugaacauccagaaggagaucgaccgccugaacgaggucgccaagaaccucaacgagucccugaucgaccugcaggagcucgggaaguacgagcaguacaucaaguggccgugguacaucuggcugggcuucaucgccggccugaucgcgaucgugauggugaccaucaugcucugcugcaugaccagcugcugcuccugccugaaggggugcugcagcugcggcuccugcugcaaguucgacgaggacgacagcgagcccguccugaagggggugaagcuccacuacacgugaggacuaguuauaagacugacuagcccgaugggccucccaacgggcccuccuccccuccuugcaccgagauuaauaaaaaaaaaaaaaaaaaaaaaaaaaaaaaaaaaaaaaaaaaaaaaaaaaaaaaaaaaaaaaaaaugcaucccccccccccccccccccccccccccccccaaaggcucuuuucagagccaccagaauu

SEQ ID NO: 22819 - RNA, 4039 nt, Artificial Sequence
  SARS-CoV-2/Wuhan/WIV05/2019__EPI_ISL_402128 spike protein mRNA gc (1-1273)(K986P_V987P_ D614G) R10165
aggagaaagcuuaccauguucguguuccugguccuccugccccuggugagcucccagugcgugaaccucaccacccgcacgcagcugccgcccgccuacaccaacagcuucacccggggcgucuacuaccccgacaagguguuccgcuccagcgugcugcacuccacccaggaccucuuccugcccuucuucagcaacgucacgugguuccacgccauccacguguccgggaccaacggcaccaagcgguucgacaacccggugcugcccuucaacgacggggucuacuucgcgagcaccgagaaguccaacaucauccgcggcuggaucuucgggacgacccucgacagcaagacccagucccugcugaucgugaacaacgccaccaacguggucaucaaggugugcgaguuccaguucugcaacgaccccuuccucggcguguacuaccacaagaacaacaagagcuggauggaguccgaguuccgggucuacagcuccgccaacaacugcacguucgaguacgugagccagcccuuccugauggaccuggagggcaagcaggggaacuucaagaaccuccgcgaguucguguucaagaacaucgacggcuacuucaagaucuacuccaagcacaccccgaucaaccugguccgggaccugccccagggguucagcgcccucgagccccugguggaccugcccaucggcaucaacaucacccgcuuccagacccuccuggcccugcaccgguccuaccucacgccgggggacagcagcuccggcuggaccgcgggcgccgccgccuacuacgugggguaccugcagccccgcaccuuccugcucaaguacaacgagaacggcaccaucacggacgcggucgacugcgcccuggacccccugagcgagaccaagugcacccucaaguccuucaccguggagaaggggaucuaccagacgagcaacuuccgggugcagcccaccgaguccaucguccgcuucccgaacaucaccaaccugugccccuucggcgagguguucaacgccacccgguucgccagcgucuacgccuggaaccgcaagcggaucuccaacugcguggcggacuacagcgugcuguacaacuccgccagcuucuccacguucaagugcuacggcgucagccccaccaagcucaacgaccugugcuucaccaacguguacgccgacuccuucgugauccgcggggacgagguccggcagaucgcccccggccagaccgggaagaucgccgacuacaacuacaagcugccggacgacuucacgggcugcgugaucgcguggaacagcaacaaccucgacuccaaggucgggggcaacuacaacuaccuguaccgccuguuccgcaagagcaaccucaagcccuucgagcgggacaucuccaccgagaucuaccaggccggcagcacccccugcaacgggguggagggcuucaacugcuacuucccccugcaguccuacggguuccagccgaccaacggcgugggguaccagcccuaccggguggucgugcugagcuucgagcuccugcacgcccccgccacggugugcggccccaagaaguccaccaaccuggucaagaacaagugcgugaacuucaacuucaacggccucaccgggaccggcgugcugaccgagagcaacaagaaguuccugccguuccagcaguucgggcgcgacaucgccgacacgaccgacgcgguccgcgacccccagacccuggagauccucgacaucacccccugcagcuucggcgggguguccgugaucacgccgggcaccaacaccagcaaccaggucgccgugcuguaccagggcgugaacugcaccgagguccccguggccauccacgccgaccagcugacgcccaccuggcggguguacuccaccggcagcaacgucuuccagacccgcgccgggugccucaucggcgcggagcacgugaacaacuccuacgagugcgacauccccaucggggccggcaucugcgccagcuaccagacgcagaccaacuccccgcggcgcgcccggagcguggcgucccagagcaucaucgccuacaccaugucccugggcgccgagaacagcgucgccuacuccaacaacagcaucgccauccccaccaacuucacgaucuccgugaccaccgagauccugcccgugagcaugaccaagacgagcgucgacugcaccauguacaucugcggggacuccaccgagugcagcaaccuccugcugcaguacggcuccuucugcacccagcucaaccgcgcgcugacggggaucgccguggagcaggacaagaacacccaggagguguucgcccaggucaagcagaucuacaagacgcccccgaucaaggacuucggcggguucaacuucagccagauccugcccgaccccuccaagcccagcaagcgguccuucaucgaggaccuccuguucaacaaggugacccuggccgacgccggcuucaucaagcaguacggcgacugccucggggacaucgcggcccgcgaccugaucugcgcccagaaguucaacggccugaccgugcucccgccccugcugaccgacgagaugaucgcccaguacaccagcgcccuccuggcggggaccaucacguccggcuggaccuucggggccggcgccgcccugcagauccccuucgcgaugcagauggccuaccgguucaacggcaucggggucacccagaacgugcucuacgagaaccagaagcugaucgccaaccaguucaacagcgccaucggcaagauccaggacucccugagcuccaccgccagcgcgcucgggaagcugcaggacguggucaaccagaacgcccaggcccugaacacgcucgugaagcagcuguccagcaacuucggcgccaucuccagcgugcugaacgacauccucucccgccuggacccgcccgaggccgaggugcagaucgaccggcugaucaccgggcgccuccagagccugcagaccuacgugacccagcagcugauccgggcggccgagauccgcgccagcgccaaccucgccgcgaccaagauguccgagugcguccugggccagagcaagcggguggacuucugcggcaagggguaccaccugauguccuucccccagagcgccccgcacggcguggucuuccuccacgugacguacguccccgcccaggagaagaacuucaccaccgcccccgcgaucugccacgacgggaaggcccacuucccccgcgagggcguguucguguccaacgggacccacugguucgucacgcagcggaacuucuacgagccgcagaucaucaccaccgacaacaccuucgugagcggcaacugcgacguggucaucggcaucgugaacaacacgguguacgacccccugcagcccgagcuggacuccuucaaggaggagcucgacaaguacuucaagaaccacaccagccccgacgucgaccugggggacaucuccggcaucaacgccagcguggugaacauccagaaggagaucgaccgccugaacgaggucgccaagaaccucaacgagucccugaucgaccugcaggagcucgggaaguacgagcaguacaucaaguggccgugguacaucuggcugggcuucaucgccggccugaucgcgaucgugauggugaccaucaugcucugcugcaugaccagcugcugcuccugccugaaggggugcugcagcugcggcuccugcugcaaguucgacgaggacgacagcgagcccguccugaagggggugaagcuccacuacacgugaggacuaguuauaagacugacuagcccgaugggccucccaacgggcccuccuccccuccuugcaccgagauuaauaaaaaaaaaaaaaaaaaaaaaaaaaaaaaaaaaaaaaaaaaaaaaaaaaaaaaaaaaaaaaaaaugcaucccccccccccccccccccccccccccccccaaaggcucuuuucagagccaccagaauu

SEQ ID NO: 22820 - RNA, 4039 nt, Artificial Sequence
  SARS-CoV-2/Wuhan/WIV05/2019__EPI_ISL_402128 spike protein mRNA gc (1-1273)(A222V_D614G) R10276
aggagaaagcuuaccauguucguguuccugguccuccugccccuggugagcucccagugcgugaaccucaccacccgcacgcagcugccgcccgccuacaccaacagcuucacccggggcgucuacuaccccgacaagguguuccgcuccagcgugcugcacuccacccaggaccucuuccugcccuucuucagcaacgucacgugguuccacgccauccacguguccgggaccaacggcaccaagcgguucgacaacccggugcugcccuucaacgacggggucuacuucgcgagcaccgagaaguccaacaucauccgcggcuggaucuucgggacgacccucgacagcaagacccagucccugcugaucgugaacaacgccaccaacguggucaucaaggugugcgaguuccaguucugcaacgaccccuuccucggcguguacuaccacaagaacaacaagagcuggauggaguccgaguuccgggucuacagcuccgccaacaacugcacguucgaguacgugagccagcccuuccugauggaccuggagggcaagcaggggaacuucaagaaccuccgcgaguucguguucaagaacaucgacggcuacuucaagaucuacuccaagcacaccccgaucaaccugguccgggaccugccccagggguucagcguccucgagccccugguggaccugcccaucggcaucaacaucacccgcuuccagacccuccuggcccugcaccgguccuaccucacgccgggggacagcagcuccggcuggaccgcgggcgccgccgccuacuacgugggguaccugcagccccgcaccuuccugcucaaguacaacgagaacggcaccaucacggacgcggucgacugcgcccuggacccccugagcgagaccaagugcacccucaaguccuucaccguggagaaggggaucuaccagacgagcaacuuccgggugcagcccaccgaguccaucguccgcuucccgaacaucaccaaccugugccccuucggcgagguguucaacgccacccgguucgccagcgucuacgccuggaaccgcaagcggaucuccaacugcguggcggacuacagcgugcuguacaacuccgccagcuucuccacguucaagugcuacggcgucagccccaccaagcucaacgaccugugcuucaccaacguguacgccgacuccuucgugauccgcggggacgagguccggcagaucgcccccggccagaccgggaagaucgccgacuacaacuacaagcugccggacgacuucacgggcugcgugaucgcguggaacagcaacaaccucgacuccaaggucgggggcaacuacaacuaccuguaccgccuguuccgcaagagcaaccucaagcccuucgagcgggacaucuccaccgagaucuaccaggccggcagcacccccugcaacgggguggagggcuucaacugcuacuucccccugcaguccuacggguuccagccgaccaacggcgugggguaccagcccuaccggguggucgugcugagcuucgagcuccugcacgcccccgccacggugugcggccccaagaaguccaccaaccuggucaagaacaagugcgugaacuucaacuucaacggccucaccgggaccggcgugcugaccgagagcaacaagaaguuccugccguuccagcaguucgggcgcgacaucgccgacacgaccgacgcgguccgcgacccccagacccuggagauccucgacaucacccccugcagcuucggcgggguguccgugaucacgccgggcaccaacaccagcaaccaggucgccgugcuguaccagggcgugaacugcaccgagguccccguggccauccacgccgaccagcugacgcccaccuggcggguguacuccaccggcagcaacgucuuccagacccgcgccgggugccucaucggcgcggagcacgugaacaacuccuacgagugcgacauccccaucggggccggcaucugcgccagcuaccagacgcagaccaacuccccgcggcgcgcccggagcguggcgucccagagcaucaucgccuacaccaugucccugggcgccgagaacagcgucgccuacuccaacaacagcaucgccauccccaccaacuucacgaucuccgugaccaccgagauccugcccgugagcaugaccaagacgagcgucgacugcaccauguacaucugcggggacuccaccgagugcagcaaccuccugcugcaguacggcuccuucugcacccagcucaaccgcgcgcugacggggaucgccguggagcaggacaagaacacccaggagguguucgcccaggucaagcagaucuacaagacgcccccgaucaaggacuucggcggguucaacuucagccagauccugcccgaccccuccaagcccagcaagcgguccuucaucgaggaccuccuguucaacaaggugacccuggccgacgccggcuucaucaagcaguacggcgacugccucggggacaucgcggcccgcgaccugaucugcgcccagaaguucaacggccugaccgugcucccgccccugcugaccgacgagaugaucgcccaguacaccagcgcccuccuggcggggaccaucacguccggcuggaccuucggggccggcgccgcccugcagauccccuucgcgaugcagauggccuaccgguucaacggcaucggggucacccagaacgugcucuacgagaaccagaagcugaucgccaaccaguucaacagcgccaucggcaagauccaggacucccugagcuccaccgccagcgcgcucgggaagcugcaggacguggucaaccagaacgcccaggcccugaacacgcucgugaagcagcuguccagcaacuucggcgccaucuccagcgugcugaacgacauccucucccgccuggacaaggucgaggccgaggugcagaucgaccggcugaucaccgggcgccuccagagccugcagaccuacgugacccagcagcugauccgggcggccgagauccgcgccagcgccaaccucgccgcgaccaagauguccgagugcguccugggccagagcaagcggguggacuucugcggcaagggguaccaccugauguccuucccccagagcgccccgcacggcguggucuuccuccacgugacguacguccccgcccaggagaagaacuucaccaccgcccccgcgaucugccacgacgggaaggcccacuucccccgcgagggcguguucguguccaacgggacccacugguucgucacgcagcggaacuucuacgagccgcagaucaucaccaccgacaacaccuucgugagcggcaacugcgacguggucaucggcaucgugaacaacacgguguacgacccccugcagcccgagcuggacuccuucaaggaggagcucgacaaguacuucaagaaccacaccagccccgacgucgaccugggggacaucuccggcaucaacgccagcguggugaacauccagaaggagaucgaccgccugaacgaggucgccaagaaccucaacgagucccugaucgaccugcaggagcucgggaaguacgagcaguacaucaaguggccgugguacaucuggcugggcuucaucgccggccugaucgcgaucgugauggugaccaucaugcucugcugcaugaccagcugcugcuccugccugaaggggugcugcagcugcggcuccugcugcaaguucgacgaggacgacagcgagcccguccugaagggggugaagcuccacuacacgugaggacuaguuauaagacugacuagcccgaugggccucccaacgggcccuccuccccuccuugcaccgagauuaauaaaaaaaaaaaaaaaaaaaaaaaaaaaaaaaaaaaaaaaaaaaaaaaaaaaaaaaaaaaaaaaaugcaucccccccccccccccccccccccccccccccaaaggcucuuuucagagccaccagaauu

SEQ ID NO: 22821 - RNA, 4039 nt, Artificial Sequence
  SARS-CoV-2/Wuhan/WIV05/2019__EPI_ISL_402128 spike protein mRNA gc (1-1273)(K986P_V987P_A222V_D614G) R10277
aggagaaagcuuaccauguucguguuccugguccuccugccccuggugagcucccagugcgugaaccucaccacccgcacgcagcugccgcccgccuacaccaacagcuucacccggggcgucuacuaccccgacaagguguuccgcuccagcgugcugcacuccacccaggaccucuuccugcccuucuucagcaacgucacgugguuccacgccauccacguguccgggaccaacggcaccaagcgguucgacaacccggugcugcccuucaacgacggggucuacuucgcgagcaccgagaaguccaacaucauccgcggcuggaucuucgggacgacccucgacagcaagacccagucccugcugaucgugaacaacgccaccaacguggucaucaaggugugcgaguuccaguucugcaacgaccccuuccucggcguguacuaccacaagaacaacaagagcuggauggaguccgaguuccgggucuacagcuccgccaacaacugcacguucgaguacgugagccagcccuuccugauggaccuggagggcaagcaggggaacuucaagaaccuccgcgaguucguguucaagaacaucgacggcuacuucaagaucuacuccaagcacaccccgaucaaccugguccgggaccugccccagggguucagcguccucgagccccugguggaccugcccaucggcaucaacaucacccgcuuccagacccuccuggcccugcaccgguccuaccucacgccgggggacagcagcuccggcuggaccgcgggcgccgccgccuacuacgugggguaccugcagccccgcaccuuccugcucaaguacaacgagaacggcaccaucacggacgcggucgacugcgcccuggacccccugagcgagaccaagugcacccucaaguccuucaccguggagaaggggaucuaccagacgagcaacuuccgggugcagcccaccgaguccaucguccgcuucccgaacaucaccaaccugugccccuucggcgagguguucaacgccacccgguucgccagcgucuacgccuggaaccgcaagcggaucuccaacugcguggcggacuacagcgugcuguacaacuccgccagcuucuccacguucaagugcuacggcgucagccccaccaagcucaacgaccugugcuucaccaacguguacgccgacuccuucgugauccgcggggacgagguccggcagaucgcccccggccagaccgggaagaucgccgacuacaacuacaagcugccggacgacuucacgggcugcgugaucgcguggaacagcaacaaccucgacuccaaggucgggggcaacuacaacuaccuguaccgccuguuccgcaagagcaaccucaagcccuucgagcgggacaucuccaccgagaucuaccaggccggcagcacccccugcaacgggguggagggcuucaacugcuacuucccccugcaguccuacggguuccagccgaccaacggcgugggguaccagcccuaccggguggucgugcugagcuucgagcuccugcacgcccccgccacggugugcggccccaagaaguccaccaaccuggucaagaacaagugcgugaacuucaacuucaacggccucaccgggaccggcgugcugaccgagagcaacaagaaguuccugccguuccagcaguucgggcgcgacaucgccgacacgaccgacgcgguccgcgacccccagacccuggagauccucgacaucacccccugcagcuucggcgggguguccgugaucacgccgggcaccaacaccagcaaccaggucgccgugcuguaccagggcgugaacugcaccgagguccccguggccauccacgccgaccagcugacgcccaccuggcggguguacuccaccggcagcaacgucuuccagacccgcgccgggugccucaucggcgcggagcacgugaacaacuccuacgagugcgacauccccaucggggccggcaucugcgccagcuaccagacgcagaccaacuccccgcggcgcgcccggagcguggcgucccagagcaucaucgccuacaccaugucccugggcgccgagaacagcgucgccuacuccaacaacagcaucgccauccccaccaacuucacgaucuccgugaccaccgagauccugcccgugagcaugaccaagacgagcgucgacugcaccauguacaucugcggggacuccaccgagugcagcaaccuccugcugcaguacggcuccuucugcacccagcucaaccgcgcgcugacggggaucgccguggagcaggacaagaacacccaggagguguucgcccaggucaagcagaucuacaagacgcccccgaucaaggacuucggcggguucaacuucagccagauccugcccgaccccuccaagcccagcaagcgguccuucaucgaggaccuccuguucaacaaggugacccuggccgacgccggcuucaucaagcaguacggcgacugccucggggacaucgcggcccgcgaccugaucugcgcccagaaguucaacggccugaccgugcucccgccccugcugaccgacgagaugaucgcccaguacaccagcgcccuccuggcggggaccaucacguccggcuggaccuucggggccggcgccgcccugcagauccccuucgcgaugcagauggccuaccgguucaacggcaucggggucacccagaacgugcucuacgagaaccagaagcugaucgccaaccaguucaacagcgccaucggcaagauccaggacucccugagcuccaccgccagcgcgcucgggaagcugcaggacguggucaaccagaacgcccaggcccugaacacgcucgugaagcagcuguccagcaacuucggcgccaucuccagcgugcugaacgacauccucucccgccuggacccgcccgaggccgaggugcagaucgaccggcugaucaccgggcgccuccagagccugcagaccuacgugacccagcagcugauccgggcggccgagauccgcgccagcgccaaccucgccgcgaccaagauguccgagugcguccugggccagagcaagcggguggacuucugcggcaagggguaccaccugauguccuucccccagagcgccccgcacggcguggucuuccuccacgugacguacguccccgcccaggagaagaacuucaccaccgcccccgcgaucugccacgacgggaaggcccacuucccccgcgagggcguguucguguccaacgggacccacugguucgucacgcagcggaacuucuacgagccgcagaucaucaccaccgacaacaccuucgugagcggcaacugcgacguggucaucggcaucgugaacaacacgguguacgacccccugcagcccgagcuggacuccuucaaggaggagcucgacaaguacuucaagaaccacaccagccccgacgucgaccugggggacaucuccggcaucaacgccagcguggugaacauccagaaggagaucgaccgccugaacgaggucgccaagaaccucaacgagucccugaucgaccugcaggagcucgggaaguacgagcaguacaucaaguggccgugguacaucuggcugggcuucaucgccggccugaucgcgaucgugauggugaccaucaugcucugcugcaugaccagcugcugcuccugccugaaggggugcugcagcugcggcuccugcugcaaguucgacgaggacgacagcgagcccguccugaagggggugaagcuccacuacacgugaggacuaguuauaagacugacuagcccgaugggccucccaacgggcccuccuccccuccuugcaccgagauuaauaaaaaaaaaaaaaaaaaaaaaaaaaaaaaaaaaaaaaaaaaaaaaaaaaaaaaaaaaaaaaaaaugcaucccccccccccccccccccccccccccccccaaaggcucuuuucagagccaccagaauu

SEQ ID NO: 22822 - RNA, 4039 nt, Artificial Sequence
  SARS-CoV-2/Wuhan/WIV05/2019__EPI_ISL_402128 spike protein mRNA gc (1-1273)(N439K_D614G) R10296
aggagaaagcuuaccauguucguguuccugguccuccugccccuggugagcucccagugcgugaaccucaccacccgcacgcagcugccgcccgccuacaccaacagcuucacccggggcgucuacuaccccgacaagguguuccgcuccagcgugcugcacuccacccaggaccucuuccugcccuucuucagcaacgucacgugguuccacgccauccacguguccgggaccaacggcaccaagcgguucgacaacccggugcugcccuucaacgacggggucuacuucgcgagcaccgagaaguccaacaucauccgcggcuggaucuucgggacgacccucgacagcaagacccagucccugcugaucgugaacaacgccaccaacguggucaucaaggugugcgaguuccaguucugcaacgaccccuuccucggcguguacuaccacaagaacaacaagagcuggauggaguccgaguuccgggucuacagcuccgccaacaacugcacguucgaguacgugagccagcccuuccugauggaccuggagggcaagcaggggaacuucaagaaccuccgcgaguucguguucaagaacaucgacggcuacuucaagaucuacuccaagcacaccccgaucaaccugguccgggaccugccccagggguucagcgcccucgagccccugguggaccugcccaucggcaucaacaucacccgcuuccagacccuccuggcccugcaccgguccuaccucacgccgggggacagcagcuccggcuggaccgcgggcgccgccgccuacuacgugggguaccugcagccccgcaccuuccugcucaaguacaacgagaacggcaccaucacggacgcggucgacugcgcccuggacccccugagcgagaccaagugcacccucaaguccuucaccguggagaaggggaucuaccagacgagcaacuuccgggugcagcccaccgaguccaucguccgcuucccgaacaucaccaaccugugccccuucggcgagguguucaacgccacccgguucgccagcgucuacgccuggaaccgcaagcggaucuccaacugcguggcggacuacagcgugcuguacaacuccgccagcuucuccacguucaagugcuacggcgucagccccaccaagcucaacgaccugugcuucaccaacguguacgccgacuccuucgugauccgcggggacgagguccggcagaucgcccccggccagaccgggaagaucgccgacuacaacuacaagcugccggacgacuucacgggcugcgugaucgcguggaacagcaagaaccucgacuccaaggucgggggcaacuacaacuaccuguaccgccuguuccgcaagagcaaccucaagcccuucgagcgggacaucuccaccgagaucuaccaggccggcagcacccccugcaacgggguggagggcuucaacugcuacuucccccugcaguccuacggguuccagccgaccaacggcgugggguaccagcccuaccggguggucgugcugagcuucgagcuccugcacgcccccgccacggugugcggccccaagaaguccaccaaccuggucaagaacaagugcgugaacuucaacuucaacggccucaccgggaccggcgugcugaccgagagcaacaagaaguuccugccguuccagcaguucgggcgcgacaucgccgacacgaccgacgcgguccgcgacccccagacccuggagauccucgacaucacccccugcagcuucggcgggguguccgugaucacgccgggcaccaacaccagcaaccaggucgccgugcuguaccagggcgugaacugcaccgagguccccguggccauccacgccgaccagcugacgcccaccuggcggguguacuccaccggcagcaacgucuuccagacccgcgccgggugccucaucggcgcggagcacgugaacaacuccuacgagugcgacauccccaucggggccggcaucugcgccagcuaccagacgcagaccaacuccccgcggcgcgcccggagcguggcgucccagagcaucaucgccuacaccaugucccugggcgccgagaacagcgucgccuacuccaacaacagcaucgccauccccaccaacuucacgaucuccgugaccaccgagauccugcccgugagcaugaccaagacgagcgucgacugcaccauguacaucugcggggacuccaccgagugcagcaaccuccugcugcaguacggcuccuucugcacccagcucaaccgcgcgcugacggggaucgccguggagcaggacaagaacacccaggagguguucgcccaggucaagcagaucuacaagacgcccccgaucaaggacuucggcggguucaacuucagccagauccugcccgaccccuccaagcccagcaagcgguccuucaucgaggaccuccuguucaacaaggugacccuggccgacgccggcuucaucaagcaguacggcgacugccucggggacaucgcggcccgcgaccugaucugcgcccagaaguucaacggccugaccgugcucccgccccugcugaccgacgagaugaucgcccaguacaccagcgcccuccuggcggggaccaucacguccggcuggaccuucggggccggcgccgcccugcagauccccuucgcgaugcagauggccuaccgguucaacggcaucggggucacccagaacgugcucuacgagaaccagaagcugaucgccaaccaguucaacagcgccaucggcaagauccaggacucccugagcuccaccgccagcgcgcucgggaagcugcaggacguggucaaccagaacgcccaggcccugaacacgcucgugaagcagcuguccagcaacuucggcgccaucuccagcgugcugaacgacauccucucccgccuggacaaggucgaggccgaggugcagaucgaccggcugaucaccgggcgccuccagagccugcagaccuacgugacccagcagcugauccgggcggccgagauccgcgccagcgccaaccucgccgcgaccaagauguccgagugcguccugggccagagcaagcggguggacuucugcggcaagggguaccaccugauguccuucccccagagcgccccgcacggcguggucuuccuccacgugacguacguccccgcccaggagaagaacuucaccaccgcccccgcgaucugccacgacgggaaggcccacuucccccgcgagggcguguucguguccaacgggacccacugguucgucacgcagcggaacuucuacgagccgcagaucaucaccaccgacaacaccuucgugagcggcaacugcgacguggucaucggcaucgugaacaacacgguguacgacccccugcagcccgagcuggacuccuucaaggaggagcucgacaaguacuucaagaaccacaccagccccgacgucgaccugggggacaucuccggcaucaacgccagcguggugaacauccagaaggagaucgaccgccugaacgaggucgccaagaaccucaacgagucccugaucgaccugcaggagcucgggaaguacgagcaguacaucaaguggccgugguacaucuggcugggcuucaucgccggccugaucgcgaucgugauggugaccaucaugcucugcugcaugaccagcugcugcuccugccugaaggggugcugcagcugcggcuccugcugcaaguucgacgaggacgacagcgagcccguccugaagggggugaagcuccacuacacgugaggacuaguuauaagacugacuagcccgaugggccucccaacgggcccuccuccccuccuugcaccgagauuaauaaaaaaaaaaaaaaaaaaaaaaaaaaaaaaaaaaaaaaaaaaaaaaaaaaaaaaaaaaaaaaaaugcaucccccccccccccccccccccccccccccccaaaggcucuuuucagagccaccagaauu

SEQ ID NO: 22823 - RNA, 4039 nt, Artificial Sequence
  SARS-CoV-2/Wuhan/WIV05/2019__EPI_ISL_402128 spike protein mRNA gc (1-1273)(K986P_V987P_N439K_D614G) R10297
aggagaaagcuuaccauguucguguuccugguccuccugccccuggugagcucccagugcgugaaccucaccacccgcacgcagcugccgcccgccuacaccaacagcuucacccggggcgucuacuaccccgacaagguguuccgcuccagcgugcugcacuccacccaggaccucuuccugcccuucuucagcaacgucacgugguuccacgccauccacguguccgggaccaacggcaccaagcgguucgacaacccggugcugcccuucaacgacggggucuacuucgcgagcaccgagaaguccaacaucauccgcggcuggaucuucgggacgacccucgacagcaagacccagucccugcugaucgugaacaacgccaccaacguggucaucaaggugugcgaguuccaguucugcaacgaccccuuccucggcguguacuaccacaagaacaacaagagcuggauggaguccgaguuccgggucuacagcuccgccaacaacugcacguucgaguacgugagccagcccuuccugauggaccuggagggcaagcaggggaacuucaagaaccuccgcgaguucguguucaagaacaucgacggcuacuucaagaucuacuccaagcacaccccgaucaaccugguccgggaccugccccagggguucagcgcccucgagccccugguggaccugcccaucggcaucaacaucacccgcuuccagacccuccuggcccugcaccgguccuaccucacgccgggggacagcagcuccggcuggaccgcgggcgccgccgccuacuacgugggguaccugcagccccgcaccuuccugcucaaguacaacgagaacggcaccaucacggacgcggucgacugcgcccuggacccccugagcgagaccaagugcacccucaaguccuucaccguggagaaggggaucuaccagacgagcaacuuccgggugcagcccaccgaguccaucguccgcuucccgaacaucaccaaccugugccccuucggcgagguguucaacgccacccgguucgccagcgucuacgccuggaaccgcaagcggaucuccaacugcguggcggacuacagcgugcuguacaacuccgccagcuucuccacguucaagugcuacggcgucagccccaccaagcucaacgaccugugcuucaccaacguguacgccgacuccuucgugauccgcggggacgagguccggcagaucgcccccggccagaccgggaagaucgccgacuacaacuacaagcugccggacgacuucacgggcugcgugaucgcguggaacagcaagaaccucgacuccaaggucgggggcaacuacaacuaccuguaccgccuguuccgcaagagcaaccucaagcccuucgagcgggacaucuccaccgagaucuaccaggccggcagcacccccugcaacgggguggagggcuucaacugcuacuucccccugcaguccuacggguuccagccgaccaacggcgugggguaccagcccuaccggguggucgugcugagcuucgagcuccugcacgcccccgccacggugugcggccccaagaaguccaccaaccuggucaagaacaagugcgugaacuucaacuucaacggccucaccgggaccggcgugcugaccgagagcaacaagaaguuccugccguuccagcaguucgggcgcgacaucgccgacacgaccgacgcgguccgcgacccccagacccuggagauccucgacaucacccccugcagcuucggcgggguguccgugaucacgccgggcaccaacaccagcaaccaggucgccgugcuguaccagggcgugaacugcaccgagguccccguggccauccacgccgaccagcugacgcccaccuggcggguguacuccaccggcagcaacgucuuccagacccgcgccgggugccucaucggcgcggagcacgugaacaacuccuacgagugcgacauccccaucggggccggcaucugcgccagcuaccagacgcagaccaacuccccgcggcgcgcccggagcguggcgucccagagcaucaucgccuacaccaugucccugggcgccgagaacagcgucgccuacuccaacaacagcaucgccauccccaccaacuucacgaucuccgugaccaccgagauccugcccgugagcaugaccaagacgagcgucgacugcaccauguacaucugcggggacuccaccgagugcagcaaccuccugcugcaguacggcuccuucugcacccagcucaaccgcgcgcugacggggaucgccguggagcaggacaagaacacccaggagguguucgcccaggucaagcagaucuacaagacgcccccgaucaaggacuucggcggguucaacuucagccagauccugcccgaccccuccaagcccagcaagcgguccuucaucgaggaccuccuguucaacaaggugacccuggccgacgccggcuucaucaagcaguacggcgacugccucggggacaucgcggcccgcgaccugaucugcgcccagaaguucaacggccugaccgugcucccgccccugcugaccgacgagaugaucgcccaguacaccagcgcccuccuggcggggaccaucacguccggcuggaccuucggggccggcgccgcccugcagauccccuucgcgaugcagauggccuaccgguucaacggcaucggggucacccagaacgugcucuacgagaaccagaagcugaucgccaaccaguucaacagcgccaucggcaagauccaggacucccugagcuccaccgccagcgcgcucgggaagcugcaggacguggucaaccagaacgcccaggcccugaacacgcucgugaagcagcuguccagcaacuucggcgccaucuccagcgugcugaacgacauccucucccgccuggacccgcccgaggccgaggugcagaucgaccggcugaucaccgggcgccuccagagccugcagaccuacgugacccagcagcugauccgggcggccgagauccgcgccagcgccaaccucgccgcgaccaagauguccgagugcguccugggccagagcaagcggguggacuucugcggcaagggguaccaccugauguccuucccccagagcgccccgcacggcguggucuuccuccacgugacguacguccccgcccaggagaagaacuucaccaccgcccccgcgaucugccacgacgggaaggcccacuucccccgcgagggcguguucguguccaacgggacccacugguucgucacgcagcggaacuucuacgagccgcagaucaucaccaccgacaacaccuucgugagcggcaacugcgacguggucaucggcaucgugaacaacacgguguacgacccccugcagcccgagcuggacuccuucaaggaggagcucgacaaguacuucaagaaccacaccagccccgacgucgaccugggggacaucuccggcaucaacgccagcguggugaacauccagaaggagaucgaccgccugaacgaggucgccaagaaccucaacgagucccugaucgaccugcaggagcucgggaaguacgagcaguacaucaaguggccgugguacaucuggcugggcuucaucgccggccugaucgcgaucgugauggugaccaucaugcucugcugcaugaccagcugcugcuccugccugaaggggugcugcagcugcggcuccugcugcaaguucgacgaggacgacagcgagcccguccugaagggggugaagcuccacuacacgugaggacuaguuauaagacugacuagcccgaugggccucccaacgggcccuccuccccuccuugcaccgagauuaauaaaaaaaaaaaaaaaaaaaaaaaaaaaaaaaaaaaaaaaaaaaaaaaaaaaaaaaaaaaaaaaaugcaucccccccccccccccccccccccccccccccaaaggcucuuuucagagccaccagaauu

SEQ ID NO: 22824 - RNA, 4039 nt, Artificial Sequence
  SARS-CoV-2/Wuhan/WIV05/2019__EPI_ISL_402128 spike protein mRNA gc (1-1273)(S477N_D614G) R10284
aggagaaagcuuaccauguucguguuccugguccuccugccccuggugagcucccagugcgugaaccucaccacccgcacgcagcugccgcccgccuacaccaacagcuucacccggggcgucuacuaccccgacaagguguuccgcuccagcgugcugcacuccacccaggaccucuuccugcccuucuucagcaacgucacgugguuccacgccauccacguguccgggaccaacggcaccaagcgguucgacaacccggugcugcccuucaacgacggggucuacuucgcgagcaccgagaaguccaacaucauccgcggcuggaucuucgggacgacccucgacagcaagacccagucccugcugaucgugaacaacgccaccaacguggucaucaaggugugcgaguuccaguucugcaacgaccccuuccucggcguguacuaccacaagaacaacaagagcuggauggaguccgaguuccgggucuacagcuccgccaacaacugcacguucgaguacgugagccagcccuuccugauggaccuggagggcaagcaggggaacuucaagaaccuccgcgaguucguguucaagaacaucgacggcuacuucaagaucuacuccaagcacaccccgaucaaccugguccgggaccugccccagggguucagcgcccucgagccccugguggaccugcccaucggcaucaacaucacccgcuuccagacccuccuggcccugcaccgguccuaccucacgccgggggacagcagcuccggcuggaccgcgggcgccgccgccuacuacgugggguaccugcagccccgcaccuuccugcucaaguacaacgagaacggcaccaucacggacgcggucgacugcgcccuggacccccugagcgagaccaagugcacccucaaguccuucaccguggagaaggggaucuaccagacgagcaacuuccgggugcagcccaccgaguccaucguccgcuucccgaacaucaccaaccugugccccuucggcgagguguucaacgccacccgguucgccagcgucuacgccuggaaccgcaagcggaucuccaacugcguggcggacuacagcgugcuguacaacuccgccagcuucuccacguucaagugcuacggcgucagccccaccaagcucaacgaccugugcuucaccaacguguacgccgacuccuucgugauccgcggggacgagguccggcagaucgcccccggccagaccgggaagaucgccgacuacaacuacaagcugccggacgacuucacgggcugcgugaucgcguggaacagcaacaaccucgacuccaaggucgggggcaacuacaacuaccuguaccgccuguuccgcaagagcaaccucaagcccuucgagcgggacaucuccaccgagaucuaccaggccggcaacacccccugcaacgggguggagggcuucaacugcuacuucccccugcaguccuacggguuccagccgaccaacggcgugggguaccagcccuaccggguggucgugcugagcuucgagcuccugcacgcccccgccacggugugcggccccaagaaguccaccaaccuggucaagaacaagugcgugaacuucaacuucaacggccucaccgggaccggcgugcugaccgagagcaacaagaaguuccugccguuccagcaguucgggcgcgacaucgccgacacgaccgacgcgguccgcgacccccagacccuggagauccucgacaucacccccugcagcuucggcgggguguccgugaucacgccgggcaccaacaccagcaaccaggucgccgugcuguaccagggcgugaacugcaccgagguccccguggccauccacgccgaccagcugacgcccaccuggcggguguacuccaccggcagcaacgucuuccagacccgcgccgggugccucaucggcgcggagcacgugaacaacuccuacgagugcgacauccccaucggggccggcaucugcgccagcuaccagacgcagaccaacuccccgcggcgcgcccggagcguggcgucccagagcaucaucgccuacaccaugucccugggcgccgagaacagcgucgccuacuccaacaacagcaucgccauccccaccaacuucacgaucuccgugaccaccgagauccugcccgugagcaugaccaagacgagcgucgacugcaccauguacaucugcggggacuccaccgagugcagcaaccuccugcugcaguacggcuccuucugcacccagcucaaccgcgcgcugacggggaucgccguggagcaggacaagaacacccaggagguguucgcccaggucaagcagaucuacaagacgcccccgaucaaggacuucggcggguucaacuucagccagauccugcccgaccccuccaagcccagcaagcgguccuucaucgaggaccuccuguucaacaaggugacccuggccgacgccggcuucaucaagcaguacggcgacugccucggggacaucgcggcccgcgaccugaucugcgcccagaaguucaacggccugaccgugcucccgccccugcugaccgacgagaugaucgcccaguacaccagcgcccuccuggcggggaccaucacguccggcuggaccuucggggccggcgccgcccugcagauccccuucgcgaugcagauggccuaccgguucaacggcaucggggucacccagaacgugcucuacgagaaccagaagcugaucgccaaccaguucaacagcgccaucggcaagauccaggacucccugagcuccaccgccagcgcgcucgggaagcugcaggacguggucaaccagaacgcccaggcccugaacacgcucgugaagcagcuguccagcaacuucggcgccaucuccagcgugcugaacgacauccucucccgccuggacaaggucgaggccgaggugcagaucgaccggcugaucaccgggcgccuccagagccugcagaccuacgugacccagcagcugauccgggcggccgagauccgcgccagcgccaaccucgccgcgaccaagauguccgagugcguccugggccagagcaagcggguggacuucugcggcaagggguaccaccugauguccuucccccagagcgccccgcacggcguggucuuccuccacgugacguacguccccgcccaggagaagaacuucaccaccgcccccgcgaucugccacgacgggaaggcccacuucccccgcgagggcguguucguguccaacgggacccacugguucgucacgcagcggaacuucuacgagccgcagaucaucaccaccgacaacaccuucgugagcggcaacugcgacguggucaucggcaucgugaacaacacgguguacgacccccugcagcccgagcuggacuccuucaaggaggagcucgacaaguacuucaagaaccacaccagccccgacgucgaccugggggacaucuccggcaucaacgccagcguggugaacauccagaaggagaucgaccgccugaacgaggucgccaagaaccucaacgagucccugaucgaccugcaggagcucgggaaguacgagcaguacaucaaguggccgugguacaucuggcugggcuucaucgccggccugaucgcgaucgugauggugaccaucaugcucugcugcaugaccagcugcugcuccugccugaaggggugcugcagcugcggcuccugcugcaaguucgacgaggacgacagcgagcccguccugaagggggugaagcuccacuacacgugaggacuaguuauaagacugacuagcccgaugggccucccaacgggcccuccuccccuccuugcaccgagauuaauaaaaaaaaaaaaaaaaaaaaaaaaaaaaaaaaaaaaaaaaaaaaaaaaaaaaaaaaaaaaaaaaugcaucccccccccccccccccccccccccccccccaaaggcucuuuucagagccaccagaauu

SEQ ID NO: 22825 - RNA, 4039 nt, Artificial Sequence
  SARS-CoV-2/Wuhan/WIV05/2019__EPI_ISL_402128 spike protein mRNA gc (1-1273)(K986P_V987P_S477N_D614G) R10285
aggagaaagcuuaccauguucguguuccugguccuccugccccuggugagcucccagugcgugaaccucaccacccgcacgcagcugccgcccgccuacaccaacagcuucacccggggcgucuacuaccccgacaagguguuccgcuccagcgugcugcacuccacccaggaccucuuccugcccuucuucagcaacgucacgugguuccacgccauccacguguccgggaccaacggcaccaagcgguucgacaacccggugcugcccuucaacgacggggucuacuucgcgagcaccgagaaguccaacaucauccgcggcuggaucuucgggacgacccucgacagcaagacccagucccugcugaucgugaacaacgccaccaacguggucaucaaggugugcgaguuccaguucugcaacgaccccuuccucggcguguacuaccacaagaacaacaagagcuggauggaguccgaguuccgggucuacagcuccgccaacaacugcacguucgaguacgugagccagcccuuccugauggaccuggagggcaagcaggggaacuucaagaaccuccgcgaguucguguucaagaacaucgacggcuacuucaagaucuacuccaagcacaccccgaucaaccugguccgggaccugccccagggguucagcgcccucgagccccugguggaccugcccaucggcaucaacaucacccgcuuccagacccuccuggcccugcaccgguccuaccucacgccgggggacagcagcuccggcuggaccgcgggcgccgccgccuacuacgugggguaccugcagccccgcaccuuccugcucaaguacaacgagaacggcaccaucacggacgcggucgacugcgcccuggacccccugagcgagaccaagugcacccucaaguccuucaccguggagaaggggaucuaccagacgagcaacuuccgggugcagcccaccgaguccaucguccgcuucccgaacaucaccaaccugugccccuucggcgagguguucaacgccacccgguucgccagcgucuacgccuggaaccgcaagcggaucuccaacugcguggcggacuacagcgugcuguacaacuccgccagcuucuccacguucaagugcuacggcgucagccccaccaagcucaacgaccugugcuucaccaacguguacgccgacuccuucgugauccgcggggacgagguccggcagaucgcccccggccagaccgggaagaucgccgacuacaacuacaagcugccggacgacuucacgggcugcgugaucgcguggaacagcaacaaccucgacuccaaggucgggggcaacuacaacuaccuguaccgccuguuccgcaagagcaaccucaagcccuucgagcgggacaucuccaccgagaucuaccaggccggcaacacccccugcaacgggguggagggcuucaacugcuacuucccccugcaguccuacggguuccagccgaccaacggcgugggguaccagcccuaccggguggucgugcugagcuucgagcuccugcacgcccccgccacggugugcggccccaagaaguccaccaaccuggucaagaacaagugcgugaacuucaacuucaacggccucaccgggaccggcgugcugaccgagagcaacaagaaguuccugccguuccagcaguucgggcgcgacaucgccgacacgaccgacgcgguccgcgacccccagacccuggagauccucgacaucacccccugcagcuucggcgggguguccgugaucacgccgggcaccaacaccagcaaccaggucgccgugcuguaccagggcgugaacugcaccgagguccccguggccauccacgccgaccagcugacgcccaccuggcggguguacuccaccggcagcaacgucuuccagacccgcgccgggugccucaucggcgcggagcacgugaacaacuccuacgagugcgacauccccaucggggccggcaucugcgccagcuaccagacgcagaccaacuccccgcggcgcgcccggagcguggcgucccagagcaucaucgccuacaccaugucccugggcgccgagaacagcgucgccuacuccaacaacagcaucgccauccccaccaacuucacgaucuccgugaccaccgagauccugcccgugagcaugaccaagacgagcgucgacugcaccauguacaucugcggggacuccaccgagugcagcaaccuccugcugcaguacggcuccuucugcacccagcucaaccgcgcgcugacggggaucgccguggagcaggacaagaacacccaggagguguucgcccaggucaagcagaucuacaagacgcccccgaucaaggacuucggcggguucaacuucagccagauccugcccgaccccuccaagcccagcaagcgguccuucaucgaggaccuccuguucaacaaggugacccuggccgacgccggcuucaucaagcaguacggcgacugccucggggacaucgcggcccgcgaccugaucugcgcccagaaguucaacggccugaccgugcucccgccccugcugaccgacgagaugaucgcccaguacaccagcgcccuccuggcggggaccaucacguccggcuggaccuucggggccggcgccgcccugcagauccccuucgcgaugcagauggccuaccgguucaacggcaucggggucacccagaacgugcucuacgagaaccagaagcugaucgccaaccaguucaacagcgccaucggcaagauccaggacucccugagcuccaccgccagcgcgcucgggaagcugcaggacguggucaaccagaacgcccaggcccugaacacgcucgugaagcagcuguccagcaacuucggcgccaucuccagcgugcugaacgacauccucucccgccuggacccgcccgaggccgaggugcagaucgaccggcugaucaccgggcgccuccagagccugcagaccuacgugacccagcagcugauccgggcggccgagauccgcgccagcgccaaccucgccgcgaccaagauguccgagugcguccugggccagagcaagcggguggacuucugcggcaagggguaccaccugauguccuucccccagagcgccccgcacggcguggucuuccuccacgugacguacguccccgcccaggagaagaacuucaccaccgcccccgcgaucugccacgacgggaaggcccacuucccccgcgagggcguguucguguccaacgggacccacugguucgucacgcagcggaacuucuacgagccgcagaucaucaccaccgacaacaccuucgugagcggcaacugcgacguggucaucggcaucgugaacaacacgguguacgacccccugcagcccgagcuggacuccuucaaggaggagcucgacaaguacuucaagaaccacaccagccccgacgucgaccugggggacaucuccggcaucaacgccagcguggugaacauccagaaggagaucgaccgccugaacgaggucgccaagaaccucaacgagucccugaucgaccugcaggagcucgggaaguacgagcaguacaucaaguggccgugguacaucuggcugggcuucaucgccggccugaucgcgaucgugauggugaccaucaugcucugcugcaugaccagcugcugcuccugccugaaggggugcugcagcugcggcuccugcugcaaguucgacgaggacgacagcgagcccguccugaagggggugaagcuccacuacacgugaggacuaguuauaagacugacuagcccgaugggccucccaacgggcccuccuccccuccuugcaccgagauuaauaaaaaaaaaaaaaaaaaaaaaaaaaaaaaaaaaaaaaaaaaaaaaaaaaaaaaaaaaaaaaaaaugcaucccccccccccccccccccccccccccccccaaaggcucuuuucagagccaccagaauu

SEQ ID NO: 22826 - RNA, 4039 nt, Artificial Sequence
  SARS-CoV-2/Wuhan/WIV05/2019__EPI_ISL_402128 spike protein mRNA gc (1-1273)(N501Y_D614G) R10350
aggagaaagcuuaccauguucguguuccugguccuccugccccuggugagcucccagugcgugaaccucaccacccgcacgcagcugccgcccgccuacaccaacagcuucacccggggcgucuacuaccccgacaagguguuccgcuccagcgugcugcacuccacccaggaccucuuccugcccuucuucagcaacgucacgugguuccacgccauccacguguccgggaccaacggcaccaagcgguucgacaacccggugcugcccuucaacgacggggucuacuucgcgagcaccgagaaguccaacaucauccgcggcuggaucuucgggacgacccucgacagcaagacccagucccugcugaucgugaacaacgccaccaacguggucaucaaggugugcgaguuccaguucugcaacgaccccuuccucggcguguacuaccacaagaacaacaagagcuggauggaguccgaguuccgggucuacagcuccgccaacaacugcacguucgaguacgugagccagcccuuccugauggaccuggagggcaagcaggggaacuucaagaaccuccgcgaguucguguucaagaacaucgacggcuacuucaagaucuacuccaagcacaccccgaucaaccugguccgggaccugccccagggguucagcgcccucgagccccugguggaccugcccaucggcaucaacaucacccgcuuccagacccuccuggcccugcaccgguccuaccucacgccgggggacagcagcuccggcuggaccgcgggcgccgccgccuacuacgugggguaccugcagccccgcaccuuccugcucaaguacaacgagaacggcaccaucacggacgcggucgacugcgcccuggacccccugagcgagaccaagugcacccucaaguccuucaccguggagaaggggaucuaccagacgagcaacuuccgggugcagcccaccgaguccaucguccgcuucccgaacaucaccaaccugugccccuucggcgagguguucaacgccacccgguucgccagcgucuacgccuggaaccgcaagcggaucuccaacugcguggcggacuacagcgugcuguacaacuccgccagcuucuccacguucaagugcuacggcgucagccccaccaagcucaacgaccugugcuucaccaacguguacgccgacuccuucgugauccgcggggacgagguccggcagaucgcccccggccagaccgggaagaucgccgacuacaacuacaagcugccggacgacuucacgggcugcgugaucgcguggaacagcaacaaccucgacuccaaggucgggggcaacuacaacuaccuguaccgccuguuccgcaagagcaaccucaagcccuucgagcgggacaucuccaccgagaucuaccaggccggcagcacccccugcaacgggguggagggcuucaacugcuacuucccccugcaguccuacggguuccagccgaccuacggcgugggguaccagcccuaccggguggucgugcugagcuucgagcuccugcacgcccccgccacggugugcggccccaagaaguccaccaaccuggucaagaacaagugcgugaacuucaacuucaacggccucaccgggaccggcgugcugaccgagagcaacaagaaguuccugccguuccagcaguucgggcgcgacaucgccgacacgaccgacgcgguccgcgacccccagacccuggagauccucgacaucacccccugcagcuucggcgggguguccgugaucacgccgggcaccaacaccagcaaccaggucgccgugcuguaccagggcgugaacugcaccgagguccccguggccauccacgccgaccagcugacgcccaccuggcggguguacuccaccggcagcaacgucuuccagacccgcgccgggugccucaucggcgcggagcacgugaacaacuccuacgagugcgacauccccaucggggccggcaucugcgccagcuaccagacgcagaccaacuccccgcggcgcgcccggagcguggcgucccagagcaucaucgccuacaccaugucccugggcgccgagaacagcgucgccuacuccaacaacagcaucgccauccccaccaacuucacgaucuccgugaccaccgagauccugcccgugagcaugaccaagacgagcgucgacugcaccauguacaucugcggggacuccaccgagugcagcaaccuccugcugcaguacggcuccuucugcacccagcucaaccgcgcgcugacggggaucgccguggagcaggacaagaacacccaggagguguucgcccaggucaagcagaucuacaagacgcccccgaucaaggacuucggcggguucaacuucagccagauccugcccgaccccuccaagcccagcaagcgguccuucaucgaggaccuccuguucaacaaggugacccuggccgacgccggcuucaucaagcaguacggcgacugccucggggacaucgcggcccgcgaccugaucugcgcccagaaguucaacggccugaccgugcucccgccccugcugaccgacgagaugaucgcccaguacaccagcgcccuccuggcggggaccaucacguccggcuggaccuucggggccggcgccgcccugcagauccccuucgcgaugcagauggccuaccgguucaacggcaucggggucacccagaacgugcucuacgagaaccagaagcugaucgccaaccaguucaacagcgccaucggcaagauccaggacucccugagcuccaccgccagcgcgcucgggaagcugcaggacguggucaaccagaacgcccaggcccugaacacgcucgugaagcagcuguccagcaacuucggcgccaucuccagcgugcugaacgacauccucucccgccuggacaaggucgaggccgaggugcagaucgaccggcugaucaccgggcgccuccagagccugcagaccuacgugacccagcagcugauccgggcggccgagauccgcgccagcgccaaccucgccgcgaccaagauguccgagugcguccugggccagagcaagcggguggacuucugcggcaagggguaccaccugauguccuucccccagagcgccccgcacggcguggucuuccuccacgugacguacguccccgcccaggagaagaacuucaccaccgcccccgcgaucugccacgacgggaaggcccacuucccccgcgagggcguguucguguccaacgggacccacugguucgucacgcagcggaacuucuacgagccgcagaucaucaccaccgacaacaccuucgugagcggcaacugcgacguggucaucggcaucgugaacaacacgguguacgacccccugcagcccgagcuggacuccuucaaggaggagcucgacaaguacuucaagaaccacaccagccccgacgucgaccugggggacaucuccggcaucaacgccagcguggugaacauccagaaggagaucgaccgccugaacgaggucgccaagaaccucaacgagucccugaucgaccugcaggagcucgggaaguacgagcaguacaucaaguggccgugguacaucuggcugggcuucaucgccggccugaucgcgaucgugauggugaccaucaugcucugcugcaugaccagcugcugcuccugccugaaggggugcugcagcugcggcuccugcugcaaguucgacgaggacgacagcgagcccguccugaagggggugaagcuccacuacacgugaggacuaguuauaagacugacuagcccgaugggccucccaacgggcccuccuccccuccuugcaccgagauuaauaaaaaaaaaaaaaaaaaaaaaaaaaaaaaaaaaaaaaaaaaaaaaaaaaaaaaaaaaaaaaaaaugcaucccccccccccccccccccccccccccccccaaaggcucuuuucagagccaccagaauu

SEQ ID NO: 22827 - RNA, 4039 nt, Artificial Sequence
  SARS-CoV-2/Wuhan/WIV05/2019__EPI_ISL_402128 spike protein mRNA gc (1-1273)(K986P_V987P_N501Y_D614G) R10351
aggagaaagcuuaccauguucguguuccugguccuccugccccuggugagcucccagugcgugaaccucaccacccgcacgcagcugccgcccgccuacaccaacagcuucacccggggcgucuacuaccccgacaagguguuccgcuccagcgugcugcacuccacccaggaccucuuccugcccuucuucagcaacgucacgugguuccacgccauccacguguccgggaccaacggcaccaagcgguucgacaacccggugcugcccuucaacgacggggucuacuucgcgagcaccgagaaguccaacaucauccgcggcuggaucuucgggacgacccucgacagcaagacccagucccugcugaucgugaacaacgccaccaacguggucaucaaggugugcgaguuccaguucugcaacgaccccuuccucggcguguacuaccacaagaacaacaagagcuggauggaguccgaguuccgggucuacagcuccgccaacaacugcacguucgaguacgugagccagcccuuccugauggaccuggagggcaagcaggggaacuucaagaaccuccgcgaguucguguucaagaacaucgacggcuacuucaagaucuacuccaagcacaccccgaucaaccugguccgggaccugccccagggguucagcgcccucgagccccugguggaccugcccaucggcaucaacaucacccgcuuccagacccuccuggcccugcaccgguccuaccucacgccgggggacagcagcuccggcuggaccgcgggcgccgccgccuacuacgugggguaccugcagccccgcaccuuccugcucaaguacaacgagaacggcaccaucacggacgcggucgacugcgcccuggacccccugagcgagaccaagugcacccucaaguccuucaccguggagaaggggaucuaccagacgagcaacuuccgggugcagcccaccgaguccaucguccgcuucccgaacaucaccaaccugugccccuucggcgagguguucaacgccacccgguucgccagcgucuacgccuggaaccgcaagcggaucuccaacugcguggcggacuacagcgugcuguacaacuccgccagcuucuccacguucaagugcuacggcgucagccccaccaagcucaacgaccugugcuucaccaacguguacgccgacuccuucgugauccgcggggacgagguccggcagaucgcccccggccagaccgggaagaucgccgacuacaacuacaagcugccggacgacuucacgggcugcgugaucgcguggaacagcaacaaccucgacuccaaggucgggggcaacuacaacuaccuguaccgccuguuccgcaagagcaaccucaagcccuucgagcgggacaucuccaccgagaucuaccaggccggcagcacccccugcaacgggguggagggcuucaacugcuacuucccccugcaguccuacggguuccagccgaccuacggcgugggguaccagcccuaccggguggucgugcugagcuucgagcuccugcacgcccccgccacggugugcggccccaagaaguccaccaaccuggucaagaacaagugcgugaacuucaacuucaacggccucaccgggaccggcgugcugaccgagagcaacaagaaguuccugccguuccagcaguucgggcgcgacaucgccgacacgaccgacgcgguccgcgacccccagacccuggagauccucgacaucacccccugcagcuucggcgggguguccgugaucacgccgggcaccaacaccagcaaccaggucgccgugcuguaccagggcgugaacugcaccgagguccccguggccauccacgccgaccagcugacgcccaccuggcggguguacuccaccggcagcaacgucuuccagacccgcgccgggugccucaucggcgcggagcacgugaacaacuccuacgagugcgacauccccaucggggccggcaucugcgccagcuaccagacgcagaccaacuccccgcggcgcgcccggagcguggcgucccagagcaucaucgccuacaccaugucccugggcgccgagaacagcgucgccuacuccaacaacagcaucgccauccccaccaacuucacgaucuccgugaccaccgagauccugcccgugagcaugaccaagacgagcgucgacugcaccauguacaucugcggggacuccaccgagugcagcaaccuccugcugcaguacggcuccuucugcacccagcucaaccgcgcgcugacggggaucgccguggagcaggacaagaacacccaggagguguucgcccaggucaagcagaucuacaagacgcccccgaucaaggacuucggcggguucaacuucagccagauccugcccgaccccuccaagcccagcaagcgguccuucaucgaggaccuccuguucaacaaggugacccuggccgacgccggcuucaucaagcaguacggcgacugccucggggacaucgcggcccgcgaccugaucugcgcccagaaguucaacggccugaccgugcucccgccccugcugaccgacgagaugaucgcccaguacaccagcgcccuccuggcggggaccaucacguccggcuggaccuucggggccggcgccgcccugcagauccccuucgcgaugcagauggccuaccgguucaacggcaucggggucacccagaacgugcucuacgagaaccagaagcugaucgccaaccaguucaacagcgccaucggcaagauccaggacucccugagcuccaccgccagcgcgcucgggaagcugcaggacguggucaaccagaacgcccaggcccugaacacgcucgugaagcagcuguccagcaacuucggcgccaucuccagcgugcugaacgacauccucucccgccuggacccgcccgaggccgaggugcagaucgaccggcugaucaccgggcgccuccagagccugcagaccuacgugacccagcagcugauccgggcggccgagauccgcgccagcgccaaccucgccgcgaccaagauguccgagugcguccugggccagagcaagcggguggacuucugcggcaagggguaccaccugauguccuucccccagagcgccccgcacggcguggucuuccuccacgugacguacguccccgcccaggagaagaacuucaccaccgcccccgcgaucugccacgacgggaaggcccacuucccccgcgagggcguguucguguccaacgggacccacugguucgucacgcagcggaacuucuacgagccgcagaucaucaccaccgacaacaccuucgugagcggcaacugcgacguggucaucggcaucgugaacaacacgguguacgacccccugcagcccgagcuggacuccuucaaggaggagcucgacaaguacuucaagaaccacaccagccccgacgucgaccugggggacaucuccggcaucaacgccagcguggugaacauccagaaggagaucgaccgccugaacgaggucgccaagaaccucaacgagucccugaucgaccugcaggagcucgggaaguacgagcaguacaucaaguggccgugguacaucuggcugggcuucaucgccggccugaucgcgaucgugauggugaccaucaugcucugcugcaugaccagcugcugcuccugccugaaggggugcugcagcugcggcuccugcugcaaguucgacgaggacgacagcgagcccguccugaagggggugaagcuccacuacacgugaggacuaguuauaagacugacuagcccgaugggccucccaacgggcccuccuccccuccuugcaccgagauuaauaaaaaaaaaaaaaaaaaaaaaaaaaaaaaaaaaaaaaaaaaaaaaaaaaaaaaaaaaaaaaaaaugcaucccccccccccccccccccccccccccccccaaaggcucuuuucagagccaccagaauu

SEQ ID NO: 22828 - RNA, 4033 nt, Artificial Sequence
  SARS-CoV-2/Wuhan/WIV05/2019__EPI_ISL_402128 spike protein mRNA gc (1-1273)(H69del_V70del_D614G) R10272
aggagaaagcuuaccauguucguguuccugguccuccugccccuggugagcucccagugcgugaaccucaccacccgcacgcagcugccgcccgccuacaccaacagcuucacccggggcgucuacuaccccgacaagguguuccgcuccagcgugcugcacuccacccaggaccucuuccugcccuucuucagcaacgucacgugguuccacgccaucuccgggaccaacggcaccaagcgguucgacaacccggugcugcccuucaacgacggggucuacuucgcgagcaccgagaaguccaacaucauccgcggcuggaucuucgggacgacccucgacagcaagacccagucccugcugaucgugaacaacgccaccaacguggucaucaaggugugcgaguuccaguucugcaacgaccccuuccucggcguguacuaccacaagaacaacaagagcuggauggaguccgaguuccgggucuacagcuccgccaacaacugcacguucgaguacgugagccagcccuuccugauggaccuggagggcaagcaggggaacuucaagaaccuccgcgaguucguguucaagaacaucgacggcuacuucaagaucuacuccaagcacaccccgaucaaccugguccgggaccugccccagggguucagcgcccucgagccccugguggaccugcccaucggcaucaacaucacccgcuuccagacccuccuggcccugcaccgguccuaccucacgccgggggacagcagcuccggcuggaccgcgggcgccgccgccuacuacgugggguaccugcagccccgcaccuuccugcucaaguacaacgagaacggcaccaucacggacgcggucgacugcgcccuggacccccugagcgagaccaagugcacccucaaguccuucaccguggagaaggggaucuaccagacgagcaacuuccgggugcagcccaccgaguccaucguccgcuucccgaacaucaccaaccugugccccuucggcgagguguucaacgccacccgguucgccagcgucuacgccuggaaccgcaagcggaucuccaacugcguggcggacuacagcgugcuguacaacuccgccagcuucuccacguucaagugcuacggcgucagccccaccaagcucaacgaccugugcuucaccaacguguacgccgacuccuucgugauccgcggggacgagguccggcagaucgcccccggccagaccgggaagaucgccgacuacaacuacaagcugccggacgacuucacgggcugcgugaucgcguggaacagcaacaaccucgacuccaaggucgggggcaacuacaacuaccuguaccgccuguuccgcaagagcaaccucaagcccuucgagcgggacaucuccaccgagaucuaccaggccggcagcacccccugcaacgggguggagggcuucaacugcuacuucccccugcaguccuacggguuccagccgaccaacggcgugggguaccagcccuaccggguggucgugcugagcuucgagcuccugcacgcccccgccacggugugcggccccaagaaguccaccaaccuggucaagaacaagugcgugaacuucaacuucaacggccucaccgggaccggcgugcugaccgagagcaacaagaaguuccugccguuccagcaguucgggcgcgacaucgccgacacgaccgacgcgguccgcgacccccagacccuggagauccucgacaucacccccugcagcuucggcgggguguccgugaucacgccgggcaccaacaccagcaaccaggucgccgugcuguaccagggcgugaacugcaccgagguccccguggccauccacgccgaccagcugacgcccaccuggcggguguacuccaccggcagcaacgucuuccagacccgcgccgggugccucaucggcgcggagcacgugaacaacuccuacgagugcgacauccccaucggggccggcaucugcgccagcuaccagacgcagaccaacuccccgcggcgcgcccggagcguggcgucccagagcaucaucgccuacaccaugucccugggcgccgagaacagcgucgccuacuccaacaacagcaucgccauccccaccaacuucacgaucuccgugaccaccgagauccugcccgugagcaugaccaagacgagcgucgacugcaccauguacaucugcggggacuccaccgagugcagcaaccuccugcugcaguacggcuccuucugcacccagcucaaccgcgcgcugacggggaucgccguggagcaggacaagaacacccaggagguguucgcccaggucaagcagaucuacaagacgcccccgaucaaggacuucggcggguucaacuucagccagauccugcccgaccccuccaagcccagcaagcgguccuucaucgaggaccuccuguucaacaaggugacccuggccgacgccggcuucaucaagcaguacggcgacugccucggggacaucgcggcccgcgaccugaucugcgcccagaaguucaacggccugaccgugcucccgccccugcugaccgacgagaugaucgcccaguacaccagcgcccuccuggcggggaccaucacguccggcuggaccuucggggccggcgccgcccugcagauccccuucgcgaugcagauggccuaccgguucaacggcaucggggucacccagaacgugcucuacgagaaccagaagcugaucgccaaccaguucaacagcgccaucggcaagauccaggacucccugagcuccaccgccagcgcgcucgggaagcugcaggacguggucaaccagaacgcccaggcccugaacacgcucgugaagcagcuguccagcaacuucggcgccaucuccagcgugcugaacgacauccucucccgccuggacaaggucgaggccgaggugcagaucgaccggcugaucaccgggcgccuccagagccugcagaccuacgugacccagcagcugauccgggcggccgagauccgcgccagcgccaaccucgccgcgaccaagauguccgagugcguccugggccagagcaagcggguggacuucugcggcaagggguaccaccugauguccuucccccagagcgccccgcacggcguggucuuccuccacgugacguacguccccgcccaggagaagaacuucaccaccgcccccgcgaucugccacgacgggaaggcccacuucccccgcgagggcguguucguguccaacgggacccacugguucgucacgcagcggaacuucuacgagccgcagaucaucaccaccgacaacaccuucgugagcggcaacugcgacguggucaucggcaucgugaacaacacgguguacgacccccugcagcccgagcuggacuccuucaaggaggagcucgacaaguacuucaagaaccacaccagccccgacgucgaccugggggacaucuccggcaucaacgccagcguggugaacauccagaaggagaucgaccgccugaacgaggucgccaagaaccucaacgagucccugaucgaccugcaggagcucgggaaguacgagcaguacaucaaguggccgugguacaucuggcugggcuucaucgccggccugaucgcgaucgugauggugaccaucaugcucugcugcaugaccagcugcugcuccugccugaaggggugcugcagcugcggcuccugcugcaaguucgacgaggacgacagcgagcccguccugaagggggugaagcuccacuacacgugaggacuaguuauaagacugacuagcccgaugggccucccaacgggcccuccuccccuccuugcaccgagauuaauaaaaaaaaaaaaaaaaaaaaaaaaaaaaaaaaaaaaaaaaaaaaaaaaaaaaaaaaaaaaaaaaugcaucccccccccccccccccccccccccccccccaaaggcucuuuucagagccaccagaauu

SEQ ID NO: 22829 - RNA, 4033 nt, Artificial Sequence
  SARS-CoV-2/Wuhan/WIV05/2019__EPI_ISL_402128 spike protein mRNA gc (1-1273)(K986P_V987P_H69del_V70del_D614G) R10273
aggagaaagcuuaccauguucguguuccugguccuccugccccuggugagcucccagugcgugaaccucaccacccgcacgcagcugccgcccgccuacaccaacagcuucacccggggcgucuacuaccccgacaagguguuccgcuccagcgugcugcacuccacccaggaccucuuccugcccuucuucagcaacgucacgugguuccacgccaucuccgggaccaacggcaccaagcgguucgacaacccggugcugcccuucaacgacggggucuacuucgcgagcaccgagaaguccaacaucauccgcggcuggaucuucgggacgacccucgacagcaagacccagucccugcugaucgugaacaacgccaccaacguggucaucaaggugugcgaguuccaguucugcaacgaccccuuccucggcguguacuaccacaagaacaacaagagcuggauggaguccgaguuccgggucuacagcuccgccaacaacugcacguucgaguacgugagccagcccuuccugauggaccuggagggcaagcaggggaacuucaagaaccuccgcgaguucguguucaagaacaucgacggcuacuucaagaucuacuccaagcacaccccgaucaaccugguccgggaccugccccagggguucagcgcccucgagccccugguggaccugcccaucggcaucaacaucacccgcuuccagacccuccuggcccugcaccgguccuaccucacgccgggggacagcagcuccggcuggaccgcgggcgccgccgccuacuacgugggguaccugcagccccgcaccuuccugcucaaguacaacgagaacggcaccaucacggacgcggucgacugcgcccuggacccccugagcgagaccaagugcacccucaaguccuucaccguggagaaggggaucuaccagacgagcaacuuccgggugcagcccaccgaguccaucguccgcuucccgaacaucaccaaccugugccccuucggcgagguguucaacgccacccgguucgccagcgucuacgccuggaaccgcaagcggaucuccaacugcguggcggacuacagcgugcuguacaacuccgccagcuucuccacguucaagugcuacggcgucagccccaccaagcucaacgaccugugcuucaccaacguguacgccgacuccuucgugauccgcggggacgagguccggcagaucgcccccggccagaccgggaagaucgccgacuacaacuacaagcugccggacgacuucacgggcugcgugaucgcguggaacagcaacaaccucgacuccaaggucgggggcaacuacaacuaccuguaccgccuguuccgcaagagcaaccucaagcccuucgagcgggacaucuccaccgagaucuaccaggccggcagcacccccugcaacgggguggagggcuucaacugcuacuucccccugcaguccuacggguuccagccgaccaacggcgugggguaccagcccuaccggguggucgugcugagcuucgagcuccugcacgcccccgccacggugugcggccccaagaaguccaccaaccuggucaagaacaagugcgugaacuucaacuucaacggccucaccgggaccggcgugcugaccgagagcaacaagaaguuccugccguuccagcaguucgggcgcgacaucgccgacacgaccgacgcgguccgcgacccccagacccuggagauccucgacaucacccccugcagcuucggcgggguguccgugaucacgccgggcaccaacaccagcaaccaggucgccgugcuguaccagggcgugaacugcaccgagguccccguggccauccacgccgaccagcugacgcccaccuggcggguguacuccaccggcagcaacgucuuccagacccgcgccgggugccucaucggcgcggagcacgugaacaacuccuacgagugcgacauccccaucggggccggcaucugcgccagcuaccagacgcagaccaacuccccgcggcgcgcccggagcguggcgucccagagcaucaucgccuacaccaugucccugggcgccgagaacagcgucgccuacuccaacaacagcaucgccauccccaccaacuucacgaucuccgugaccaccgagauccugcccgugagcaugaccaagacgagcgucgacugcaccauguacaucugcggggacuccaccgagugcagcaaccuccugcugcaguacggcuccuucugcacccagcucaaccgcgcgcugacggggaucgccguggagcaggacaagaacacccaggagguguucgcccaggucaagcagaucuacaagacgcccccgaucaaggacuucggcggguucaacuucagccagauccugcccgaccccuccaagcccagcaagcgguccuucaucgaggaccuccuguucaacaaggugacccuggccgacgccggcuucaucaagcaguacggcgacugccucggggacaucgcggcccgcgaccugaucugcgcccagaaguucaacggccugaccgugcucccgccccugcugaccgacgagaugaucgcccaguacaccagcgcccuccuggcggggaccaucacguccggcuggaccuucggggccggcgccgcccugcagauccccuucgcgaugcagauggccuaccgguucaacggcaucggggucacccagaacgugcucuacgagaaccagaagcugaucgccaaccaguucaacagcgccaucggcaagauccaggacucccugagcuccaccgccagcgcgcucgggaagcugcaggacguggucaaccagaacgcccaggcccugaacacgcucgugaagcagcuguccagcaacuucggcgccaucuccagcgugcugaacgacauccucucccgccuggacccgcccgaggccgaggugcagaucgaccggcugaucaccgggcgccuccagagccugcagaccuacgugacccagcagcugauccgggcggccgagauccgcgccagcgccaaccucgccgcgaccaagauguccgagugcguccugggccagagcaagcggguggacuucugcggcaagggguaccaccugauguccuucccccagagcgccccgcacggcguggucuuccuccacgugacguacguccccgcccaggagaagaacuucaccaccgcccccgcgaucugccacgacgggaaggcccacuucccccgcgagggcguguucguguccaacgggacccacugguucgucacgcagcggaacuucuacgagccgcagaucaucaccaccgacaacaccuucgugagcggcaacugcgacguggucaucggcaucgugaacaacacgguguacgacccccugcagcccgagcuggacuccuucaaggaggagcucgacaaguacuucaagaaccacaccagccccgacgucgaccugggggacaucuccggcaucaacgccagcguggugaacauccagaaggagaucgaccgccugaacgaggucgccaagaaccucaacgagucccugaucgaccugcaggagcucgggaaguacgagcaguacaucaaguggccgugguacaucuggcugggcuucaucgccggccugaucgcgaucgugauggugaccaucaugcucugcugcaugaccagcugcugcuccugccugaaggggugcugcagcugcggcuccugcugcaaguucgacgaggacgacagcgagcccguccugaagggggugaagcuccacuacacgugaggacuaguuauaagacugacuagcccgaugggccucccaacgggcccuccuccccuccuugcaccgagauuaauaaaaaaaaaaaaaaaaaaaaaaaaaaaaaaaaaaaaaaaaaaaaaaaaaaaaaaaaaaaaaaaaugcaucccccccccccccccccccccccccccccccaaaggcucuuuucagagccaccagaauu

SEQ ID NO: 22830 - RNA, 4039 nt, Artificial Sequence
  SARS-CoV-2/Wuhan/WIV05/2019__EPI_ISL_402128 spike protein mRNA gc (1-1273)(Y453F_D614G) R10280
aggagaaagcuuaccauguucguguuccugguccuccugccccuggugagcucccagugcgugaaccucaccacccgcacgcagcugccgcccgccuacaccaacagcuucacccggggcgucuacuaccccgacaagguguuccgcuccagcgugcugcacuccacccaggaccucuuccugcccuucuucagcaacgucacgugguuccacgccauccacguguccgggaccaacggcaccaagcgguucgacaacccggugcugcccuucaacgacggggucuacuucgcgagcaccgagaaguccaacaucauccgcggcuggaucuucgggacgacccucgacagcaagacccagucccugcugaucgugaacaacgccaccaacguggucaucaaggugugcgaguuccaguucugcaacgaccccuuccucggcguguacuaccacaagaacaacaagagcuggauggaguccgaguuccgggucuacagcuccgccaacaacugcacguucgaguacgugagccagcccuuccugauggaccuggagggcaagcaggggaacuucaagaaccuccgcgaguucguguucaagaacaucgacggcuacuucaagaucuacuccaagcacaccccgaucaaccugguccgggaccugccccagggguucagcgcccucgagccccugguggaccugcccaucggcaucaacaucacccgcuuccagacccuccuggcccugcaccgguccuaccucacgccgggggacagcagcuccggcuggaccgcgggcgccgccgccuacuacgugggguaccugcagccccgcaccuuccugcucaaguacaacgagaacggcaccaucacggacgcggucgacugcgcccuggacccccugagcgagaccaagugcacccucaaguccuucaccguggagaaggggaucuaccagacgagcaacuuccgggugcagcccaccgaguccaucguccgcuucccgaacaucaccaaccugugccccuucggcgagguguucaacgccacccgguucgccagcgucuacgccuggaaccgcaagcggaucuccaacugcguggcggacuacagcgugcuguacaacuccgccagcuucuccacguucaagugcuacggcgucagccccaccaagcucaacgaccugugcuucaccaacguguacgccgacuccuucgugauccgcggggacgagguccggcagaucgcccccggccagaccgggaagaucgccgacuacaacuacaagcugccggacgacuucacgggcugcgugaucgcguggaacagcaacaaccucgacuccaaggucgggggcaacuacaacuaccuguuccgccuguuccgcaagagcaaccucaagcccuucgagcgggacaucuccaccgagaucuaccaggccggcagcacccccugcaacgggguggagggcuucaacugcuacuucccccugcaguccuacggguuccagccgaccaacggcgugggguaccagcccuaccggguggucgugcugagcuucgagcuccugcacgcccccgccacggugugcggccccaagaaguccaccaaccuggucaagaacaagugcgugaacuucaacuucaacggccucaccgggaccggcgugcugaccgagagcaacaagaaguuccugccguuccagcaguucgggcgcgacaucgccgacacgaccgacgcgguccgcgacccccagacccuggagauccucgacaucacccccugcagcuucggcgggguguccgugaucacgccgggcaccaacaccagcaaccaggucgccgugcuguaccagggcgugaacugcaccgagguccccguggccauccacgccgaccagcugacgcccaccuggcggguguacuccaccggcagcaacgucuuccagacccgcgccgggugccucaucggcgcggagcacgugaacaacuccuacgagugcgacauccccaucggggccggcaucugcgccagcuaccagacgcagaccaacuccccgcggcgcgcccggagcguggcgucccagagcaucaucgccuacaccaugucccugggcgccgagaacagcgucgccuacuccaacaacagcaucgccauccccaccaacuucacgaucuccgugaccaccgagauccugcccgugagcaugaccaagacgagcgucgacugcaccauguacaucugcggggacuccaccgagugcagcaaccuccugcugcaguacggcuccuucugcacccagcucaaccgcgcgcugacggggaucgccguggagcaggacaagaacacccaggagguguucgcccaggucaagcagaucuacaagacgcccccgaucaaggacuucggcggguucaacuucagccagauccugcccgaccccuccaagcccagcaagcgguccuucaucgaggaccuccuguucaacaaggugacccuggccgacgccggcuucaucaagcaguacggcgacugccucggggacaucgcggcccgcgaccugaucugcgcccagaaguucaacggccugaccgugcucccgccccugcugaccgacgagaugaucgcccaguacaccagcgcccuccuggcggggaccaucacguccggcuggaccuucggggccggcgccgcccugcagauccccuucgcgaugcagauggccuaccgguucaacggcaucggggucacccagaacgugcucuacgagaaccagaagcugaucgccaaccaguucaacagcgccaucggcaagauccaggacucccugagcuccaccgccagcgcgcucgggaagcugcaggacguggucaaccagaacgcccaggcccugaacacgcucgugaagcagcuguccagcaacuucggcgccaucuccagcgugcugaacgacauccucucccgccuggacaaggucgaggccgaggugcagaucgaccggcugaucaccgggcgccuccagagccugcagaccuacgugacccagcagcugauccgggcggccgagauccgcgccagcgccaaccucgccgcgaccaagauguccgagugcguccugggccagagcaagcggguggacuucugcggcaagggguaccaccugauguccuucccccagagcgccccgcacggcguggucuuccuccacgugacguacguccccgcccaggagaagaacuucaccaccgcccccgcgaucugccacgacgggaaggcccacuucccccgcgagggcguguucguguccaacgggacccacugguucgucacgcagcggaacuucuacgagccgcagaucaucaccaccgacaacaccuucgugagcggcaacugcgacguggucaucggcaucgugaacaacacgguguacgacccccugcagcccgagcuggacuccuucaaggaggagcucgacaaguacuucaagaaccacaccagccccgacgucgaccugggggacaucuccggcaucaacgccagcguggugaacauccagaaggagaucgaccgccugaacgaggucgccaagaaccucaacgagucccugaucgaccugcaggagcucgggaaguacgagcaguacaucaaguggccgugguacaucuggcugggcuucaucgccggccugaucgcgaucgugauggugaccaucaugcucugcugcaugaccagcugcugcuccugccugaaggggugcugcagcugcggcuccugcugcaaguucgacgaggacgacagcgagcccguccugaagggggugaagcuccacuacacgugaggacuaguuauaagacugacuagcccgaugggccucccaacgggcccuccuccccuccuugcaccgagauuaauaaaaaaaaaaaaaaaaaaaaaaaaaaaaaaaaaaaaaaaaaaaaaaaaaaaaaaaaaaaaaaaaugcaucccccccccccccccccccccccccccccccaaaggcucuuuucagagccaccagaauu

SEQ ID NO: 22831 - RNA, 4039 nt, Artificial Sequence
  SARS-CoV-2/Wuhan/WIV05/2019__EPI_ISL_402128 spike protein mRNA gc (1-1273)(K986P_V987P_Y453F_D614G) R10281
aggagaaagcuuaccauguucguguuccugguccuccugccccuggugagcucccagugcgugaaccucaccacccgcacgcagcugccgcccgccuacaccaacagcuucacccggggcgucuacuaccccgacaagguguuccgcuccagcgugcugcacuccacccaggaccucuuccugcccuucuucagcaacgucacgugguuccacgccauccacguguccgggaccaacggcaccaagcgguucgacaacccggugcugcccuucaacgacggggucuacuucgcgagcaccgagaaguccaacaucauccgcggcuggaucuucgggacgacccucgacagcaagacccagucccugcugaucgugaacaacgccaccaacguggucaucaaggugugcgaguuccaguucugcaacgaccccuuccucggcguguacuaccacaagaacaacaagagcuggauggaguccgaguuccgggucuacagcuccgccaacaacugcacguucgaguacgugagccagcccuuccugauggaccuggagggcaagcaggggaacuucaagaaccuccgcgaguucguguucaagaacaucgacggcuacuucaagaucuacuccaagcacaccccgaucaaccugguccgggaccugccccagggguucagcgcccucgagccccugguggaccugcccaucggcaucaacaucacccgcuuccagacccuccuggcccugcaccgguccuaccucacgccgggggacagcagcuccggcuggaccgcgggcgccgccgccuacuacgugggguaccugcagccccgcaccuuccugcucaaguacaacgagaacggcaccaucacggacgcggucgacugcgcccuggacccccugagcgagaccaagugcacccucaaguccuucaccguggagaaggggaucuaccagacgagcaacuuccgggugcagcccaccgaguccaucguccgcuucccgaacaucaccaaccugugccccuucggcgagguguucaacgccacccgguucgccagcgucuacgccuggaaccgcaagcggaucuccaacugcguggcggacuacagcgugcuguacaacuccgccagcuucuccacguucaagugcuacggcgucagccccaccaagcucaacgaccugugcuucaccaacguguacgccgacuccuucgugauccgcggggacgagguccggcagaucgcccccggccagaccgggaagaucgccgacuacaacuacaagcugccggacgacuucacgggcugcgugaucgcguggaacagcaacaaccucgacuccaaggucgggggcaacuacaacuaccuguuccgccuguuccgcaagagcaaccucaagcccuucgagcgggacaucuccaccgagaucuaccaggccggcagcacccccugcaacgggguggagggcuucaacugcuacuucccccugcaguccuacggguuccagccgaccaacggcgugggguaccagcccuaccggguggucgugcugagcuucgagcuccugcacgcccccgccacggugugcggccccaagaaguccaccaaccuggucaagaacaagugcgugaacuucaacuucaacggccucaccgggaccggcgugcugaccgagagcaacaagaaguuccugccguuccagcaguucgggcgcgacaucgccgacacgaccgacgcgguccgcgacccccagacccuggagauccucgacaucacccccugcagcuucggcgggguguccgugaucacgccgggcaccaacaccagcaaccaggucgccgugcuguaccagggcgugaacugcaccgagguccccguggccauccacgccgaccagcugacgcccaccuggcggguguacuccaccggcagcaacgucuuccagacccgcgccgggugccucaucggcgcggagcacgugaacaacuccuacgagugcgacauccccaucggggccggcaucugcgccagcuaccagacgcagaccaacuccccgcggcgcgcccggagcguggcgucccagagcaucaucgccuacaccaugucccugggcgccgagaacagcgucgccuacuccaacaacagcaucgccauccccaccaacuucacgaucuccgugaccaccgagauccugcccgugagcaugaccaagacgagcgucgacugcaccauguacaucugcggggacuccaccgagugcagcaaccuccugcugcaguacggcuccuucugcacccagcucaaccgcgcgcugacggggaucgccguggagcaggacaagaacacccaggagguguucgcccaggucaagcagaucuacaagacgcccccgaucaaggacuucggcggguucaacuucagccagauccugcccgaccccuccaagcccagcaagcgguccuucaucgaggaccuccuguucaacaaggugacccuggccgacgccggcuucaucaagcaguacggcgacugccucggggacaucgcggcccgcgaccugaucugcgcccagaaguucaacggccugaccgugcucccgccccugcugaccgacgagaugaucgcccaguacaccagcgcccuccuggcggggaccaucacguccggcuggaccuucggggccggcgccgcccugcagauccccuucgcgaugcagauggccuaccgguucaacggcaucggggucacccagaacgugcucuacgagaaccagaagcugaucgccaaccaguucaacagcgccaucggcaagauccaggacucccugagcuccaccgccagcgcgcucgggaagcugcaggacguggucaaccagaacgcccaggcccugaacacgcucgugaagcagcuguccagcaacuucggcgccaucuccagcgugcugaacgacauccucucccgccuggacccgcccgaggccgaggugcagaucgaccggcugaucaccgggcgccuccagagccugcagaccuacgugacccagcagcugauccgggcggccgagauccgcgccagcgccaaccucgccgcgaccaagauguccgagugcguccugggccagagcaagcggguggacuucugcggcaagggguaccaccugauguccuucccccagagcgccccgcacggcguggucuuccuccacgugacguacguccccgcccaggagaagaacuucaccaccgcccccgcgaucugccacgacgggaaggcccacuucccccgcgagggcguguucguguccaacgggacccacugguucgucacgcagcggaacuucuacgagccgcagaucaucaccaccgacaacaccuucgugagcggcaacugcgacguggucaucggcaucgugaacaacacgguguacgacccccugcagcccgagcuggacuccuucaaggaggagcucgacaaguacuucaagaaccacaccagccccgacgucgaccugggggacaucuccggcaucaacgccagcguggugaacauccagaaggagaucgaccgccugaacgaggucgccaagaaccucaacgagucccugaucgaccugcaggagcucgggaaguacgagcaguacaucaaguggccgugguacaucuggcugggcuucaucgccggccugaucgcgaucgugauggugaccaucaugcucugcugcaugaccagcugcugcuccugccugaaggggugcugcagcugcggcuccugcugcaaguucgacgaggacgacagcgagcccguccugaagggggugaagcuccacuacacgugaggacuaguuauaagacugacuagcccgaugggccucccaacgggcccuccuccccuccuugcaccgagauuaauaaaaaaaaaaaaaaaaaaaaaaaaaaaaaaaaaaaaaaaaaaaaaaaaaaaaaaaaaaaaaaaaugcaucccccccccccccccccccccccccccccccaaaggcucuuuucagagccaccagaauu

SEQ ID NO: 22832 - RNA, 4039 nt, Artificial Sequence
  SARS-CoV-2/Wuhan/WIV05/2019__EPI_ISL_402128 spike protein mRNA gc (1-1273)(D614G_I692V) R10288
aggagaaagcuuaccauguucguguuccugguccuccugccccuggugagcucccagugcgugaaccucaccacccgcacgcagcugccgcccgccuacaccaacagcuucacccggggcgucuacuaccccgacaagguguuccgcuccagcgugcugcacuccacccaggaccucuuccugcccuucuucagcaacgucacgugguuccacgccauccacguguccgggaccaacggcaccaagcgguucgacaacccggugcugcccuucaacgacggggucuacuucgcgagcaccgagaaguccaacaucauccgcggcuggaucuucgggacgacccucgacagcaagacccagucccugcugaucgugaacaacgccaccaacguggucaucaaggugugcgaguuccaguucugcaacgaccccuuccucggcguguacuaccacaagaacaacaagagcuggauggaguccgaguuccgggucuacagcuccgccaacaacugcacguucgaguacgugagccagcccuuccugauggaccuggagggcaagcaggggaacuucaagaaccuccgcgaguucguguucaagaacaucgacggcuacuucaagaucuacuccaagcacaccccgaucaaccugguccgggaccugccccagggguucagcgcccucgagccccugguggaccugcccaucggcaucaacaucacccgcuuccagacccuccuggcccugcaccgguccuaccucacgccgggggacagcagcuccggcuggaccgcgggcgccgccgccuacuacgugggguaccugcagccccgcaccuuccugcucaaguacaacgagaacggcaccaucacggacgcggucgacugcgcccuggacccccugagcgagaccaagugcacccucaaguccuucaccguggagaaggggaucuaccagacgagcaacuuccgggugcagcccaccgaguccaucguccgcuucccgaacaucaccaaccugugccccuucggcgagguguucaacgccacccgguucgccagcgucuacgccuggaaccgcaagcggaucuccaacugcguggcggacuacagcgugcuguacaacuccgccagcuucuccacguucaagugcuacggcgucagccccaccaagcucaacgaccugugcuucaccaacguguacgccgacuccuucgugauccgcggggacgagguccggcagaucgcccccggccagaccgggaagaucgccgacuacaacuacaagcugccggacgacuucacgggcugcgugaucgcguggaacagcaacaaccucgacuccaaggucgggggcaacuacaacuaccuguaccgccuguuccgcaagagcaaccucaagcccuucgagcgggacaucuccaccgagaucuaccaggccggcagcacccccugcaacgggguggagggcuucaacugcuacuucccccugcaguccuacggguuccagccgaccaacggcgugggguaccagcccuaccggguggucgugcugagcuucgagcuccugcacgcccccgccacggugugcggccccaagaaguccaccaaccuggucaagaacaagugcgugaacuucaacuucaacggccucaccgggaccggcgugcugaccgagagcaacaagaaguuccugccguuccagcaguucgggcgcgacaucgccgacacgaccgacgcgguccgcgacccccagacccuggagauccucgacaucacccccugcagcuucggcgggguguccgugaucacgccgggcaccaacaccagcaaccaggucgccgugcuguaccagggcgugaacugcaccgagguccccguggccauccacgccgaccagcugacgcccaccuggcggguguacuccaccggcagcaacgucuuccagacccgcgccgggugccucaucggcgcggagcacgugaacaacuccuacgagugcgacauccccaucggggccggcaucugcgccagcuaccagacgcagaccaacuccccgcggcgcgcccggagcguggcgucccagagcgucaucgccuacaccaugucccugggcgccgagaacagcgucgccuacuccaacaacagcaucgccauccccaccaacuucacgaucuccgugaccaccgagauccugcccgugagcaugaccaagacgagcgucgacugcaccauguacaucugcggggacuccaccgagugcagcaaccuccugcugcaguacggcuccuucugcacccagcucaaccgcgcgcugacggggaucgccguggagcaggacaagaacacccaggagguguucgcccaggucaagcagaucuacaagacgcccccgaucaaggacuucggcggguucaacuucagccagauccugcccgaccccuccaagcccagcaagcgguccuucaucgaggaccuccuguucaacaaggugacccuggccgacgccggcuucaucaagcaguacggcgacugccucggggacaucgcggcccgcgaccugaucugcgcccagaaguucaacggccugaccgugcucccgccccugcugaccgacgagaugaucgcccaguacaccagcgcccuccuggcggggaccaucacguccggcuggaccuucggggccggcgccgcccugcagauccccuucgcgaugcagauggccuaccgguucaacggcaucggggucacccagaacgugcucuacgagaaccagaagcugaucgccaaccaguucaacagcgccaucggcaagauccaggacucccugagcuccaccgccagcgcgcucgggaagcugcaggacguggucaaccagaacgcccaggcccugaacacgcucgugaagcagcuguccagcaacuucggcgccaucuccagcgugcugaacgacauccucucccgccuggacaaggucgaggccgaggugcagaucgaccggcugaucaccgggcgccuccagagccugcagaccuacgugacccagcagcugauccgggcggccgagauccgcgccagcgccaaccucgccgcgaccaagauguccgagugcguccugggccagagcaagcggguggacuucugcggcaagggguaccaccugauguccuucccccagagcgccccgcacggcguggucuuccuccacgugacguacguccccgcccaggagaagaacuucaccaccgcccccgcgaucugccacgacgggaaggcccacuucccccgcgagggcguguucguguccaacgggacccacugguucgucacgcagcggaacuucuacgagccgcagaucaucaccaccgacaacaccuucgugagcggcaacugcgacguggucaucggcaucgugaacaacacgguguacgacccccugcagcccgagcuggacuccuucaaggaggagcucgacaaguacuucaagaaccacaccagccccgacgucgaccugggggacaucuccggcaucaacgccagcguggugaacauccagaaggagaucgaccgccugaacgaggucgccaagaaccucaacgagucccugaucgaccugcaggagcucgggaaguacgagcaguacaucaaguggccgugguacaucuggcugggcuucaucgccggccugaucgcgaucgugauggugaccaucaugcucugcugcaugaccagcugcugcuccugccugaaggggugcugcagcugcggcuccugcugcaaguucgacgaggacgacagcgagcccguccugaagggggugaagcuccacuacacgugaggacuaguuauaagacugacuagcccgaugggccucccaacgggcccuccuccccuccuugcaccgagauuaauaaaaaaaaaaaaaaaaaaaaaaaaaaaaaaaaaaaaaaaaaaaaaaaaaaaaaaaaaaaaaaaaugcaucccccccccccccccccccccccccccccccaaaggcucuuuucagagccaccagaauu

SEQ ID NO: 22833 - RNA, 4039 nt, Artificial Sequence
  SARS-CoV-2/Wuhan/WIV05/2019__EPI_ISL_402128 spike protein mRNA gc (1-1273)(K986P_V987P_D614G_I692V) R10289
aggagaaagcuuaccauguucguguuccugguccuccugccccuggugagcucccagugcgugaaccucaccacccgcacgcagcugccgcccgccuacaccaacagcuucacccggggcgucuacuaccccgacaagguguuccgcuccagcgugcugcacuccacccaggaccucuuccugcccuucuucagcaacgucacgugguuccacgccauccacguguccgggaccaacggcaccaagcgguucgacaacccggugcugcccuucaacgacggggucuacuucgcgagcaccgagaaguccaacaucauccgcggcuggaucuucgggacgacccucgacagcaagacccagucccugcugaucgugaacaacgccaccaacguggucaucaaggugugcgaguuccaguucugcaacgaccccuuccucggcguguacuaccacaagaacaacaagagcuggauggaguccgaguuccgggucuacagcuccgccaacaacugcacguucgaguacgugagccagcccuuccugauggaccuggagggcaagcaggggaacuucaagaaccuccgcgaguucguguucaagaacaucgacggcuacuucaagaucuacuccaagcacaccccgaucaaccugguccgggaccugccccagggguucagcgcccucgagccccugguggaccugcccaucggcaucaacaucacccgcuuccagacccuccuggcccugcaccgguccuaccucacgccgggggacagcagcuccggcuggaccgcgggcgccgccgccuacuacgugggguaccugcagccccgcaccuuccugcucaaguacaacgagaacggcaccaucacggacgcggucgacugcgcccuggacccccugagcgagaccaagugcacccucaaguccuucaccguggagaaggggaucuaccagacgagcaacuuccgggugcagcccaccgaguccaucguccgcuucccgaacaucaccaaccugugccccuucggcgagguguucaacgccacccgguucgccagcgucuacgccuggaaccgcaagcggaucuccaacugcguggcggacuacagcgugcuguacaacuccgccagcuucuccacguucaagugcuacggcgucagccccaccaagcucaacgaccugugcuucaccaacguguacgccgacuccuucgugauccgcggggacgagguccggcagaucgcccccggccagaccgggaagaucgccgacuacaacuacaagcugccggacgacuucacgggcugcgugaucgcguggaacagcaacaaccucgacuccaaggucgggggcaacuacaacuaccuguaccgccuguuccgcaagagcaaccucaagcccuucgagcgggacaucuccaccgagaucuaccaggccggcagcacccccugcaacgggguggagggcuucaacugcuacuucccccugcaguccuacggguuccagccgaccaacggcgugggguaccagcccuaccggguggucgugcugagcuucgagcuccugcacgcccccgccacggugugcggccccaagaaguccaccaaccuggucaagaacaagugcgugaacuucaacuucaacggccucaccgggaccggcgugcugaccgagagcaacaagaaguuccugccguuccagcaguucgggcgcgacaucgccgacacgaccgacgcgguccgcgacccccagacccuggagauccucgacaucacccccugcagcuucggcgggguguccgugaucacgccgggcaccaacaccagcaaccaggucgccgugcuguaccagggcgugaacugcaccgagguccccguggccauccacgccgaccagcugacgcccaccuggcggguguacuccaccggcagcaacgucuuccagacccgcgccgggugccucaucggcgcggagcacgugaacaacuccuacgagugcgacauccccaucggggccggcaucugcgccagcuaccagacgcagaccaacuccccgcggcgcgcccggagcguggcgucccagagcgucaucgccuacaccaugucccugggcgccgagaacagcgucgccuacuccaacaacagcaucgccauccccaccaacuucacgaucuccgugaccaccgagauccugcccgugagcaugaccaagacgagcgucgacugcaccauguacaucugcggggacuccaccgagugcagcaaccuccugcugcaguacggcuccuucugcacccagcucaaccgcgcgcugacggggaucgccguggagcaggacaagaacacccaggagguguucgcccaggucaagcagaucuacaagacgcccccgaucaaggacuucggcggguucaacuucagccagauccugcccgaccccuccaagcccagcaagcgguccuucaucgaggaccuccuguucaacaaggugacccuggccgacgccggcuucaucaagcaguacggcgacugccucggggacaucgcggcccgcgaccugaucugcgcccagaaguucaacggccugaccgugcucccgccccugcugaccgacgagaugaucgcccaguacaccagcgcccuccuggcggggaccaucacguccggcuggaccuucggggccggcgccgcccugcagauccccuucgcgaugcagauggccuaccgguucaacggcaucggggucacccagaacgugcucuacgagaaccagaagcugaucgccaaccaguucaacagcgccaucggcaagauccaggacucccugagcuccaccgccagcgcgcucgggaagcugcaggacguggucaaccagaacgcccaggcccugaacacgcucgugaagcagcuguccagcaacuucggcgccaucuccagcgugcugaacgacauccucucccgccuggacccgcccgaggccgaggugcagaucgaccggcugaucaccgggcgccuccagagccugcagaccuacgugacccagcagcugauccgggcggccgagauccgcgccagcgccaaccucgccgcgaccaagauguccgagugcguccugggccagagcaagcggguggacuucugcggcaagggguaccaccugauguccuucccccagagcgccccgcacggcguggucuuccuccacgugacguacguccccgcccaggagaagaacuucaccaccgcccccgcgaucugccacgacgggaaggcccacuucccccgcgagggcguguucguguccaacgggacccacugguucgucacgcagcggaacuucuacgagccgcagaucaucaccaccgacaacaccuucgugagcggcaacugcgacguggucaucggcaucgugaacaacacgguguacgacccccugcagcccgagcuggacuccuucaaggaggagcucgacaaguacuucaagaaccacaccagccccgacgucgaccugggggacaucuccggcaucaacgccagcguggugaacauccagaaggagaucgaccgccugaacgaggucgccaagaaccucaacgagucccugaucgaccugcaggagcucgggaaguacgagcaguacaucaaguggccgugguacaucuggcugggcuucaucgccggccugaucgcgaucgugauggugaccaucaugcucugcugcaugaccagcugcugcuccugccugaaggggugcugcagcugcggcuccugcugcaaguucgacgaggacgacagcgagcccguccugaagggggugaagcuccacuacacgugaggacuaguuauaagacugacuagcccgaugggccucccaacgggcccuccuccccuccuugcaccgagauuaauaaaaaaaaaaaaaaaaaaaaaaaaaaaaaaaaaaaaaaaaaaaaaaaaaaaaaaaaaaaaaaaaugcaucccccccccccccccccccccccccccccccaaaggcucuuuucagagccaccagaauu

SEQ ID NO: 22834 - RNA, 4039 nt, Artificial Sequence
  SARS-CoV-2/Wuhan/WIV05/2019__EPI_ISL_402128 spike protein mRNA gc (1-1273)(D614G_M1229I) R10344
aggagaaagcuuaccauguucguguuccugguccuccugccccuggugagcucccagugcgugaaccucaccacccgcacgcagcugccgcccgccuacaccaacagcuucacccggggcgucuacuaccccgacaagguguuccgcuccagcgugcugcacuccacccaggaccucuuccugcccuucuucagcaacgucacgugguuccacgccauccacguguccgggaccaacggcaccaagcgguucgacaacccggugcugcccuucaacgacggggucuacuucgcgagcaccgagaaguccaacaucauccgcggcuggaucuucgggacgacccucgacagcaagacccagucccugcugaucgugaacaacgccaccaacguggucaucaaggugugcgaguuccaguucugcaacgaccccuuccucggcguguacuaccacaagaacaacaagagcuggauggaguccgaguuccgggucuacagcuccgccaacaacugcacguucgaguacgugagccagcccuuccugauggaccuggagggcaagcaggggaacuucaagaaccuccgcgaguucguguucaagaacaucgacggcuacuucaagaucuacuccaagcacaccccgaucaaccugguccgggaccugccccagggguucagcgcccucgagccccugguggaccugcccaucggcaucaacaucacccgcuuccagacccuccuggcccugcaccgguccuaccucacgccgggggacagcagcuccggcuggaccgcgggcgccgccgccuacuacgugggguaccugcagccccgcaccuuccugcucaaguacaacgagaacggcaccaucacggacgcggucgacugcgcccuggacccccugagcgagaccaagugcacccucaaguccuucaccguggagaaggggaucuaccagacgagcaacuuccgggugcagcccaccgaguccaucguccgcuucccgaacaucaccaaccugugccccuucggcgagguguucaacgccacccgguucgccagcgucuacgccuggaaccgcaagcggaucuccaacugcguggcggacuacagcgugcuguacaacuccgccagcuucuccacguucaagugcuacggcgucagccccaccaagcucaacgaccugugcuucaccaacguguacgccgacuccuucgugauccgcggggacgagguccggcagaucgcccccggccagaccgggaagaucgccgacuacaacuacaagcugccggacgacuucacgggcugcgugaucgcguggaacagcaacaaccucgacuccaaggucgggggcaacuacaacuaccuguaccgccuguuccgcaagagcaaccucaagcccuucgagcgggacaucuccaccgagaucuaccaggccggcagcacccccugcaacgggguggagggcuucaacugcuacuucccccugcaguccuacggguuccagccgaccaacggcgugggguaccagcccuaccggguggucgugcugagcuucgagcuccugcacgcccccgccacggugugcggccccaagaaguccaccaaccuggucaagaacaagugcgugaacuucaacuucaacggccucaccgggaccggcgugcugaccgagagcaacaagaaguuccugccguuccagcaguucgggcgcgacaucgccgacacgaccgacgcgguccgcgacccccagacccuggagauccucgacaucacccccugcagcuucggcgggguguccgugaucacgccgggcaccaacaccagcaaccaggucgccgugcuguaccagggcgugaacugcaccgagguccccguggccauccacgccgaccagcugacgcccaccuggcggguguacuccaccggcagcaacgucuuccagacccgcgccgggugccucaucggcgcggagcacgugaacaacuccuacgagugcgacauccccaucggggccggcaucugcgccagcuaccagacgcagaccaacuccccgcggcgcgcccggagcguggcgucccagagcaucaucgccuacaccaugucccugggcgccgagaacagcgucgccuacuccaacaacagcaucgccauccccaccaacuucacgaucuccgugaccaccgagauccugcccgugagcaugaccaagacgagcgucgacugcaccauguacaucugcggggacuccaccgagugcagcaaccuccugcugcaguacggcuccuucugcacccagcucaaccgcgcgcugacggggaucgccguggagcaggacaagaacacccaggagguguucgcccaggucaagcagaucuacaagacgcccccgaucaaggacuucggcggguucaacuucagccagauccugcccgaccccuccaagcccagcaagcgguccuucaucgaggaccuccuguucaacaaggugacccuggccgacgccggcuucaucaagcaguacggcgacugccucggggacaucgcggcccgcgaccugaucugcgcccagaaguucaacggccugaccgugcucccgccccugcugaccgacgagaugaucgcccaguacaccagcgcccuccuggcggggaccaucacguccggcuggaccuucggggccggcgccgcccugcagauccccuucgcgaugcagauggccuaccgguucaacggcaucggggucacccagaacgugcucuacgagaaccagaagcugaucgccaaccaguucaacagcgccaucggcaagauccaggacucccugagcuccaccgccagcgcgcucgggaagcugcaggacguggucaaccagaacgcccaggcccugaacacgcucgugaagcagcuguccagcaacuucggcgccaucuccagcgugcugaacgacauccucucccgccuggacaaggucgaggccgaggugcagaucgaccggcugaucaccgggcgccuccagagccugcagaccuacgugacccagcagcugauccgggcggccgagauccgcgccagcgccaaccucgccgcgaccaagauguccgagugcguccugggccagagcaagcggguggacuucugcggcaagggguaccaccugauguccuucccccagagcgccccgcacggcguggucuuccuccacgugacguacguccccgcccaggagaagaacuucaccaccgcccccgcgaucugccacgacgggaaggcccacuucccccgcgagggcguguucguguccaacgggacccacugguucgucacgcagcggaacuucuacgagccgcagaucaucaccaccgacaacaccuucgugagcggcaacugcgacguggucaucggcaucgugaacaacacgguguacgacccccugcagcccgagcuggacuccuucaaggaggagcucgacaaguacuucaagaaccacaccagccccgacgucgaccugggggacaucuccggcaucaacgccagcguggugaacauccagaaggagaucgaccgccugaacgaggucgccaagaaccucaacgagucccugaucgaccugcaggagcucgggaaguacgagcaguacaucaaguggccgugguacaucuggcugggcuucaucgccggccugaucgcgaucgugaucgugaccaucaugcucugcugcaugaccagcugcugcuccugccugaaggggugcugcagcugcggcuccugcugcaaguucgacgaggacgacagcgagcccguccugaagggggugaagcuccacuacacgugaggacuaguuauaagacugacuagcccgaugggccucccaacgggcccuccuccccuccuugcaccgagauuaauaaaaaaaaaaaaaaaaaaaaaaaaaaaaaaaaaaaaaaaaaaaaaaaaaaaaaaaaaaaaaaaaugcaucccccccccccccccccccccccccccccccaaaggcucuuuucagagccaccagaauu

SEQ ID NO: 22835 - RNA, 4039 nt, Artificial Sequence
  SARS-CoV-2/Wuhan/WIV05/2019__EPI_ISL_402128 spike protein mRNA gc (1-1273)(K986P_V987P_D614G_M1229I) R10345
aggagaaagcuuaccauguucguguuccugguccuccugccccuggugagcucccagugcgugaaccucaccacccgcacgcagcugccgcccgccuacaccaacagcuucacccggggcgucuacuaccccgacaagguguuccgcuccagcgugcugcacuccacccaggaccucuuccugcccuucuucagcaacgucacgugguuccacgccauccacguguccgggaccaacggcaccaagcgguucgacaacccggugcugcccuucaacgacggggucuacuucgcgagcaccgagaaguccaacaucauccgcggcuggaucuucgggacgacccucgacagcaagacccagucccugcugaucgugaacaacgccaccaacguggucaucaaggugugcgaguuccaguucugcaacgaccccuuccucggcguguacuaccacaagaacaacaagagcuggauggaguccgaguuccgggucuacagcuccgccaacaacugcacguucgaguacgugagccagcccuuccugauggaccuggagggcaagcaggggaacuucaagaaccuccgcgaguucguguucaagaacaucgacggcuacuucaagaucuacuccaagcacaccccgaucaaccugguccgggaccugccccagggguucagcgcccucgagccccugguggaccugcccaucggcaucaacaucacccgcuuccagacccuccuggcccugcaccgguccuaccucacgccgggggacagcagcuccggcuggaccgcgggcgccgccgccuacuacgugggguaccugcagccccgcaccuuccugcucaaguacaacgagaacggcaccaucacggacgcggucgacugcgcccuggacccccugagcgagaccaagugcacccucaaguccuucaccguggagaaggggaucuaccagacgagcaacuuccgggugcagcccaccgaguccaucguccgcuucccgaacaucaccaaccugugccccuucggcgagguguucaacgccacccgguucgccagcgucuacgccuggaaccgcaagcggaucuccaacugcguggcggacuacagcgugcuguacaacuccgccagcuucuccacguucaagugcuacggcgucagccccaccaagcucaacgaccugugcuucaccaacguguacgccgacuccuucgugauccgcggggacgagguccggcagaucgcccccggccagaccgggaagaucgccgacuacaacuacaagcugccggacgacuucacgggcugcgugaucgcguggaacagcaacaaccucgacuccaaggucgggggcaacuacaacuaccuguaccgccuguuccgcaagagcaaccucaagcccuucgagcgggacaucuccaccgagaucuaccaggccggcagcacccccugcaacgggguggagggcuucaacugcuacuucccccugcaguccuacggguuccagccgaccaacggcgugggguaccagcccuaccggguggucgugcugagcuucgagcuccugcacgcccccgccacggugugcggccccaagaaguccaccaaccuggucaagaacaagugcgugaacuucaacuucaacggccucaccgggaccggcgugcugaccgagagcaacaagaaguuccugccguuccagcaguucgggcgcgacaucgccgacacgaccgacgcgguccgcgacccccagacccuggagauccucgacaucacccccugcagcuucggcgggguguccgugaucacgccgggcaccaacaccagcaaccaggucgccgugcuguaccagggcgugaacugcaccgagguccccguggccauccacgccgaccagcugacgcccaccuggcggguguacuccaccggcagcaacgucuuccagacccgcgccgggugccucaucggcgcggagcacgugaacaacuccuacgagugcgacauccccaucggggccggcaucugcgccagcuaccagacgcagaccaacuccccgcggcgcgcccggagcguggcgucccagagcaucaucgccuacaccaugucccugggcgccgagaacagcgucgccuacuccaacaacagcaucgccauccccaccaacuucacgaucuccgugaccaccgagauccugcccgugagcaugaccaagacgagcgucgacugcaccauguacaucugcggggacuccaccgagugcagcaaccuccugcugcaguacggcuccuucugcacccagcucaaccgcgcgcugacggggaucgccguggagcaggacaagaacacccaggagguguucgcccaggucaagcagaucuacaagacgcccccgaucaaggacuucggcggguucaacuucagccagauccugcccgaccccuccaagcccagcaagcgguccuucaucgaggaccuccuguucaacaaggugacccuggccgacgccggcuucaucaagcaguacggcgacugccucggggacaucgcggcccgcgaccugaucugcgcccagaaguucaacggccugaccgugcucccgccccugcugaccgacgagaugaucgcccaguacaccagcgcccuccuggcggggaccaucacguccggcuggaccuucggggccggcgccgcccugcagauccccuucgcgaugcagauggccuaccgguucaacggcaucggggucacccagaacgugcucuacgagaaccagaagcugaucgccaaccaguucaacagcgccaucggcaagauccaggacucccugagcuccaccgccagcgcgcucgggaagcugcaggacguggucaaccagaacgcccaggcccugaacacgcucgugaagcagcuguccagcaacuucggcgccaucuccagcgugcugaacgacauccucucccgccuggacccgcccgaggccgaggugcagaucgaccggcugaucaccgggcgccuccagagccugcagaccuacgugacccagcagcugauccgggcggccgagauccgcgccagcgccaaccucgccgcgaccaagauguccgagugcguccugggccagagcaagcggguggacuucugcggcaagggguaccaccugauguccuucccccagagcgccccgcacggcguggucuuccuccacgugacguacguccccgcccaggagaagaacuucaccaccgcccccgcgaucugccacgacgggaaggcccacuucccccgcgagggcguguucguguccaacgggacccacugguucgucacgcagcggaacuucuacgagccgcagaucaucaccaccgacaacaccuucgugagcggcaacugcgacguggucaucggcaucgugaacaacacgguguacgacccccugcagcccgagcuggacuccuucaaggaggagcucgacaaguacuucaagaaccacaccagccccgacgucgaccugggggacaucuccggcaucaacgccagcguggugaacauccagaaggagaucgaccgccugaacgaggucgccaagaaccucaacgagucccugaucgaccugcaggagcucgggaaguacgagcaguacaucaaguggccgugguacaucuggcugggcuucaucgccggccugaucgcgaucgugaucgugaccaucaugcucugcugcaugaccagcugcugcuccugccugaaggggugcugcagcugcggcuccugcugcaaguucgacgaggacgacagcgagcccguccugaagggggugaagcuccacuacacgugaggacuaguuauaagacugacuagcccgaugggccucccaacgggcccuccuccccuccuugcaccgagauuaauaaaaaaaaaaaaaaaaaaaaaaaaaaaaaaaaaaaaaaaaaaaaaaaaaaaaaaaaaaaaaaaaugcaucccccccccccccccccccccccccccccccaaaggcucuuuucagagccaccagaauu

SEQ ID NO: 22836 - RNA, 4033 nt, Artificial Sequence
  SARS-CoV-2/Wuhan/WIV05/2019__EPI_ISL_402128 spike protein mRNA gc (1-1273)(H69del_V70del_A222V_Y453F_S477N_D614G_I692V) R10292
aggagaaagcuuaccauguucguguuccugguccuccugccccuggugagcucccagugcgugaaccucaccacccgcacgcagcugccgcccgccuacaccaacagcuucacccggggcgucuacuaccccgacaagguguuccgcuccagcgugcugcacuccacccaggaccucuuccugcccuucuucagcaacgucacgugguuccacgccaucuccgggaccaacggcaccaagcgguucgacaacccggugcugcccuucaacgacggggucuacuucgcgagcaccgagaaguccaacaucauccgcggcuggaucuucgggacgacccucgacagcaagacccagucccugcugaucgugaacaacgccaccaacguggucaucaaggugugcgaguuccaguucugcaacgaccccuuccucggcguguacuaccacaagaacaacaagagcuggauggaguccgaguuccgggucuacagcuccgccaacaacugcacguucgaguacgugagccagcccuuccugauggaccuggagggcaagcaggggaacuucaagaaccuccgcgaguucguguucaagaacaucgacggcuacuucaagaucuacuccaagcacaccccgaucaaccugguccgggaccugccccagggguucagcguccucgagccccugguggaccugcccaucggcaucaacaucacccgcuuccagacccuccuggcccugcaccgguccuaccucacgccgggggacagcagcuccggcuggaccgcgggcgccgccgccuacuacgugggguaccugcagccccgcaccuuccugcucaaguacaacgagaacggcaccaucacggacgcggucgacugcgcccuggacccccugagcgagaccaagugcacccucaaguccuucaccguggagaaggggaucuaccagacgagcaacuuccgggugcagcccaccgaguccaucguccgcuucccgaacaucaccaaccugugccccuucggcgagguguucaacgccacccgguucgccagcgucuacgccuggaaccgcaagcggaucuccaacugcguggcggacuacagcgugcuguacaacuccgccagcuucuccacguucaagugcuacggcgucagccccaccaagcucaacgaccugugcuucaccaacguguacgccgacuccuucgugauccgcggggacgagguccggcagaucgcccccggccagaccgggaagaucgccgacuacaacuacaagcugccggacgacuucacgggcugcgugaucgcguggaacagcaacaaccucgacuccaaggucgggggcaacuacaacuaccuguuccgccuguuccgcaagagcaaccucaagcccuucgagcgggacaucuccaccgagaucuaccaggccggcaacacccccugcaacgggguggagggcuucaacugcuacuucccccugcaguccuacggguuccagccgaccaacggcgugggguaccagcccuaccggguggucgugcugagcuucgagcuccugcacgcccccgccacggugugcggccccaagaaguccaccaaccuggucaagaacaagugcgugaacuucaacuucaacggccucaccgggaccggcgugcugaccgagagcaacaagaaguuccugccguuccagcaguucgggcgcgacaucgccgacacgaccgacgcgguccgcgacccccagacccuggagauccucgacaucacccccugcagcuucggcgggguguccgugaucacgccgggcaccaacaccagcaaccaggucgccgugcuguaccagggcgugaacugcaccgagguccccguggccauccacgccgaccagcugacgcccaccuggcggguguacuccaccggcagcaacgucuuccagacccgcgccgggugccucaucggcgcggagcacgugaacaacuccuacgagugcgacauccccaucggggccggcaucugcgccagcuaccagacgcagaccaacuccccgcggcgcgcccggagcguggcgucccagagcgucaucgccuacaccaugucccugggcgccgagaacagcgucgccuacuccaacaacagcaucgccauccccaccaacuucacgaucuccgugaccaccgagauccugcccgugagcaugaccaagacgagcgucgacugcaccauguacaucugcggggacuccaccgagugcagcaaccuccugcugcaguacggcuccuucugcacccagcucaaccgcgcgcugacggggaucgccguggagcaggacaagaacacccaggagguguucgcccaggucaagcagaucuacaagacgcccccgaucaaggacuucggcggguucaacuucagccagauccugcccgaccccuccaagcccagcaagcgguccuucaucgaggaccuccuguucaacaaggugacccuggccgacgccggcuucaucaagcaguacggcgacugccucggggacaucgcggcccgcgaccugaucugcgcccagaaguucaacggccugaccgugcucccgccccugcugaccgacgagaugaucgcccaguacaccagcgcccuccuggcggggaccaucacguccggcuggaccuucggggccggcgccgcccugcagauccccuucgcgaugcagauggccuaccgguucaacggcaucggggucacccagaacgugcucuacgagaaccagaagcugaucgccaaccaguucaacagcgccaucggcaagauccaggacucccugagcuccaccgccagcgcgcucgggaagcugcaggacguggucaaccagaacgcccaggcccugaacacgcucgugaagcagcuguccagcaacuucggcgccaucuccagcgugcugaacgacauccucucccgccuggacaaggucgaggccgaggugcagaucgaccggcugaucaccgggcgccuccagagccugcagaccuacgugacccagcagcugauccgggcggccgagauccgcgccagcgccaaccucgccgcgaccaagauguccgagugcguccugggccagagcaagcggguggacuucugcggcaagggguaccaccugauguccuucccccagagcgccccgcacggcguggucuuccuccacgugacguacguccccgcccaggagaagaacuucaccaccgcccccgcgaucugccacgacgggaaggcccacuucccccgcgagggcguguucguguccaacgggacccacugguucgucacgcagcggaacuucuacgagccgcagaucaucaccaccgacaacaccuucgugagcggcaacugcgacguggucaucggcaucgugaacaacacgguguacgacccccugcagcccgagcuggacuccuucaaggaggagcucgacaaguacuucaagaaccacaccagccccgacgucgaccugggggacaucuccggcaucaacgccagcguggugaacauccagaaggagaucgaccgccugaacgaggucgccaagaaccucaacgagucccugaucgaccugcaggagcucgggaaguacgagcaguacaucaaguggccgugguacaucuggcugggcuucaucgccggccugaucgcgaucgugauggugaccaucaugcucugcugcaugaccagcugcugcuccugccugaaggggugcugcagcugcggcuccugcugcaaguucgacgaggacgacagcgagcccguccugaagggggugaagcuccacuacacgugaggacuaguuauaagacugacuagcccgaugggccucccaacgggcccuccuccccuccuugcaccgagauuaauaaaaaaaaaaaaaaaaaaaaaaaaaaaaaaaaaaaaaaaaaaaaaaaaaaaaaaaaaaaaaaaaugcaucccccccccccccccccccccccccccccccaaaggcucuuuucagagccaccagaauu

SEQ ID NO: 22837 - RNA, 4033 nt, Artificial Sequence
  SARS-CoV-2/Wuhan/WIV05/2019__EPI_ISL_402128 spike protein mRNA gc (1-1273)(K986P_V987P_H69del_V70del_A222V_Y453F_S477N_D614G_I692V) R10293
aggagaaagcuuaccauguucguguuccugguccuccugccccuggugagcucccagugcgugaaccucaccacccgcacgcagcugccgcccgccuacaccaacagcuucacccggggcgucuacuaccccgacaagguguuccgcuccagcgugcugcacuccacccaggaccucuuccugcccuucuucagcaacgucacgugguuccacgccaucuccgggaccaacggcaccaagcgguucgacaacccggugcugcccuucaacgacggggucuacuucgcgagcaccgagaaguccaacaucauccgcggcuggaucuucgggacgacccucgacagcaagacccagucccugcugaucgugaacaacgccaccaacguggucaucaaggugugcgaguuccaguucugcaacgaccccuuccucggcguguacuaccacaagaacaacaagagcuggauggaguccgaguuccgggucuacagcuccgccaacaacugcacguucgaguacgugagccagcccuuccugauggaccuggagggcaagcaggggaacuucaagaaccuccgcgaguucguguucaagaacaucgacggcuacuucaagaucuacuccaagcacaccccgaucaaccugguccgggaccugccccagggguucagcguccucgagccccugguggaccugcccaucggcaucaacaucacccgcuuccagacccuccuggcccugcaccgguccuaccucacgccgggggacagcagcuccggcuggaccgcgggcgccgccgccuacuacgugggguaccugcagccccgcaccuuccugcucaaguacaacgagaacggcaccaucacggacgcggucgacugcgcccuggacccccugagcgagaccaagugcacccucaaguccuucaccguggagaaggggaucuaccagacgagcaacuuccgggugcagcccaccgaguccaucguccgcuucccgaacaucaccaaccugugccccuucggcgagguguucaacgccacccgguucgccagcgucuacgccuggaaccgcaagcggaucuccaacugcguggcggacuacagcgugcuguacaacuccgccagcuucuccacguucaagugcuacggcgucagccccaccaagcucaacgaccugugcuucaccaacguguacgccgacuccuucgugauccgcggggacgagguccggcagaucgcccccggccagaccgggaagaucgccgacuacaacuacaagcugccggacgacuucacgggcugcgugaucgcguggaacagcaacaaccucgacuccaaggucgggggcaacuacaacuaccuguuccgccuguuccgcaagagcaaccucaagcccuucgagcgggacaucuccaccgagaucuaccaggccggcaacacccccugcaacgggguggagggcuucaacugcuacuucccccugcaguccuacggguuccagccgaccaacggcgugggguaccagcccuaccggguggucgugcugagcuucgagcuccugcacgcccccgccacggugugcggccccaagaaguccaccaaccuggucaagaacaagugcgugaacuucaacuucaacggccucaccgggaccggcgugcugaccgagagcaacaagaaguuccugccguuccagcaguucgggcgcgacaucgccgacacgaccgacgcgguccgcgacccccagacccuggagauccucgacaucacccccugcagcuucggcgggguguccgugaucacgccgggcaccaacaccagcaaccaggucgccgugcuguaccagggcgugaacugcaccgagguccccguggccauccacgccgaccagcugacgcccaccuggcggguguacuccaccggcagcaacgucuuccagacccgcgccgggugccucaucggcgcggagcacgugaacaacuccuacgagugcgacauccccaucggggccggcaucugcgccagcuaccagacgcagaccaacuccccgcggcgcgcccggagcguggcgucccagagcgucaucgccuacaccaugucccugggcgccgagaacagcgucgccuacuccaacaacagcaucgccauccccaccaacuucacgaucuccgugaccaccgagauccugcccgugagcaugaccaagacgagcgucgacugcaccauguacaucugcggggacuccaccgagugcagcaaccuccugcugcaguacggcuccuucugcacccagcucaaccgcgcgcugacggggaucgccguggagcaggacaagaacacccaggagguguucgcccaggucaagcagaucuacaagacgcccccgaucaaggacuucggcggguucaacuucagccagauccugcccgaccccuccaagcccagcaagcgguccuucaucgaggaccuccuguucaacaaggugacccuggccgacgccggcuucaucaagcaguacggcgacugccucggggacaucgcggcccgcgaccugaucugcgcccagaaguucaacggccugaccgugcucccgccccugcugaccgacgagaugaucgcccaguacaccagcgcccuccuggcggggaccaucacguccggcuggaccuucggggccggcgccgcccugcagauccccuucgcgaugcagauggccuaccgguucaacggcaucggggucacccagaacgugcucuacgagaaccagaagcugaucgccaaccaguucaacagcgccaucggcaagauccaggacucccugagcuccaccgccagcgcgcucgggaagcugcaggacguggucaaccagaacgcccaggcccugaacacgcucgugaagcagcuguccagcaacuucggcgccaucuccagcgugcugaacgacauccucucccgccuggacccgcccgaggccgaggugcagaucgaccggcugaucaccgggcgccuccagagccugcagaccuacgugacccagcagcugauccgggcggccgagauccgcgccagcgccaaccucgccgcgaccaagauguccgagugcguccugggccagagcaagcggguggacuucugcggcaagggguaccaccugauguccuucccccagagcgccccgcacggcguggucuuccuccacgugacguacguccccgcccaggagaagaacuucaccaccgcccccgcgaucugccacgacgggaaggcccacuucccccgcgagggcguguucguguccaacgggacccacugguucgucacgcagcggaacuucuacgagccgcagaucaucaccaccgacaacaccuucgugagcggcaacugcgacguggucaucggcaucgugaacaacacgguguacgacccccugcagcccgagcuggacuccuucaaggaggagcucgacaaguacuucaagaaccacaccagccccgacgucgaccugggggacaucuccggcaucaacgccagcguggugaacauccagaaggagaucgaccgccugaacgaggucgccaagaaccucaacgagucccugaucgaccugcaggagcucgggaaguacgagcaguacaucaaguggccgugguacaucuggcugggcuucaucgccggccugaucgcgaucgugauggugaccaucaugcucugcugcaugaccagcugcugcuccugccugaaggggugcugcagcugcggcuccugcugcaaguucgacgaggacgacagcgagcccguccugaagggggugaagcuccacuacacgugaggacuaguuauaagacugacuagcccgaugggccucccaacgggcccuccuccccuccuugcaccgagauuaauaaaaaaaaaaaaaaaaaaaaaaaaaaaaaaaaaaaaaaaaaaaaaaaaaaaaaaaaaaaaaaaaugcaucccccccccccccccccccccccccccccccaaaggcucuuuucagagccaccagaauu

SEQ ID NO: 22838 - RNA, 4033 nt, Artificial Sequence
  SARS-CoV-2/Wuhan/WIV05/2019__EPI_ISL_402128 spike protein mRNA gc (1-1273)(H69del_V70del_Y453F_D614G_I692V_M1229I) R10346
aggagaaagcuuaccauguucguguuccugguccuccugccccuggugagcucccagugcgugaaccucaccacccgcacgcagcugccgcccgccuacaccaacagcuucacccggggcgucuacuaccccgacaagguguuccgcuccagcgugcugcacuccacccaggaccucuuccugcccuucuucagcaacgucacgugguuccacgccaucuccgggaccaacggcaccaagcgguucgacaacccggugcugcccuucaacgacggggucuacuucgcgagcaccgagaaguccaacaucauccgcggcuggaucuucgggacgacccucgacagcaagacccagucccugcugaucgugaacaacgccaccaacguggucaucaaggugugcgaguuccaguucugcaacgaccccuuccucggcguguacuaccacaagaacaacaagagcuggauggaguccgaguuccgggucuacagcuccgccaacaacugcacguucgaguacgugagccagcccuuccugauggaccuggagggcaagcaggggaacuucaagaaccuccgcgaguucguguucaagaacaucgacggcuacuucaagaucuacuccaagcacaccccgaucaaccugguccgggaccugccccagggguucagcgcccucgagccccugguggaccugcccaucggcaucaacaucacccgcuuccagacccuccuggcccugcaccgguccuaccucacgccgggggacagcagcuccggcuggaccgcgggcgccgccgccuacuacgugggguaccugcagccccgcaccuuccugcucaaguacaacgagaacggcaccaucacggacgcggucgacugcgcccuggacccccugagcgagaccaagugcacccucaaguccuucaccguggagaaggggaucuaccagacgagcaacuuccgggugcagcccaccgaguccaucguccgcuucccgaacaucaccaaccugugccccuucggcgagguguucaacgccacccgguucgccagcgucuacgccuggaaccgcaagcggaucuccaacugcguggcggacuacagcgugcuguacaacuccgccagcuucuccacguucaagugcuacggcgucagccccaccaagcucaacgaccugugcuucaccaacguguacgccgacuccuucgugauccgcggggacgagguccggcagaucgcccccggccagaccgggaagaucgccgacuacaacuacaagcugccggacgacuucacgggcugcgugaucgcguggaacagcaacaaccucgacuccaaggucgggggcaacuacaacuaccuguuccgccuguuccgcaagagcaaccucaagcccuucgagcgggacaucuccaccgagaucuaccaggccggcagcacccccugcaacgggguggagggcuucaacugcuacuucccccugcaguccuacggguuccagccgaccaacggcgugggguaccagcccuaccggguggucgugcugagcuucgagcuccugcacgcccccgccacggugugcggccccaagaaguccaccaaccuggucaagaacaagugcgugaacuucaacuucaacggccucaccgggaccggcgugcugaccgagagcaacaagaaguuccugccguuccagcaguucgggcgcgacaucgccgacacgaccgacgcgguccgcgacccccagacccuggagauccucgacaucacccccugcagcuucggcgggguguccgugaucacgccgggcaccaacaccagcaaccaggucgccgugcuguaccagggcgugaacugcaccgagguccccguggccauccacgccgaccagcugacgcccaccuggcggguguacuccaccggcagcaacgucuuccagacccgcgccgggugccucaucggcgcggagcacgugaacaacuccuacgagugcgacauccccaucggggccggcaucugcgccagcuaccagacgcagaccaacuccccgcggcgcgcccggagcguggcgucccagagcgugaucgccuacaccaugucccugggcgccgagaacagcgucgccuacuccaacaacagcaucgccauccccaccaacuucacgaucuccgugaccaccgagauccugcccgugagcaugaccaagacgagcgucgacugcaccauguacaucugcggggacuccaccgagugcagcaaccuccugcugcaguacggcuccuucugcacccagcucaaccgcgcgcugacggggaucgccguggagcaggacaagaacacccaggagguguucgcccaggucaagcagaucuacaagacgcccccgaucaaggacuucggcggguucaacuucagccagauccugcccgaccccuccaagcccagcaagcgguccuucaucgaggaccuccuguucaacaaggugacccuggccgacgccggcuucaucaagcaguacggcgacugccucggggacaucgcggcccgcgaccugaucugcgcccagaaguucaacggccugaccgugcucccgccccugcugaccgacgagaugaucgcccaguacaccagcgcccuccuggcggggaccaucacguccggcuggaccuucggggccggcgccgcccugcagauccccuucgcgaugcagauggccuaccgguucaacggcaucggggucacccagaacgugcucuacgagaaccagaagcugaucgccaaccaguucaacagcgccaucggcaagauccaggacucccugagcuccaccgccagcgcgcucgggaagcugcaggacguggucaaccagaacgcccaggcccugaacacgcucgugaagcagcuguccagcaacuucggcgccaucuccagcgugcugaacgacauccucucccgccuggacaaggucgaggccgaggugcagaucgaccggcugaucaccgggcgccuccagagccugcagaccuacgugacccagcagcugauccgggcggccgagauccgcgccagcgccaaccucgccgcgaccaagauguccgagugcguccugggccagagcaagcggguggacuucugcggcaagggguaccaccugauguccuucccccagagcgccccgcacggcguggucuuccuccacgugacguacguccccgcccaggagaagaacuucaccaccgcccccgcgaucugccacgacgggaaggcccacuucccccgcgagggcguguucguguccaacgggacccacugguucgucacgcagcggaacuucuacgagccgcagaucaucaccaccgacaacaccuucgugagcggcaacugcgacguggucaucggcaucgugaacaacacgguguacgacccccugcagcccgagcuggacuccuucaaggaggagcucgacaaguacuucaagaaccacaccagccccgacgucgaccugggggacaucuccggcaucaacgccagcguggugaacauccagaaggagaucgaccgccugaacgaggucgccaagaaccucaacgagucccugaucgaccugcaggagcucgggaaguacgagcaguacaucaaguggccgugguacaucuggcugggcuucaucgccggccugaucgcgaucgugaucgugaccaucaugcucugcugcaugaccagcugcugcuccugccugaaggggugcugcagcugcggcuccugcugcaaguucgacgaggacgacagcgagcccguccugaagggggugaagcuccacuacacgugaggacuaguuauaagacugacuagcccgaugggccucccaacgggcccuccuccccuccuugcaccgagauuaauaaaaaaaaaaaaaaaaaaaaaaaaaaaaaaaaaaaaaaaaaaaaaaaaaaaaaaaaaaaaaaaaugcaucccccccccccccccccccccccccccccccaaaggcucuuuucagagccaccagaauu

SEQ ID NO: 22839 - RNA, 4033 nt, Artificial Sequence
  SARS-CoV-2/Wuhan/WIV05/2019__EPI_ISL_402128 spike protein mRNA gc (1-1273)(K986P_V987P_H69del_V70del_Y453F_D614G_I692V_M1229I) R10347
aggagaaagcuuaccauguucguguuccugguccuccugccccuggugagcucccagugcgugaaccucaccacccgcacgcagcugccgcccgccuacaccaacagcuucacccggggcgucuacuaccccgacaagguguuccgcuccagcgugcugcacuccacccaggaccucuuccugcccuucuucagcaacgucacgugguuccacgccaucuccgggaccaacggcaccaagcgguucgacaacccggugcugcccuucaacgacggggucuacuucgcgagcaccgagaaguccaacaucauccgcggcuggaucuucgggacgacccucgacagcaagacccagucccugcugaucgugaacaacgccaccaacguggucaucaaggugugcgaguuccaguucugcaacgaccccuuccucggcguguacuaccacaagaacaacaagagcuggauggaguccgaguuccgggucuacagcuccgccaacaacugcacguucgaguacgugagccagcccuuccugauggaccuggagggcaagcaggggaacuucaagaaccuccgcgaguucguguucaagaacaucgacggcuacuucaagaucuacuccaagcacaccccgaucaaccugguccgggaccugccccagggguucagcgcccucgagccccugguggaccugcccaucggcaucaacaucacccgcuuccagacccuccuggcccugcaccgguccuaccucacgccgggggacagcagcuccggcuggaccgcgggcgccgccgccuacuacgugggguaccugcagccccgcaccuuccugcucaaguacaacgagaacggcaccaucacggacgcggucgacugcgcccuggacccccugagcgagaccaagugcacccucaaguccuucaccguggagaaggggaucuaccagacgagcaacuuccgggugcagcccaccgaguccaucguccgcuucccgaacaucaccaaccugugccccuucggcgagguguucaacgccacccgguucgccagcgucuacgccuggaaccgcaagcggaucuccaacugcguggcggacuacagcgugcuguacaacuccgccagcuucuccacguucaagugcuacggcgucagccccaccaagcucaacgaccugugcuucaccaacguguacgccgacuccuucgugauccgcggggacgagguccggcagaucgcccccggccagaccgggaagaucgccgacuacaacuacaagcugccggacgacuucacgggcugcgugaucgcguggaacagcaacaaccucgacuccaaggucgggggcaacuacaacuaccuguuccgccuguuccgcaagagcaaccucaagcccuucgagcgggacaucuccaccgagaucuaccaggccggcagcacccccugcaacgggguggagggcuucaacugcuacuucccccugcaguccuacggguuccagccgaccaacggcgugggguaccagcccuaccggguggucgugcugagcuucgagcuccugcacgcccccgccacggugugcggccccaagaaguccaccaaccuggucaagaacaagugcgugaacuucaacuucaacggccucaccgggaccggcgugcugaccgagagcaacaagaaguuccugccguuccagcaguucgggcgcgacaucgccgacacgaccgacgcgguccgcgacccccagacccuggagauccucgacaucacccccugcagcuucggcgggguguccgugaucacgccgggcaccaacaccagcaaccaggucgccgugcuguaccagggcgugaacugcaccgagguccccguggccauccacgccgaccagcugacgcccaccuggcggguguacuccaccggcagcaacgucuuccagacccgcgccgggugccucaucggcgcggagcacgugaacaacuccuacgagugcgacauccccaucggggccggcaucugcgccagcuaccagacgcagaccaacuccccgcggcgcgcccggagcguggcgucccagagcgugaucgccuacaccaugucccugggcgccgagaacagcgucgccuacuccaacaacagcaucgccauccccaccaacuucacgaucuccgugaccaccgagauccugcccgugagcaugaccaagacgagcgucgacugcaccauguacaucugcggggacuccaccgagugcagcaaccuccugcugcaguacggcuccuucugcacccagcucaaccgcgcgcugacggggaucgccguggagcaggacaagaacacccaggagguguucgcccaggucaagcagaucuacaagacgcccccgaucaaggacuucggcggguucaacuucagccagauccugcccgaccccuccaagcccagcaagcgguccuucaucgaggaccuccuguucaacaaggugacccuggccgacgccggcuucaucaagcaguacggcgacugccucggggacaucgcggcccgcgaccugaucugcgcccagaaguucaacggccugaccgugcucccgccccugcugaccgacgagaugaucgcccaguacaccagcgcccuccuggcggggaccaucacguccggcuggaccuucggggccggcgccgcccugcagauccccuucgcgaugcagauggccuaccgguucaacggcaucggggucacccagaacgugcucuacgagaaccagaagcugaucgccaaccaguucaacagcgccaucggcaagauccaggacucccugagcuccaccgccagcgcgcucgggaagcugcaggacguggucaaccagaacgcccaggcccugaacacgcucgugaagcagcuguccagcaacuucggcgccaucuccagcgugcugaacgacauccucucccgccuggacccgcccgaggccgaggugcagaucgaccggcugaucaccgggcgccuccagagccugcagaccuacgugacccagcagcugauccgggcggccgagauccgcgccagcgccaaccucgccgcgaccaagauguccgagugcguccugggccagagcaagcggguggacuucugcggcaagggguaccaccugauguccuucccccagagcgccccgcacggcguggucuuccuccacgugacguacguccccgcccaggagaagaacuucaccaccgcccccgcgaucugccacgacgggaaggcccacuucccccgcgagggcguguucguguccaacgggacccacugguucgucacgcagcggaacuucuacgagccgcagaucaucaccaccgacaacaccuucgugagcggcaacugcgacguggucaucggcaucgugaacaacacgguguacgacccccugcagcccgagcuggacuccuucaaggaggagcucgacaaguacuucaagaaccacaccagccccgacgucgaccugggggacaucuccggcaucaacgccagcguggugaacauccagaaggagaucgaccgccugaacgaggucgccaagaaccucaacgagucccugaucgaccugcaggagcucgggaaguacgagcaguacaucaaguggccgugguacaucuggcugggcuucaucgccggccugaucgcgaucgugaucgugaccaucaugcucugcugcaugaccagcugcugcuccugccugaaggggugcugcagcugcggcuccugcugcaaguucgacgaggacgacagcgagcccguccugaagggggugaagcuccacuacacgugaggacuaguuauaagacugacuagcccgaugggccucccaacgggcccuccuccccuccuugcaccgagauuaauaaaaaaaaaaaaaaaaaaaaaaaaaaaaaaaaaaaaaaaaaaaaaaaaaaaaaaaaaaaaaaaaugcaucccccccccccccccccccccccccccccccaaaggcucuuuucagagccaccagaauu

SEQ ID NO: 22840 - RNA, 6 nt, Artificial Sequence
  mRNA 5'-end
gggaaa

SEQ ID NO: 22841 - RNA, 6 nt, Artificial Sequence
  mRNA 5'-end
agaaua

SEQ ID NO: 22842 - RNA, 6 nt, Artificial Sequence
  mRNA 5'-end
agauua

SEQ ID NO: 22843 - RNA, 6 nt, Artificial Sequence
  mRNA 5'-end
gauggg

SEQ ID NO: 22844 - RNA, 5 nt, Artificial Sequence
  mRNA 5'-end
gggcg

SEQ ID NO: 22845 - RNA, 3 nt, Artificial Sequence
  Kozak sequence
acc

SEQ ID NO: 22846 - RNA, 9 nt, Artificial Sequence
  Kozak sequence
gccgccacc

SEQ ID NO: 22847 - RNA, 6 nt, Artificial Sequence
  Kozak sequence
gccacc

SEQ ID NO: 22848 - DNA, 57 bp, Artificial Sequence
  synthetic-v1 5'-UTR
gggaaataagagagaaaagaagagtaagaagaaatataagaccccggcgccgccacc

SEQ ID NO: 22849 - RNA, 57 nt, Artificial Sequence
  synthetic-v1 5'-UTR
gggaaauaagagagaaaagaagaguaagaagaaauauaagaccccggcgccgccacc

SEQ ID NO: 22850 - DNA, 57 bp, Artificial Sequence
  synthetic-v2 5'-UTR
aggagataagagagaaaagaagagtaagaagaaatataagaccccggcgccgccacc

SEQ ID NO: 22851 - RNA, 57 nt, Artificial Sequence
  synthetic-v2 5'-UTR
aggagauaagagagaaaagaagaguaagaagaaauauaagaccccggcgccgccacc

SEQ ID NO: 22852 - DNA, 47 bp, Artificial Sequence
  synthetic-v3 5'-UTR
gggaaataagagagaaaagaagagtaagaagaaatataagagccacc

SEQ ID NO: 22853 - RNA, 47 nt, Artificial Sequence
  synthetic-v3 5'-UTR
gggaaauaagagagaaaagaagaguaagaagaaauauaagagccacc

SEQ ID NO: 22854 - DNA, 47 bp, Artificial Sequence
  synthetic-v4 5'-UTR
aggagataagagagaaaagaagagtaagaagaaatataagagccacc

SEQ ID NO: 22855 - RNA, 47 nt, Artificial Sequence
  synthetic-v4 5'-UTR
aggagauaagagagaaaagaagaguaagaagaaauauaagagccacc

SEQ ID NO: 22856 - DNA, 53 bp, Artificial Sequence
  HBA1-v1 5'-UTR
agaataaactagtattcttctggtccccacagactcagagagaacccgccacc

SEQ ID NO: 22857 - RNA, 53 nt, Artificial Sequence
  HBA1-v1 5'-UTR
agaauaaacuaguauucuucugguccccacagacucagagagaacccgccacc

SEQ ID NO: 22858 - DNA, 56 bp, Artificial Sequence
  HBA1-v2 5'-UTR
aggagaataaactagtattcttctggtccccacagactcagagagaacccgccacc

SEQ ID NO: 22859 - RNA, 56 nt, Artificial Sequence
  HBA1-v2 5'-UTR
aggagaauaaacuaguauucuucugguccccacagacucagagagaacccgccacc

SEQ ID NO: 22860 - DNA, 53 bp, Artificial Sequence
  HBA1-v3 5'-UTR
aggagaaactagtattcttctggtccccacagactcagagagaacccgccacc

SEQ ID NO: 22861 - RNA, 53 nt, Artificial Sequence
  HBA1-v3 5'-UTR
aggagaaacuaguauucuucugguccccacagacucagagagaacccgccacc

SEQ ID NO: 22862 - DNA, 53 bp, Artificial Sequence
  HBA1-v4 5'-UTR
agattaaactagtattcttctggtccccacagactcagagagaacccgccacc

SEQ ID NO: 22863 - RNA, 53 nt, Artificial Sequence
  HBA1-v4 5'-UTR
agauuaaacuaguauucuucugguccccacagacucagagagaacccgccacc

SEQ ID NO: 22864 - DNA, 52 bp, Artificial Sequence
  HBA1-v5 5'-UTR
agacgaactagtattcttctggtccccacagactcagagagaacccgccacc

SEQ ID NO: 22865 - RNA, 52 nt, Artificial Sequence
  HBA1-v5 5'-UTR
agacgaacuaguauucuucugguccccacagacucagagagaacccgccacc

SEQ ID NO: 22866 - DNA, 52 bp, Artificial Sequence
  HBA1-v6 5'-UTR
gggcgaactagtattcttctggtccccacagactcagagagaacccgccacc

SEQ ID NO: 22867 - RNA, 52 nt, Artificial Sequence
  HBA1-v6 5'-UTR
gggcgaacuaguauucuucugguccccacagacucagagagaacccgccacc

SEQ ID NO: 22868 - DNA, 15 bp, Artificial Sequence
  minimal 5'-UTR
aggagaaagcttacc

SEQ ID NO: 22869 - RNA, 15 nt, Artificial Sequence
  minimal 5'-UTR
aggagaaagcuuacc

SEQ ID NO: 22870 - DNA, 77 bp, Artificial Sequence
  HSD17B4-v2 5'-UTR
aggagagtcccgcagtcggcgtccagcggctctgcttgttcgtgtgtgtgtcgttgcaggccttattcaagcttacc

SEQ ID NO: 22871 - RNA, 77 nt, Artificial Sequence
  HSD17B4-v2 5'-UTR
aggagagucccgcagucggcguccagcggcucugcuuguucgugugugugucguugcaggccuuauucaagcuuacc

SEQ ID NO: 22872 - DNA, 99 bp, Artificial Sequence
  Rpl31-v2 5'-UTR
aggagacccgtgacccggaagttgtacggctacgcgactttccctcccacaaaccctcgcgcccttcctttcctacttgggcccggcagaaagcttacc

SEQ ID NO: 22873 - RNA, 99 nt, Artificial Sequence
  Rpl31-v2 5'-UTR
aggagacccgugacccggaaguuguacggcuacgcgacuuucccucccacaaacccucgcgcccuuccuuuccuacuugggcccggcagaaagcuuacc

SEQ ID NO: 22874 - DNA, 174 bp, Artificial Sequence
  Slc7a3-v2 5'-UTR
aggagagggcgcttggcttgcaaggaccctgagctgcggcattgaagcacacccaacccaactcgactgaagtcagcctcactgaaccggatctgagaatcttctctctctgggcttgccagggctctccgaacctagctagcatcctcttcaattccaactagaaagcttacc

SEQ ID NO: 22875 - RNA, 174 nt, Artificial Sequence
  Slc7a3-v2 5'-UTR
aggagagggcgcuuggcuugcaaggacccugagcugcggcauugaagcacacccaacccaacucgacugaagucagccucacugaaccggaucugagaaucuucucucucugggcuugccagggcucuccgaaccuagcuagcauccucuucaauuccaacuagaaagcuuacc

SEQ ID NO: 22876 - DNA, 110 bp, Artificial Sequence
  HBA1-v1 3'-UTR
gctggagcctcggtggccatgcttcttgccccttgggcctccccccagcccctcctccccttcctgcacccgtacccccgtggtctttgaataaagtctgagtgggcggc

SEQ ID NO: 22877 - RNA, 110 nt, Artificial Sequence
  HBA1-v1 3'-UTR
gcuggagccucgguggccaugcuucuugccccuugggccuccccccagccccuccuccccuuccugcacccguacccccguggucuuugaauaaagucugagugggcggc

SEQ ID NO: 22878 - DNA, 108 bp, Artificial Sequence
  HBA2 3'-UTR
gctggagcctcggtagccgttcctcctgcccgctgggcctcccaacgggccctcctcccctccttgcaccggcccttcctggtctttgaataaagtctgagtgggcag

SEQ ID NO: 22879 - RNA, 108 nt, Artificial Sequence
  HBA2 3'-UTR
gcuggagccucgguagccguuccuccugcccgcugggccucccaacgggcccuccuccccuccuugcaccggcccuuccuggucuuugaauaaagucugagugggcag

SEQ ID NO: 22880 - DNA, 132 bp, Artificial Sequence
  HBB-v1 3'-UTR
gctcgctttcttgctgtccaatttctattaaaggttcctttgttccctaagtccaactactaaactgggggatattatgaagggccttgagcatctggattctgcctaataaaaaacatttattttcattgc

SEQ ID NO: 22881 - RNA, 132 nt, Artificial Sequence
  HBB-v1 3'-UTR
gcucgcuuucuugcuguccaauuucuauuaaagguuccuuuguucccuaaguccaacuacuaaacugggggauauuaugaagggccuugagcaucuggauucugccuaauaaaaaacauuuauuuucauugc

SEQ ID NO: 22882 - DNA, 119 bp, Artificial Sequence
  HBA1-v2 3'-UTR
tgataataggctggagcctcggtggcctagcttcttgccccttgggcctccccccagcccctcctccccttcctgcacccgtacccccgtggtctttgaataaagtctgagtgggcggc

SEQ ID NO: 22883 - RNA, 119 nt, Artificial Sequence
  HBA1-v2 3'-UTR
ugauaauaggcuggagccucgguggccuagcuucuugccccuugggccuccccccagccccuccuccccuuccugcacccguacccccguggucuuugaauaaagucugagugggcggc

SEQ ID NO: 22884 - DNA, 119 bp, Artificial Sequence
  HBA1-v3 3'-UTR
tgataataggctggagcctcggtggccatgcttcttgccccttgggcctccccccagcccctcctccccttcctgcacccgtacccccgtggtctttgaataaagtctgagtgggcggc

SEQ ID NO: 22885 - RNA, 119 nt, Artificial Sequence
  HBA1-v33'-UTR
ugauaauaggcuggagccucgguggccaugcuucuugccccuugggccuccccccagccccuccuccccuuccugcacccguacccccguggucuuugaauaaagucugagugggcggc

SEQ ID NO: 22886 - DNA, 295 bp, Artificial Sequence
  AES-12S-v1 3'-UTR
ctcgagctggtactgcatgcacgcaatgctagctgcccctttcccgtcctgggtaccccgagtctcccccgacctcgggtcccaggtatgctcccacctccacctgccccactcaccacctctgctagttccagacacctcccaagcacgcagcaatgcagctcaaaacgcttagcctagccacacccccacgggaaacagcagtgattaacctttagcaataaacgaaagtttaactaagctatactaaccccagggttggtcaatttcgtgccagccacaccctggagctagc

SEQ ID NO: 22887 - RNA, 295 nt, Artificial Sequence
  AES-12S-v1 3'-UTR
cucgagcugguacugcaugcacgcaaugcuagcugccccuuucccguccuggguaccccgagucucccccgaccucgggucccagguaugcucccaccuccaccugccccacucaccaccucugcuaguuccagacaccucccaagcacgcagcaaugcagcucaaaacgcuuagccuagccacacccccacgggaaacagcagugauuaaccuuuagcaauaaacgaaaguuuaacuaagcuauacuaaccccaggguuggucaauuucgugccagccacacccuggagcuagc

SEQ ID NO: 22888 - DNA, 317 bp, Artificial Sequence
  AES-12S-v2 3'-UTR
ctcgagctggtactgcatgcacgcaatgctagctgcccctttcccgtcctgggtaccccgagtctcccccgacctcgggtcccaggtatgctcccacctccacctgccccactcaccacctctgctagttccagacacctcccaagcacgcagcaatgcagctcaaaacgcttagcctagccacacccccacgggaaacagcagtgattaacctttagcaataaacgaaagtttaactaagctatactaaccccagggttggtcaatttcgtgccagccacaccgagacctggtccagagtcgctagccgcgtcgct

SEQ ID NO: 22889 - RNA, 317 nt, Artificial Sequence
  AES-12S-v2 3'-UTR
cucgagcugguacugcaugcacgcaaugcuagcugccccuuucccguccuggguaccccgagucucccccgaccucgggucccagguaugcucccaccuccaccugccccacucaccaccucugcuaguuccagacaccucccaagcacgcagcaaugcagcucaaaacgcuuagccuagccacacccccacgggaaacagcagugauuaaccuuuagcaauaaacgaaaguuuaacuaagcuauacuaaccccaggguuggucaauuucgugccagccacaccgagaccugguccagagucgcuagccgcgucgcu

SEQ ID NO: 22890 - DNA, 311 bp, Artificial Sequence
  HBB-v2 3'-UTR
ctcgagagctcgctttcttgctgtccaatttctattaaaggttcctttgttccctaagtccaactactaaactgggggatattatgaagggccttgagcatctggattctgcctaataaaaaacatttattttcattgctgcgtcgagagctcgctttcttgctgtccaatttctattaaaggttcctttgttccctaagtccaactactaaactgggggatattatgaagggccttgagcatctggattctgcctaataaaaaacatttattttcattgctgcgtcgagacctggtccagagtcgctagc

SEQ ID NO: 22891 - RNA, 311 nt, Artificial Sequence
  HBB-v2 3'-UTR
cucgagagcucgcuuucuugcuguccaauuucuauuaaagguuccuuuguucccuaaguccaacuacuaaacugggggauauuaugaagggccuugagcaucuggauucugccuaauaaaaaacauuuauuuucauugcugcgucgagagcucgcuuucuugcuguccaauuucuauuaaagguuccuuuguucccuaaguccaacuacuaaacugggggauauuaugaagggccuugagcaucuggauucugccuaauaaaaaacauuuauuuucauugcugcgucgagaccugguccagagucgcuagc

SEQ ID NO: 22892 - DNA, 95 bp, Artificial Sequence
  PSMB3-v2 3'-UTR
ggactagtccctgttcccagagcccacttttttttctttttttgaaataaaatagcctgtctttcagatctcaaaggctcttttcagagccacca

SEQ ID NO: 22893 - RNA, 95 nt, Artificial Sequence
  PSMB3-v2 3'-UTR
ggacuagucccuguucccagagcccacuuuuuuuucuuuuuuugaaauaaaauagccugucuuucagaucucaaaggcucuuuucagagccacca

SEQ ID NO: 22894 - DNA, 108 bp, Artificial Sequence
  RPS9-v2 3'-UTR
ggactagtgtccacctgtccctcctgggctgctggattgtctcgttttcctgccaaataaacaggatcagcgctttacagatctcaaaggctcttttcagagccacca

SEQ ID NO: 22895 - RNA, 108 nt, Artificial Sequence
  RPS9-v2 3'-UTR
ggacuaguguccaccugucccuccugggcugcuggauugucucguuuuccugccaaauaaacaggaucagcgcuuuacagaucucaaaggcucuuuucagagccacca

SEQ ID NO: 22896 - DNA, 98 bp, Artificial Sequence
  muag-v2 3'-UTR
ggactagttataagactgactagcccgatgggcctcccaacgggccctcctcccctccttgcaccgagattaatcaaaggctcttttcagagccacca

SEQ ID NO: 22897 - RNA, 98 nt, Artificial Sequence
  muag-v2 3'-UTR
ggacuaguuauaagacugacuagcccgaugggccucccaacgggcccuccuccccuccuugcaccgagauuaaucaaaggcucuuuucagagccacca

SEQ ID NO: 22898 - DNA, 104 bp, Artificial Sequence
  muag-v2 3'-UTR
ggactagttataagactgactagcccgatgggcctcccaacgggccctcctcccctccttgcaccgagattaatagatctcaaaggctcttttcagagccacca

SEQ ID NO: 22899 - RNA, 104 nt, Artificial Sequence
  muag-v2 3'-UTR
ggacuaguuauaagacugacuagcccgaugggccucccaacgggcccuccuccccuccuugcaccgagauuaauagaucucaaaggcucuuuucagagccacca

SEQ ID NO: 22900 - DNA, 98 bp, Artificial Sequence
  muag-v2 3'-UTR
ggactagttataagactgactagcccgatgggcctcccaacgggccctcctcccctccttgcaccgagagatctcaaaggctcttttcagagccacca

SEQ ID NO: 22901 - RNA, 98 nt, Artificial Sequence
  muag-v2 3'-UTR
ggacuaguuauaagacugacuagcccgaugggccucccaacgggcccuccuccccuccuugcaccgagagaucucaaaggcucuuuucagagccacca

SEQ ID NO: 22902 - DNA, 71 bp, Artificial Sequence
  PSMB3-v2 3'-UTR
ggactagtccctgttcccagagcccacttttttttctttttttgaaataaaatagcctgtctttcagatct

SEQ ID NO: 22903 - RNA, 71 nt, Artificial Sequence
  PSMB3-v2 3'-UTR
ggacuagucccuguucccagagcccacuuuuuuuucuuuuuuugaaauaaaauagccugucuuucagaucu

SEQ ID NO: 22904 - DNA, 84 bp, Artificial Sequence
  RPS9-v2 3'-UTR
ggactagtgtccacctgtccctcctgggctgctggattgtctcgttttcctgccaaataaacaggatcagcgctttacagatct

SEQ ID NO: 22905 - RNA, 84 nt, Artificial Sequence
  RPS9-v2 3'-UTR
ggacuaguguccaccugucccuccugggcugcuggauugucucguuuuccugccaaauaaacaggaucagcgcuuuacagaucu

SEQ ID NO: 22906 - DNA, 74 bp, Artificial Sequence
  muag-v2 3'-UTR
ggactagttataagactgactagcccgatgggcctcccaacgggccctcctcccctccttgcaccgagattaat

SEQ ID NO: 22907 - RNA, 74 nt, Artificial Sequence
  muag-v2 3'-UTR
ggacuaguuauaagacugacuagcccgaugggccucccaacgggcccuccuccccuccuugcaccgagauuaau

SEQ ID NO: 22908 - DNA, 80 bp, Artificial Sequence
  muag-v2 3'-UTR
ggactagttataagactgactagcccgatgggcctcccaacgggccctcctcccctccttgcaccgagattaatagatct

SEQ ID NO: 22909 - RNA, 80 nt, Artificial Sequence
  muag-v2 3'-UTR
ggacuaguuauaagacugacuagcccgaugggccucccaacgggcccuccuccccuccuugcaccgagauuaauagaucu

SEQ ID NO: 22910 - DNA, 74 bp, Artificial Sequence
  muag-v2 3'-UTR
ggactagttataagactgactagcccgatgggcctcccaacgggccctcctcccctccttgcaccgagagatct

SEQ ID NO: 22911 - RNA, 74 nt, Artificial Sequence
  muag-v2 3'-UTR
ggacuaguuauaagacugacuagcccgaugggccucccaacgggcccuccuccccuccuugcaccgagagaucu

SEQ ID NO: 22912 - RNA, 105 nt, Artificial Sequence
  mRNA 3'-end A100-N5
aaaaaaaaaaaaaaaaaaaaaaaaaaaaaaaaaaaaaaaaaaaaaaaaaaaaaaaaaaaaaaaaaaaaaaaaaaaaaaaaaaaaaaaaaaaaaaaaaaaaucuag

SEQ ID NO: 22913 - RNA, 110 nt, Artificial Sequence
  mRNA 3'-end A30-N10-A70
aaaaaaaaaaaaaaaaaaaaaaaaaaaaaagcauaugacuaaaaaaaaaaaaaaaaaaaaaaaaaaaaaaaaaaaaaaaaaaaaaaaaaaaaaaaaaaaaaaaaaaaaaa

SEQ ID NO: 22914 - RNA, 669 nt, Artificial Sequence
  SARS-CoV-2/Wuhan/WIV05/2019__EPI_ISL_402128 spike protein CDS gc (319-541)
cgggugcagcccaccgagagcaucgugcgguuccccaacaucaccaaccugugccccuucggcgagguguucaacgccacccgguucgccagcguguacgccuggaaccggaagcggaucagcaacugcguggccgacuacagcgugcuguacaacagcgccagcuucagcaccuucaagugcuacggcgugagccccaccaagcugaacgaccugugcuucaccaacguguacgccgacagcuucgugauccguggcgacgaggugcggcagaucgcacccggccagacaggcaagaucgccgacuacaacuacaagcugcccgacgacuucaccggcugcgugaucgccuggaacagcaacaaccucgacagcaaggugggcggcaacuacaacuaccuguaccggcuguuccggaagagcaaccugaagcccuucgagcgggacaucagcaccgagaucuaccaagccggcuccaccccuugcaacggcguggagggcuucaacugcuacuucccucugcagagcuacggcuuccagcccaccaacggcgugggcuaccagcccuaccgggugguggugcugagcuucgagcugcugcacgccccagccaccguguguggccccaagaagagcaccaaccuggugaagaacaagugcgugaacuuc

SEQ ID NO: 22915 - RNA, 669 nt, Artificial Sequence
  SARS-CoV-2/Wuhan/WIV05/2019__EPI_ISL_402128 spike protein CDS gc mod (334-528)
cgggugcagcccaccgaauccaucgugcgguuccccaauaucaccaaucugugccccuucggcgagguguucaaugccaccagauucgccucuguguacgccuggaaccggaagcggaucagcaauugcguggccgacuacuccgugcuguacaacuccgccagcuucagcaccuucaagugcuacggcguguccccuaccaagcugaacgaccugugcuucacaaacguguacgccgacagcuucgugauccggggagaugaagugcggcagauugccccuggacagacaggcaagaucgccgacuacaacuacaagcugcccgacgacuucaccggcugugugauugccuggaacagcaacaaccuggacuccaaagucggcggcaacuacaauuaccuguaccggcuguuccggaaguccaaucugaagcccuucgagcgggacaucuccaccgagaucuaucaggccggcagcaccccuuguaacggcguggaaggcuucaacugcuacuucccacugcaguccuacggcuuucagcccacaaauggcgugggcuaucagcccuacagagugguggugcugagcuucgaacugcugcaugccccugccacagugugcggcccuaagaaaagcaccaaucucgugaagaacaaaugcgugaacuuc

SEQ ID NO: 22916 - RNA, 669 nt, Artificial Sequence
  SARS-CoV-2/Wuhan/WIV05/2019__EPI_ISL_402128 spike protein CDS gc mod (319-541)
agagugcagccaacagaaucuauugugagauuuccaaauauuacaaaucuguguccauuuggagaaguguuuaaugcaacaagauuugcaucuguguaugcauggaauagaaaaagaauuucuaauuguguggcugauuauucugugcuguauaauagugcuucuuuuuccacauuuaaauguuauggagugucuccaacaaaauuaaaugauuuauguuuuacaaauguguaugcugauucuuuugugaucagaggugaugaagugagacagauugcccccggacagacaggaaaaauugcugauuacaauuacaaacugccugaugauuuuacaggaugugugauugcuuggaauucuaauaauuuagauucuaaagugggaggaaauuacaauuaucuguacagacuguuuagaaaaucaaaucugaaaccuuuugaaagagauauuucaacagaaauuuaucaggcuggaucaacaccuuguaauggaguggaaggauuuaauuguuauuuuccauuacagagcuauggauuucagccaaccaauggugugggauaucagccauauagagugguggugcugucuuuugaacugcugcaugcaccugcaacaguguguggaccuaaaaaaucaacaaaucuggugaaaaauaaaugugugaauuuu

SEQ ID NO: 22917 - protein, 195 aa, Artificial Sequence
  SARS-CoV-2/Wuhan/WIV05/2019__EPI_ISL_402128 spike protein (334-528)
NLCPFGEVFNATRFASVYAWNRKRISNCVADYSVLYNSASFSTFKCYGVSPTKLNDLCFTNVYADSFVIRGDEVRQIAPGQTGKIADYNYKLPDDFTGCVIAWNSNNLDSKVGGNYNYLYRLFRKSNLKPFERDISTEIYQAGSTPCNGVEGFNCYFPLQSYGFQPTNGVGYQPYRVVVLSFELLHAPATVCGPK

SEQ ID NO: 22918 - RNA, 585 nt, Artificial Sequence
  SARS-CoV-2/Wuhan/WIV05/2019__EPI_ISL_402128 spike protein CDS gc (334-528)
aaccugugccccuucggcgagguguucaacgccacccgguucgccagcgucuacgccuggaaccgcaagcggaucuccaacugcguggcggacuacagcgugcuguacaacuccgccagcuucuccacguucaagugcuacggcgucagccccaccaagcucaacgaccugugcuucaccaacguguacgccgacuccuucgugauccgcggggacgagguccggcagaucgcccccggccagaccgggaagaucgccgacuacaacuacaagcugccggacgacuucacgggcugcgugaucgcguggaacagcaacaaccucgacuccaaggucgggggcaacuacaacuaccuguaccgccuguuccgcaagagcaaccucaagcccuucgagcgggacaucuccaccgagaucuaccaggccggcagcacccccugcaacgggguggagggcuucaacugcuacuucccccugcaguccuacggguuccagccgaccaacggcgugggguaccagcccuaccggguggucgugcugagcuucgagcuccugcacgcccccgccacggugugcggccccaag

SEQ ID NO: 22919 - RNA, 585 nt, Artificial Sequence
  SARS-CoV-2/Wuhan/WIV05/2019__EPI_ISL_402128 spike protein CDS gc (334-528)
aaccugugccccuucggcgagguguucaacgccacccgguucgccagcguguacgccuggaaccggaagcggaucagcaacugcguggccgacuacagcgugcuguacaacagcgccagcuucagcaccuucaagugcuacggcgugagccccaccaagcugaacgaccugugcuucaccaacguguacgccgacagcuucgugauccguggcgacgaggugcggcagaucgcacccggccagacaggcaagaucgccgacuacaacuacaagcugcccgacgacuucaccggcugcgugaucgccuggaacagcaacaaccucgacagcaaggugggcggcaacuacaacuaccuguaccggcuguuccggaagagcaaccugaagcccuucgagcgggacaucagcaccgagaucuaccaagccggcuccaccccuugcaacggcguggagggcuucaacugcuacuucccucugcagagcuacggcuuccagcccaccaacggcgugggcuaccagcccuaccgggugguggugcugagcuucgagcugcugcacgccccagccaccguguguggccccaag

SEQ ID NO: 22920 - RNA, 606 nt, Artificial Sequence
  SARS-CoV-2/Wuhan/WIV05/2019__EPI_ISL_402128 spike protein CDS gc mod (334-528)
gugcgguuccccaauaucaccaaucugugccccuucggcgagguguucaaugccaccagauucgccucuguguacgccuggaaccggaagcggaucagcaauugcguggccgacuacuccgugcuguacaacuccgccagcuucagcaccuucaagugcuacggcguguccccuaccaagcugaacgaccugugcuucacaaacguguacgccgacagcuucgugauccggggagaugaagugcggcagauugccccuggacagacaggcaagaucgccgacuacaacuacaagcugcccgacgacuucaccggcugugugauugccuggaacagcaacaaccuggacuccaaagucggcggcaacuacaauuaccuguaccggcuguuccggaaguccaaucugaagcccuucgagcgggacaucuccaccgagaucuaucaggccggcagcaccccuuguaacggcguggaaggcuucaacugcuacuucccacugcaguccuacggcuuucagcccacaaauggcgugggcuaucagcccuacagagugguggugcugagcuucgaacugcugcaugccccugccacagugugcggcccuaag

SEQ ID NO: 22921 - RNA, 585 nt, Artificial Sequence
  SARS-CoV-2/Wuhan/WIV05/2019__EPI_ISL_402128 spike protein CDS gc mod (334-528)
aaucugugccccuucggcgagguguucaaugccaccagauucgccucuguguacgccuggaaccggaagcggaucagcaauugcguggccgacuacuccgugcuguacaacuccgccagcuucagcaccuucaagugcuacggcguguccccuaccaagcugaacgaccugugcuucacaaacguguacgccgacagcuucgugauccggggagaugaagugcggcagauugccccuggacagacaggcaagaucgccgacuacaacuacaagcugcccgacgacuucaccggcugugugauugccuggaacagcaacaaccuggacuccaaagucggcggcaacuacaauuaccuguaccggcuguuccggaaguccaaucugaagcccuucgagcgggacaucagcaccgaaaucuaucaggccggcagcaccccuugcaacggcguggaaggcuucaacugcuacuucccacugcaguccuacggcuuucagcccacaaauggcgugggcuaucagcccuacagagugguggugcugagcuucgaacugcugcaugcuccugccacagugugcggcccuaag

SEQ ID NO: 22922 - RNA, 585 nt, Artificial Sequence
  SARS-CoV-2/Wuhan/WIV05/2019__EPI_ISL_402128 spike protein CDS gc mod (334-528)
aaucuguguccauuuggagaaguguuuaaugcaacaagauuugcaucuguguaugcauggaauagaaaaagaauuucuaauuguguggcugauuauucugugcuguauaauagugcuucuuuuuccacauuuaaauguuauggagugucuccaacaaaauuaaaugauuuauguuuuacaaauguguaugcugauucuuuugugaucagaggugaugaagugagacagauugcccccggacagacaggaaaaauugcugauuacaauuacaaacugccugaugauuuuacaggaugugugauugcuuggaauucuaauaauuuagauucuaaagugggaggaaauuacaauuaucuguacagacuguuuagaaaaucaaaucugaaaccuuuugaaagagauauuucaacagaaauuuaucaggcuggaucaacaccuuguaauggaguggaaggauuuaauuguuauuuuccauuacagagcuauggauuucagccaaccaauggugugggauaucagccauauagagugguggugcugucuuuugaacugcugcaugcaccugcaacaguguguggaccuaaa

SEQ ID NO: 22923 - protein, 202 aa, Artificial Sequence
  SARS-CoV-2/Wuhan/WIV05/2019__EPI_ISL_402128 spike protein (327-528)
VRFPNITNLCPFGEVFNATRFASVYAWNRKRISNCVADYSVLYNSASFSTFKCYGVSPTKLNDLCFTNVYADSFVIRGDEVRQIAPGQTGKIADYNYKLPDDFTGCVIAWNSNNLDSKVGGNYNYLYRLFRKSNLKPFERDISTEIYQAGSTPCNGVEGFNCYFPLQSYGFQPTNGVGYQPYRVVVLSFELLHAPATVCGPK

SEQ ID NO: 22924 - RNA, 606 nt, Artificial Sequence
  SARS-CoV-2/Wuhan/WIV05/2019__EPI_ISL_402128 spike protein CDS gc (327-528)
guccgcuucccgaacaucaccaaccugugccccuucggcgagguguucaacgccacccgguucgccagcgucuacgccuggaaccgcaagcggaucuccaacugcguggcggacuacagcgugcuguacaacuccgccagcuucuccacguucaagugcuacggcgucagccccaccaagcucaacgaccugugcuucaccaacguguacgccgacuccuucgugauccgcggggacgagguccggcagaucgcccccggccagaccgggaagaucgccgacuacaacuacaagcugccggacgacuucacgggcugcgugaucgcguggaacagcaacaaccucgacuccaaggucgggggcaacuacaacuaccuguaccgccuguuccgcaagagcaaccucaagcccuucgagcgggacaucuccaccgagaucuaccaggccggcagcacccccugcaacgggguggagggcuucaacugcuacuucccccugcaguccuacggguuccagccgaccaacggcgugggguaccagcccuaccggguggucgugcugagcuucgagcuccugcacgcccccgccacggugugcggccccaag

SEQ ID NO: 22925 - RNA, 606 nt, Artificial Sequence
  SARS-CoV-2/Wuhan/WIV05/2019__EPI_ISL_402128 spike protein CDS gc (327-528)
gugcgguuccccaacaucaccaaccugugccccuucggcgagguguucaacgccacccgguucgccagcguguacgccuggaaccggaagcggaucagcaacugcguggccgacuacagcgugcuguacaacagcgccagcuucagcaccuucaagugcuacggcgugagccccaccaagcugaacgaccugugcuucaccaacguguacgccgacagcuucgugauccguggcgacgaggugcggcagaucgcacccggccagacaggcaagaucgccgacuacaacuacaagcugcccgacgacuucaccggcugcgugaucgccuggaacagcaacaaccucgacagcaaggugggcggcaacuacaacuaccuguaccggcuguuccggaagagcaaccugaagcccuucgagcgggacaucagcaccgagaucuaccaagccggcuccaccccuugcaacggcguggagggcuucaacugcuacuucccucugcagagcuacggcuuccagcccaccaacggcgugggcuaccagcccuaccgggugguggugcugagcuucgagcugcugcacgccccagccaccguguguggccccaag

SEQ ID NO: 22926 - RNA, 606 nt, Artificial Sequence; identical to SEQ ID NO: 22920
  SARS-CoV-2/Wuhan/WIV05/2019__EPI_ISL_402128 spike protein CDS gc mod (327-528)

SEQ ID NO: 22927 - RNA, 606 nt, Artificial Sequence
  SARS-CoV-2/Wuhan/WIV05/2019__EPI_ISL_402128 spike protein CDS gc mod (327-528)
gugcgguuccccaauaucaccaaucugugccccuucggcgagguguucaaugccaccagauucgccucuguguacgccuggaaccggaagcggaucagcaauugcguggccgacuacuccgugcuguacaacuccgccagcuucagcaccuucaagugcuacggcguguccccuaccaagcugaacgaccugugcuucacaaacguguacgccgacagcuucgugauccggggagaugaagugcggcagauugccccuggacagacaggcaagaucgccgacuacaacuacaagcugcccgacgacuucaccggcugugugauugccuggaacagcaacaaccuggacuccaaagucggcggcaacuacaauuaccuguaccggcuguuccggaaguccaaucugaagcccuucgagcgggacaucagcaccgaaaucuaucaggccggcagcaccccuugcaacggcguggaaggcuucaacugcuacuucccacugcaguccuacggcuuucagcccacaaauggcgugggcuaucagcccuacagagugguggugcugagcuucgaacugcugcaugcuccugccacagugugcggcccuaag

SEQ ID NO: 22928 - RNA, 606 nt, Artificial Sequence
  SARS-CoV-2/Wuhan/WIV05/2019__EPI_ISL_402128 spike protein CDS gc mod (327-528)
gugagauuuccaaauauuacaaaucuguguccauuuggagaaguguuuaaugcaacaagauuugcaucuguguaugcauggaauagaaaaagaauuucuaauuguguggcugauuauucugugcuguauaauagugcuucuuuuuccacauuuaaauguuauggagugucuccaacaaaauuaaaugauuuauguuuuacaaauguguaugcugauucuuuugugaucagaggugaugaagugagacagauugcccccggacagacaggaaaaauugcugauuacaauuacaaacugccugaugauuuuacaggaugugugauugcuuggaauucuaauaauuuagauucuaaagugggaggaaauuacaauuaucuguacagacuguuuagaaaaucaaaucugaaaccuuuugaaagagauauuucaacagaaauuuaucaggcuggaucaacaccuuguaauggaguggaaggauuuaauuguuauuuuccauuacagagcuauggauuucagccaaccaauggugugggauaucagccauauagagugguggugcugucuuuugaacugcugcaugcaccugcaacaguguguggaccuaaa

SEQ ID NO: 22929 - protein, 1273 aa, Artificial Sequence; identical to SEQ ID NO: 1
  SARS-CoV-2/Wuhan/WIV05/2019__EPI_ISL_402128 spike protein (1-1273)

SEQ ID NO: 22930 - protein, 1273 aa, Artificial Sequence; identical to SEQ ID NO: 9
  SARS-CoV-2/Wuhan/WIV05/2019__EPI_ISL_402128 spike protein (1-1273)(D614G)

SEQ ID NO: 22931 - protein, 1273 aa, Artificial Sequence; identical to SEQ ID NO: 22739
  SARS-CoV-2/Wuhan/WIV05/2019__EPI_ISL_402128 spike protein (1-1273)(A222V_D614G)

SEQ ID NO: 22932 - protein, 1273 aa, Artificial Sequence; identical to SEQ ID NO: 22741
  SARS-CoV-2/Wuhan/WIV05/2019__EPI_ISL_402128 spike protein (1-1273)(N439K_D614G)

SEQ ID NO: 22933 - protein, 1273 aa, Artificial Sequence; identical to SEQ ID NO: 22743
  SARS-CoV-2/Wuhan/WIV05/2019__EPI_ISL_402128 spike protein (1-1273)(S477N_D614G)

SEQ ID NO: 22934 - protein, 1273 aa, Artificial Sequence; identical to SEQ ID NO: 22745
  SARS-CoV-2/Wuhan/WIV05/2019__EPI_ISL_402128 spike protein (1-1273)(N501Y_D614G)

SEQ ID NO: 22935 - protein, 1271 aa, Artificial Sequence; identical to SEQ ID NO: 22747
  SARS-CoV-2/Wuhan/WIV05/2019__EPI_ISL_402128 spike protein (1-1273)(H69del_V70del_D614G)

SEQ ID NO: 22936 - protein, 1273 aa, Artificial Sequence; identical to SEQ ID NO: 22749
  SARS-CoV-2/Wuhan/WIV05/2019__EPI_ISL_402128 spike protein (1-1273)(Y453F_D614G)

SEQ ID NO: 22937 - protein, 1273 aa, Artificial Sequence; identical to SEQ ID NO: 22751
  SARS-CoV-2/Wuhan/WIV05/2019__EPI_ISL_402128 spike protein (1-1273)(D614G_I692V)

SEQ ID NO: 22938 - protein, 1273 aa, Artificial Sequence; identical to SEQ ID NO: 327
  SARS-CoV-2/Wuhan/WIV05/2019__EPI_ISL_402128 spike protein (1-1273)(D614G_M1229I)

SEQ ID NO: 22939 - protein, 1271 aa, Artificial Sequence; identical to SEQ ID NO: 22755
  SARS-CoV-2/Wuhan/WIV05/2019__EPI_ISL_402128 spike protein (1-1273)(H69del_V70del_A222V_Y453F_S477N_D614G_I692V)

SEQ ID NO: 22940 - protein, 1271 aa, Artificial Sequence; identical to SEQ ID NO: 22757
  SARS-CoV-2/Wuhan/WIV05/2019__EPI_ISL_402128 spike protein (1-1273)(H69del_V70del_Y453F_D614G_I692V_M1229I)

SEQ ID NO: 22941 - protein, 1270 aa, Artificial Sequence
  SARS-CoV-2/Wuhan/WIV05/2019__EPI_ISL_402128 spike protein (1-1273)(H69del_V70del_Y144del_N501Y_A570D_D614G_P681H_T716I_S982 A_D1118H)
MFVFLVLLPLVSSQCVNLTTRTQLPPAYTNSFTRGVYYPDKVFRSSVLHSTQDLFLPFFSNVTWFHAISGTNGTKRFDNPVLPFNDGVYFASTEKSNIIRGWIFGTTLDSKTQSLLIVNNATNVVIKVCEFQFCNDPFLGVYHKNNKSWMESEFRVYSSANNCTFEYVSQPFLMDLEGKQGNFKNLREFVFKNIDGYFKIYSKHTPINLVRDLPQGFSALEPLVDLPIGINITRFQTLLALHRSYLTPGDSSSGWTAGAAAYYVGYLQPRTFLLKYNENGTITDAVDCALDPLSETKCTLKSFTVEKGIYQTSNFRVQPTESIVRFPNITNLCPFGEVFNATRFASVYAWNRKRISNCVADYSVLYNSASFSTFKCYGVSPTKLNDLCFTNVYADSFVIRGDEVRQIAPGQTGKIADYNYKLPDDFTGCVIAWNSNNLDSKVGGNYNYLYRLFRKSNLKPFERDISTEIYQAGSTPCNGVEGFNCYFPLQSYGFQPTYGVGYQPYRVVVLSFELLHAPATVCGPKKSTNLVKNKCVNFNFNGLTGTGVLTESNKKFLPFQQFGRDIDDTTDAVRDPQTLEILDITPCSFGGVSVITPGTNTSNQVAVLYQGVNCTEVPVAIHADQLTPTWRVYSTGSNVFQTRAGCLIGAEHVNNSYECDIPIGAGICASYQTQTNSHRRARSVASQSIIAYTMSLGAENSVAYSNNSIAIPINFTISVTTEILPVSMTKTSVDCTMYICGDSTECSNLLLQYGSFCTQLNRALTGIAVEQDKNTQEVFAQVKQIYKTPPIKDFGGFNFSQILPDPSKPSKRSFIEDLLFNKVTLADAGFIKQYGDCLGDIAARDLICAQKFNGLTVLPPLLTDEMIAQYTSALLAGTITSGWTFGAGAALQIPFAMQMAYRFNGIGVTQNVLYENQKLIANQFNSAIGKIQDSLSSTASALGKLQDVVNQNAQALNTLVKQLSSNFGAISSVLNDILARLDKVEAEVQIDRLITGRLQSLQTYVTQQLIRAAEIRASANLAATKMSECVLGQSKRVDFCGKGYHLMSFPQSAPHGVVFLHVTYVPAQEKNFTTAPAICHDGKAHFPREGVFVSNGTHWFVTQRNFYEPQIITTHNTFVSGNCDVVIGIVNNTVYDPLQPELDSFKEELDKYFKNHTSPDVDLGDISGINASVVNIQKEIDRLNEVAKNLNESLIDLQELGKYEQYIKWPWYIWLGFIAGLIAIVMVTIMLCCMTSCCSCLKGCCSCGSCCKFDEDDSEPVLKGVKLHYT

SEQ ID NO: 22942 - protein, 1273 aa, Artificial Sequence
  SARS-CoV-2/Wuhan/WIV05/2019__EPI_ISL_402128 spike protein (1-1273)(K417N_E484K_N501Y_D614G)
MFVFLVLLPLVSSQCVNLTTRTQLPPAYTNSFTRGVYYPDKVFRSSVLHSTQDLFLPFFSNVTWFHAIHVSGTNGTKRFDNPVLPFNDGVYFASTEKSNIIRGWIFGTTLDSKTQSLLIVNNATNVVIKVCEFQFCNDPFLGVYYHKNNKSWMESEFRVYSSANNCTFEYVSQPFLMDLEGKQGNFKNLREFVFKNIDGYFKIYSKHTPINLVRDLPQGFSALEPLVDLPIGINITRFQTLLALHRSYLTPGDSSSGWTAGAAAYYVGYLQPRTFLLKYNENGTITDAVDCALDPLSETKCTLKSFTVEKGIYQTSNFRVQPTESIVRFPNITNLCPFGEVFNATRFASVYAWNRKRISNCVADYSVLYNSASFSTFKCYGVSPTKLNDLCFTNVYADSFVIRGDEVRQIAPGQTGNIADYNYKLPDDFTGCVIAWNSNNLDSKVGGNYNYLYRLFRKSNLKPFERDISTEIYQAGSTPCNGVKGFNCYFPLQSYGFQPTYGVGYQPYRVVVLSFELLHAPATVCGPKKSTNLVKNKCVNFNFNGLTGTGVLTESNKKFLPFQQFGRDIADTTDAVRDPQTLEILDITPCSFGGVSVITPGTNTSNQVAVLYQGVNCTEVPVAIHADQLTPTWRVYSTGSNVFQTRAGCLIGAEHVNNSYECDIPIGAGICASYQTQTNSPRRARSVASQSIIAYTMSLGAENSVAYSNNSIAIPTNFTISVTTEILPVSMTKTSVDCTMYICGDSTECSNLLLQYGSFCTQLNRALTGIAVEQDKNTQEVFAQVKQIYKTPPIKDFGGFNFSQILPDPSKPSKRSFIEDLLFNKVTLADAGFIKQYGDCLGDIAARDLICAQKFNGLTVLPPLLTDEMIAQYTSALLAGTITSGWTFGAGAALQIPFAMQMAYRFNGIGVTQNVLYENQKLIANQFNSAIGKIQDSLSSTASALGKLQDVVNQNAQALNTLVKQLSSNFGAISSVLNDILSRLDKVEAEVQIDRLITGRLQSLQTYVTQQLIRAAEIRASANLAATKMSECVLGQSKRVDFCGKGYHLMSFPQSAPHGVVFLHVTYVPAQEKNFTTAPAICHDGKAHFPREGVFVSNGTHWFVTQRNFYEPQIITTDNTFVSGNCDVVIGIVNNTVYDPLQPELDSFKEELDKYFKNHTSPDVDLGDISGINASVVNIQKEIDRLNEVAKNLNESLIDLQELGKYEQYIKWPWYIWLGFIAGLIAIVMVTIMLCCMTSCCSCLKGCCSCGSCCKFDEDDSEPVLKGVKLHYT

SEQ ID NO: 22943 - protein, 1270 aa, Artificial Sequence
  SARS-CoV-2/Wuhan/WIV05/2019__EPI_ISL_402128 spike protein (1-1273)(L18F_D80A_D215G_L242del_A243del_L244del_R246I_K417N_E484 K_N501Y_D614G_A701V)
MFVFLVLLPLVSSQCVNFTTRTQLPPAYTNSFTRGVYYPDKVFRSSVLHSTQDLFLPFFSNVTWFHAIHVSGTNGTKRFANPVLPFNDGVYFASTEKSNIIRGWIFGTTLDSKTQSLLIVNNATNVVIKVCEFQFCNDPFLGVYYHKNNKSWMESEFRVYSSANNCTFEYVSQPFLMDLEGKQGNFKNLREFVFKNIDGYFKIYSKHTPINLVRGLPQGFSALEPLVDLPIGINITRFQTLHISYLTPGDSSSGWTAGAAAYYVGYLQPRTFLLKYNENGTITDAVDCALDPLSETKCTLKSFTVEKGIYQTSNFRVQPTESIVRFPNITNLCPFGEVFNATRFASVYAWNRKRISNCVADYSVLYNSASFSTFKCYGVSPTKLNDLCFTNVYADSFVIRGDEVRQIAPGQTGNIADYNYKLPDDFTGCVIAWNSNNLDSKVGGNYNYLYRLFRKSNLKPFERDISTEIYQAGSTPCNGVKGFNCYFPLQSYGFQPTYGVGYQPYRVVVLSFELLHAPATVCGPKKSTNLVKNKCVNFNFNGLTGTGVLTESNKKFLPFQQFGRDIADTTDAVRDPQTLEILDITPCSFGGVSVITPGTNTSNQVAVLYQGVNCTEVPVAIHADQLTPTWRVYSTGSNVFQTRAGCLIGAEHVNNSYECDIPIGAGICASYQTQTNSPRRARSVASQSIIAYTMSLGVENSVAYSNNSIAIPTNFTISVTTEILPVSMTKTSVDCTMYICGDSTECSNLLLQYGSFCTQLNRALTGIAVEQDKNTQEVFAQVKQIYKTPPIKDFGGFNFSQILPDPSKPSKRSFIEDLLFNKVTLADAGFIKQYGDCLGDIAARDLICAQKFNGLTVLPPLLTDEMIAQYTSALLAGTITSGWTFGAGAALQIPFAMQMAYRFNGIGVTQNVLYENQKLIANQFNSAIGKIQDSLSSTASALGKLQDVVNQNAQALNTLVKQLSSNFGAISSVLNDILSRLDKVEAEVQIDRLITGRLQSLQTYVTQQLIRAAEIRASANLAATKMSECVLGQSKRVDFCGKGYHLMSFPQSAPHGVVFLHVTYVPAQEKNFTTAPAICHDGKAHFPREGVFVSNGTHWFVTQRNFYEPQIITTDNTFVSGNCDVVIGIVNNTVYDPLQPELDSFKEELDKYFKNHTSPDVDLGDISGINASVVNIQKEIDRLNEVAKNLNESLIDLQELGKYEQYIKWPWYIWLGFIAGLIAIVMVTIMLCCMTSCCSCLKGCCSCGSCCKFDEDDSEPVLKGVKLHYT

SEQ ID NO: 22944 - protein, 1273 aa, Artificial Sequence
  SARS-CoV-2/Wuhan/WIV05/2019__EPI_ISL_402128 spike protein (1-1273)(E484K_D614G)
MFVFLVLLPLVSSQCVNLTTRTQLPPAYTNSFTRGVYYPDKVFRSSVLHSTQDLFLPFFSNVTWFHAIHVSGTNGTKRFDNPVLPFNDGVYFASTEKSNIIRGWIFGTTLDSKTQSLLIVNNATNVVIKVCEFQFCNDPFLGVYYHKNNKSWMESEFRVYSSANNCTFEYVSQPFLMDLEGKQGNFKNLREFVFKNIDGYFKIYSKHTPINLVRDLPQGFSALEPLVDLPIGINITRFQTLLALHRSYLTPGDSSSGWTAGAAAYYVGYLQPRTFLLKYNENGTITDAVDCALDPLSETKCTLKSFTVEKGIYQTSNFRVQPTESIVRFPNITNLCPFGEVFNATRFASVYAWNRKRISNCVADYSVLYNSASFSTFKCYGVSPTKLNDLCFTNVYADSFVIRGDEVRQIAPGQTGKIADYNYKLPDDFTGCVIAWNSNNLDSKVGGNYNYLYRLFRKSNLKPFERDISTEIYQAGSTPCNGVKGFNCYFPLQSYGFQPTNGVGYQPYRVVVLSFELLHAPATVCGPKKSTNLVKNKCVNFNFNGLTGTGVLTESNKKFLPFQQFGRDIADTTDAVRDPQTLEILDITPCSFGGVSVITPGTNTSNQVAVLYQGVNCTEVPVAIHADQLTPTWRVYSTGSNVFQTRAGCLIGAEHVNNSYECDIPIGAGICASYQTQTNSPRRARSVASQSIIAYTMSLGAENSVAYSNNSIAIPTNFTISVTTEILPVSMTKTSVDCTMYICGDSTECSNLLLQYGSFCTQLNRALTGIAVEQDKNTQEVFAQVKQIYKTPPIKDFGGFNFSQILPDPSKPSKRSFIEDLLFNKVTLADAGFIKQYGDCLGDIAARDLICAQKFNGLTVLPPLLTDEMIAQYTSALLAGTITSGWTFGAGAALQIPFAMQMAYRFNGIGVTQNVLYENQKLIANQFNSAIGKIQDSLSSTASALGKLQDVVNQNAQALNTLVKQLSSNFGAISSVLNDILSRLDKVEAEVQIDRLITGRLQSLQTYVTQQLIRAAEIRASANLAATKMSECVLGQSKRVDFCGKGYHLMSFPQSAPHGVVFLHVTYVPAQEKNFTTAPAICHDGKAHFPREGVFVSNGTHWFVTQRNFYEPQIITTDNTFVSGNCDVVIGIVNNTVYDPLQPELDSFKEELDKYFKNHTSPDVDLGDISGINASVVNIQKEIDRLNEVAKNLNESLIDLQELGKYEQYIKWPWYIWLGFIAGLIAIVMVTIMLCCMTSCCSCLKGCCSCGSCCKFDEDDSEPVLKGVKLHYT

SEQ ID NO: 22945 - protein, 1273 aa, Artificial Sequence
  SARS-CoV-2/Wuhan/WIV05/2019__EPI_ISL_402128 spike protein (1-1273)(L18F_T20N_P26S_D138Y_R190S_K417T_E484K_N501Y_D614G_H655Y _T1027I)
MFVFLVLLPLVSSQCVNFTNRTQLPSAYTNSFTRGVYYPDKVFRSSVLHSTQDLFLPFFSNVTWFHAIHVSGTNGTKRFDNPVLPFNDGVYFASTEKSNIIRGWIFGTTLDSKTQSLLIVNNATNVVIKVCEFQFCNYPFLGVYYHKNNKSWMESEFRVYSSANNCTFEYVSQPFLMDLEGKQGNFKNLSEFVFKNIDGYFKIYSKHTPINLVRDLPQGFSALEPLVDLPIGINITRFQTLLALHRSYLTPGDSSSGWTAGAAAYYVGYLQPRTFLLKYNENGTITDAVDCALDPLSETKCTLKSFTVEKGIYQTSNFRVQPTESIVRFPNITNLCPFGEVFNATRFASVYAWNRKRISNCVADYSVLYNSASFSTFKCYGVSPTKLNDLCFTNVYADSFVIRGDEVRQIAPGQTGTIADYNYKLPDDFTGCVIAWNSNNLDSKVGGNYNYLYRLFRKSNLKPFERDISTEIYQAGSTPCNGVKGFNCYFPLQSYGFQPTYGVGYQPYRVVVLSFELLHAPATVCGPKKSTNLVKNKCVNFNFNGLTGTGVLTESNKKFLPFQQFGRDIADTTDAVRDPQTLEILDITPCSFGGVSVITPGTNTSNQVAVLYQGVNCTEVPVAIHADQLTPTWRVYSTGSNVFQTRAGCLIGAEYVNNSYECDIPIGAGICASYQTQTNSPRRARSVASQSIIAYTMSLGAENSVAYSNNSIAIPTNFTISVTTEILPVSMTKTSVDCTMYICGDSTECSNLLLQYGSFCTQLNRALTGIAVEQDKNTQEVFAQVKQIYKTPPIKDFGGFNFSQILPDPSKPSKRSFIEDLLFNKVTLADAGFIKQYGDCLGDIAARDLICAQKFNGLTVLPPLLTDEMIAQYTSALLAGTITSGWTFGAGAALQIPFAMQMAYRFNGIGVTQNVLYENQKLIANQFNSAIGKIQDSLSSTASALGKLQDVVNQNAQALNTLVKQLSSNFGAISSVLNDILSRLDKVEAEVQIDRLITGRLQSLQTYVTQQLIRAAEIRASANLAAIKMSECVLGQSKRVDFCGKGYHLMSFPQSAPHGVVFLHVTYVPAQEKNFTTAPAICHDGKAHFPREGVFVSNGTHWFVTQRNFYEPQIITTDNTFVSGNCDVVIGIVNNTVYDPLQPELDSFKEELDKYFKNHTSPDVDLGDISGINASVVNIQKEIDRLNEVAKNLNESLIDLQELGKYEQYIKWPWYIWLGFIAGLIAIVMVTIMLCCMTSCCSCLKGCCSCGSCCKFDEDDSEPVLKGVKLHYT

SEQ ID NO: 22946 - protein, 1273 aa, Artificial Sequence
  SARS-CoV-2/Wuhan/WIV05/2019__EPI_ISL_402128 spike protein (1-1273)(S13I_W152C_L452R_D614G)
MFVFLVLLPLVSIQCVNLTTRTQLPPAYTNSFTRGVYYPDKVFRSSVLHSTQDLFLPFFSNVTWFHAIHVSGTNGTKRFDNPVLPFNDGVYFASTEKSNIIRGWIFGTTLDSKTQSLLIVNNATNVVIKVCEFQFCNDPFLGVYYHKNNKSCMESEFRVYSSANNCTFEYVSQPFLMDLEGKQGNFKNLREFVFKNIDGYFKIYSKHTPINLVRDLPQGFSALEPLVDLPIGINITRFQTLLALHRSYLTPGDSSSGWTAGAAAYYVGYLQPRTFLLKYNENGTITDAVDCALDPLSETKCTLKSFTVEKGIYQTSNFRVQPTESIVRFPNITNLCPFGEVFNATRFASVYAWNRKRISNCVADYSVLYNSASFSTFKCYGVSPTKLNDLCFTNVYADSFVIRGDEVRQIAPGQTGKIADYNYKLPDDFTGCVIAWNSNNLDSKVGGNYNYRYRLFRKSNLKPFERDISTEIYQAGSTPCNGVEGFNCYFPLQSYGFQPTNGVGYQPYRVVVLSFELLHAPATVCGPKKSTNLVKNKCVNFNFNGLTGTGVLTESNKKFLPFQQFGRDIADTTDAVRDPQTLEILDITPCSFGGVSVITPGTNTSNQVAVLYQGVNCTEVPVAIHADQLTPTWRVYSTGSNVFQTRAGCLIGAEHVNNSYECDIPIGAGICASYQTQTNSPRRARSVASQSIIAYTMSLGAENSVAYSNNSIAIPTNFTISVTTEILPVSMTKTSVDCTMYICGDSTECSNLLLQYGSFCTQLNRALTGIAVEQDKNTQEVFAQVKQIYKTPPIKDFGGFNFSQILPDPSKPSKRSFIEDLLFNKVTLADAGFIKQYGDCLGDIAARDLICAQKFNGLTVLPPLLTDEMIAQYTSALLAGTITSGWTFGAGAALQIPFAMQMAYRFNGIGVTQNVLYENQKLIANQFNSAIGKIQDSLSSTASALGKLQDVVNQNAQALNTLVKQLSSNFGAISSVLNDILSRLDKVEAEVQIDRLITGRLQSLQTYVTQQLIRAAEIRASANLAATKMSECVLGQSKRVDFCGKGYHLMSFPQSAPHGVVFLHVTYVPAQEKNFTTAPAICHDGKAHFPREGVFVSNGTHWFVTQRNFYEPQIITTDNTFVSGNCDVVIGIVNNTVYDPLQPELDSFKEELDKYFKNHTSPDVDLGDISGINASVVNIQKEIDRLNEVAKNLNESLIDLQELGKYEQYIKWPWYIWLGFIAGLIAIVMVTIMLCCMTSCCSCLKGCCSCGSCCKFDEDDSEPVLKGVKLHYT

SEQ ID NO: 22947 - protein, 1273 aa, Artificial Sequence; identical to SEQ ID NO: 10
  SARS-CoV-2/Wuhan/WIV05/2019__EPI_ISL_402128 spike protein (1-1273)(K986P_V987P)

SEQ ID NO: 22948 - protein, 1273 aa, Artificial Sequence; identical to SEQ ID NO: 18
  SARS-CoV-2/Wuhan/WIV05/2019__EPI_ISL_402128 spike protein (1-1273)(K986P_V987P_ D614G)

SEQ ID NO: 22949 - protein, 1273 aa, Artificial Sequence; identical to SEQ ID NO: 22740
  SARS-CoV-2/Wuhan/WIV05/2019__EPI_ISL_402128 spike protein (1-1273)(K986P_V987P_A222V_D614G)

SEQ ID NO: 22950 - protein, 1273 aa, Artificial Sequence; identical to SEQ ID NO: 22742
  SARS-CoV-2/Wuhan/WIV05/2019__EPI_ISL_402128 spike protein (1-1273)(K986P_V987P_N439K_D614G)

SEQ ID NO: 22951 - protein, 1273 aa, Artificial Sequence; identical to SEQ ID NO: 22744
  SARS-CoV-2/Wuhan/WIV05/2019__EPI_ISL_402128 spike protein (1-1273)(K986P_V987P_S477N_D614G)

SEQ ID NO: 22952 - protein, 1273 aa, Artificial Sequence; identical to SEQ ID NO: 22746
  SARS-CoV-2/Wuhan/WIV05/2019__EPI_ISL_402128 spike protein (1-1273)(K986P_V987P_N501Y_D614G)

SEQ ID NO: 22953 - protein, 1271 aa, Artificial Sequence; identical to SEQ ID NO: 22748
  SARS-CoV-2/Wuhan/WIV05/2019__EPI_ISL_402128 spike protein (1-1273)(K986P_V987P_H69del_V70del_D614G)

SEQ ID NO: 22954 - protein, 1273 aa, Artificial Sequence; identical to SEQ ID NO: 22750
  SARS-CoV-2/Wuhan/WIV05/2019__EPI_ISL_402128 spike protein (1-1273)(K986P_V987P_Y453F_D614G)

SEQ ID NO: 22955 - protein, 1273 aa, Artificial Sequence; identical to SEQ ID NO: 22752
  SARS-CoV-2/Wuhan/WIV05/2019__EPI_ISL_402128 spike protein (1-1273)(K986P_V987P_D614G_I692V)

SEQ ID NO: 22956 - protein, 1273 aa, Artificial Sequence; identical to SEQ ID NO: 394
  SARS-CoV-2/Wuhan/WIV05/2019__EPI_ISL_402128 spike protein (1-1273)(K986P_V987P_D614G_M1229I)

SEQ ID NO: 22957 - protein, 1271 aa, Artificial Sequence; identical to SEQ ID NO: 22756
  SARS-CoV-2/Wuhan/WIV05/2019__EPI_ISL_402128 spike protein (1-1273)(K986P_V987P_H69del_V70del_A222V_Y453F_S477N_D614G_I692V)

SEQ ID NO: 22958 - protein, 1271 aa, Artificial Sequence; identical to SEQ ID NO: 22758
  SARS-CoV-2/Wuhan/WIV05/2019__EPI_ISL_402128 spike protein (1-1273)(K986P_V987P_H69del_V70del_Y453F_D614G_I692V_M1229I)

SEQ ID NO: 22959 - protein, 1270 aa, Artificial Sequence
  SARS-CoV-2/Wuhan/WIV05/2019__EPI_ISL_402128 spike protein (1-1273)(K986P_V987P_K986P_V987P_H69del_V70del_Y144del_N501Y_A570 D_D614G_P681H_T716I_S982A_D1118H)
MFVFLVLLPLVSSQCVNLTTRTQLPPAYTNSFTRGVYYPDKVFRSSVLHSTQDLFLPFFSNVTWFHAISGTNGTKRFDNPVLPFNDGVYFASTEKSNIIRGWIFGTTLDSKTQSLLIVNNATNVVIKVCEFQFCNDPFLGVYHKNNKSWMESEFRVYSSANNCTFEYVSQPFLMDLEGKQGNFKNLREFVFKNIDGYFKIYSKHTPINLVRDLPQGFSALEPLVDLPIGINITRFQTLLALHRSYLTPGDSSSGWTAGAAAYYVGYLQPRTFLLKYNENGTITDAVDCALDPLSETKCTLKSFTVEKGIYQTSNFRVQPTESIVRFPNITNLCPFGEVFNATRFASVYAWNRKRISNCVADYSVLYNSASFSTFKCYGVSPTKLNDLCFTNVYADSFVIRGDEVRQIAPGQTGKIADYNYKLPDDFTGCVIAWNSNNLDSKVGGNYNYLYRLFRKSNLKPFERDISTEIYQAGSTPCNGVEGFNCYFPLQSYGFQPTYGVGYQPYRVVVLSFELLHAPATVCGPKKSTNLVKNKCVNFNFNGLTGTGVLTESNKKFLPFQQFGRDIDDTTDAVRDPQTLEILDITPCSFGGVSVITPGTNTSNQVAVLYQGVNCTEVPVAIHADQLTPTWRVYSTGSNVFQTRAGCLIGAEHVNNSYECDIPIGAGICASYQTQTNSHRRARSVASQSIIAYTMSLGAENSVAYSNNSIAIPINFTISVTTEILPVSMTKTSVDCTMYICGDSTECSNLLLQYGSFCTQLNRALTGIAVEQDKNTQEVFAQVKQIYKTPPIKDFGGFNFSQILPDPSKPSKRSFIEDLLFNKVTLADAGFIKQYGDCLGDIAARDLICAQKFNGLTVLPPLLTDEMIAQYTSALLAGTITSGWTFGAGAALQIPFAMQMAYRFNGIGVTQNVLYENQKLIANQFNSAIGKIQDSLSSTASALGKLQDVVNQNAQALNTLVKQLSSNFGAISSVLNDILARLDPPEAEVQIDRLITGRLQSLQTYVTQQLIRAAEIRASANLAATKMSECVLGQSKRVDFCGKGYHLMSFPQSAPHGVVFLHVTYVPAQEKNFTTAPAICHDGKAHFPREGVFVSNGTHWFVTQRNFYEPQIITTHNTFVSGNCDVVIGIVNNTVYDPLQPELDSFKEELDKYFKNHTSPDVDLGDISGINASVVNIQKEIDRLNEVAKNLNESLIDLQELGKYEQYIKWPWYIWLGFIAGLIAIVMVTIMLCCMTSCCSCLKGCCSCGSCCKFDEDDSEPVLKGVKLHYT

SEQ ID NO: 22960 - protein, 1273 aa, Artificial Sequence
  SARS-CoV-2/Wuhan/WIV05/2019__EPI_ISL_402128 spike protein (1-1273)(K986P_V987P_K986P_V987P_K417N_E484K_N501Y_D614G)
MFVFLVLLPLVSSQCVNLTTRTQLPPAYTNSFTRGVYYPDKVFRSSVLHSTQDLFLPFFSNVTWFHAIHVSGTNGTKRFDNPVLPFNDGVYFASTEKSNIIRGWIFGTTLDSKTQSLLIVNNATNVVIKVCEFQFCNDPFLGVYYHKNNKSWMESEFRVYSSANNCTFEYVSQPFLMDLEGKQGNFKNLREFVFKNIDGYFKIYSKHTPINLVRDLPQGFSALEPLVDLPIGINITRFQTLLALHRSYLTPGDSSSGWTAGAAAYYVGYLQPRTFLLKYNENGTITDAVDCALDPLSETKCTLKSFTVEKGIYQTSNFRVQPTESIVRFPNITNLCPFGEVFNATRFASVYAWNRKRISNCVADYSVLYNSASFSTFKCYGVSPTKLNDLCFTNVYADSFVIRGDEVRQIAPGQTGNIADYNYKLPDDFTGCVIAWNSNNLDSKVGGNYNYLYRLFRKSNLKPFERDISTEIYQAGSTPCNGVKGFNCYFPLQSYGFQPTYGVGYQPYRVVVLSFELLHAPATVCGPKKSTNLVKNKCVNFNFNGLTGTGVLTESNKKFLPFQQFGRDIADTTDAVRDPQTLEILDITPCSFGGVSVITPGTNTSNQVAVLYQGVNCTEVPVAIHADQLTPTWRVYSTGSNVFQTRAGCLIGAEHVNNSYECDIPIGAGICASYQTQTNSPRRARSVASQSIIAYTMSLGAENSVAYSNNSIAIPTNFTISVTTEILPVSMTKTSVDCTMYICGDSTECSNLLLQYGSFCTQLNRALTGIAVEQDKNTQEVFAQVKQIYKTPPIKDFGGFNFSQILPDPSKPSKRSFIEDLLFNKVTLADAGFIKQYGDCLGDIAARDLICAQKFNGLTVLPPLLTDEMIAQYTSALLAGTITSGWTFGAGAALQIPFAMQMAYRFNGIGVTQNVLYENQKLIANQFNSAIGKIQDSLSSTASALGKLQDVVNQNAQALNTLVKQLSSNFGAISSVLNDILSRLDPPEAEVQIDRLITGRLQSLQTYVTQQLIRAAEIRASANLAATKMSECVLGQSKRVDFCGKGYHLMSFPQSAPHGVVFLHVTYVPAQEKNFTTAPAICHDGKAHFPREGVFVSNGTHWFVTQRNFYEPQIITTDNTFVSGNCDVVIGIVNNTVYDPLQPELDSFKEELDKYFKNHTSPDVDLGDISGINASVVNIQKEIDRLNEVAKNLNESLIDLQELGKYEQYIKWPWYIWLGFIAGLIAIVMVTIMLCCMTSCCSCLKGCCSCGSCCKFDEDDSEPVLKGVKLHYT

SEQ ID NO: 22961 - protein, 1270 aa, Artificial Sequence
  SARS-CoV-2/Wuhan/WIV05/2019__EPI_ISL_402128 spike protein (1-1273)(K986P_V987P_K986P_V987P_L18F_D80A_D215G_L242del_A243del_ L244del_R246I_K417N_E484K_N501Y_D614G_A701V)
MFVFLVLLPLVSSQCVNFTTRTQLPPAYTNSFTRGVYYPDKVFRSSVLHSTQDLFLPFFSNVTWFHAIHVSGTNGTKRFANPVLPFNDGVYFASTEKSNIIRGWIFGTTLDSKTQSLLIVNNATNVVIKVCEFQFCNDPFLGVYYHKNNKSWMESEFRVYSSANNCTFEYVSQPFLMDLEGKQGNFKNLREFVFKNIDGYFKIYSKHTPINLVRGLPQGFSALEPLVDLPIGINITRFQTLHISYLTPGDSSSGWTAGAAAYYVGYLQPRTFLLKYNENGTITDAVDCALDPLSETKCTLKSFTVEKGIYQTSNFRVQPTESIVRFPNITNLCPFGEVFNATRFASVYAWNRKRISNCVADYSVLYNSASFSTFKCYGVSPTKLNDLCFTNVYADSFVIRGDEVRQIAPGQTGNIADYNYKLPDDFTGCVIAWNSNNLDSKVGGNYNYLYRLFRKSNLKPFERDISTEIYQAGSTPCNGVKGFNCYFPLQSYGFQPTYGVGYQPYRVVVLSFELLHAPATVCGPKKSTNLVKNKCVNFNFNGLTGTGVLTESNKKFLPFQQFGRDIADTTDAVRDPQTLEILDITPCSFGGVSVITPGTNTSNQVAVLYQGVNCTEVPVAIHADQLTPTWRVYSTGSNVFQTRAGCLIGAEHVNNSYECDIPIGAGICASYQTQTNSPRRARSVASQSIIAYTMSLGVENSVAYSNNSIAIPTNFTISVTTEILPVSMTKTSVDCTMYICGDSTECSNLLLQYGSFCTQLNRALTGIAVEQDKNTQEVFAQVKQIYKTPPIKDFGGFNFSQILPDPSKPSKRSFIEDLLFNKVTLADAGFIKQYGDCLGDIAARDLICAQKFNGLTVLPPLLTDEMIAQYTSALLAGTITSGWTFGAGAALQIPFAMQMAYRFNGIGVTQNVLYENQKLIANQFNSAIGKIQDSLSSTASALGKLQDVVNQNAQALNTLVKQLSSNFGAISSVLNDILSRLDPPEAEVQIDRLITGRLQSLQTYVTQQLIRAAEIRASANLAATKMSECVLGQSKRVDFCGKGYHLMSFPQSAPHGVVFLHVTYVPAQEKNFTTAPAICHDGKAHFPREGVFVSNGTHWFVTQRNFYEPQIITTDNTFVSGNCDVVIGIVNNTVYDPLQPELDSFKEELDKYFKNHTSPDVDLGDISGINASVVNIQKEIDRLNEVAKNLNESLIDLQELGKYEQYIKWPWYIWLGFIAGLIAIVMVTIMLCCMTSCCSCLKGCCSCGSCCKFDEDDSEPVLKGVKLHYT

SEQ ID NO: 22962 - protein, 1273 aa, Artificial Sequence
  SARS-CoV-2/Wuhan/WIV05/2019__EPI_ISL_402128 spike protein (1-1273)(K986P_V987P_K986P_V987P_E484K_D614G)
MFVFLVLLPLVSSQCVNLTTRTQLPPAYTNSFTRGVYYPDKVFRSSVLHSTQDLFLPFFSNVTWFHAIHVSGTNGTKRFDNPVLPFNDGVYFASTEKSNIIRGWIFGTTLDSKTQSLLIVNNATNVVIKVCEFQFCNDPFLGVYYHKNNKSWMESEFRVYSSANNCTFEYVSQPFLMDLEGKQGNFKNLREFVFKNIDGYFKIYSKHTPINLVRDLPQGFSALEPLVDLPIGINITRFQTLLALHRSYLTPGDSSSGWTAGAAAYYVGYLQPRTFLLKYNENGTITDAVDCALDPLSETKCTLKSFTVEKGIYQTSNFRVQPTESIVRFPNITNLCPFGEVFNATRFASVYAWNRKRISNCVADYSVLYNSASFSTFKCYGVSPTKLNDLCFTNVYADSFVIRGDEVRQIAPGQTGKIADYNYKLPDDFTGCVIAWNSNNLDSKVGGNYNYLYRLFRKSNLKPFERDISTEIYQAGSTPCNGVKGFNCYFPLQSYGFQPTNGVGYQPYRVVVLSFELLHAPATVCGPKKSTNLVKNKCVNFNFNGLTGTGVLTESNKKFLPFQQFGRDIADTTDAVRDPQTLEILDITPCSFGGVSVITPGTNTSNQVAVLYQGVNCTEVPVAIHADQLTPTWRVYSTGSNVFQTRAGCLIGAEHVNNSYECDIPIGAGICASYQTQTNSPRRARSVASQSIIAYTMSLGAENSVAYSNNSIAIPTNFTISVTTEILPVSMTKTSVDCTMYICGDSTECSNLLLQYGSFCTQLNRALTGIAVEQDKNTQEVFAQVKQIYKTPPIKDFGGFNFSQILPDPSKPSKRSFIEDLLFNKVTLADAGFIKQYGDCLGDIAARDLICAQKFNGLTVLPPLLTDEMIAQYTSALLAGTITSGWTFGAGAALQIPFAMQMAYRFNGIGVTQNVLYENQKLIANQFNSAIGKIQDSLSSTASALGKLQDVVNQNAQALNTLVKQLSSNFGAISSVLNDILSRLDPPEAEVQIDRLITGRLQSLQTYVTQQLIRAAEIRASANLAATKMSECVLGQSKRVDFCGKGYHLMSFPQSAPHGVVFLHVTYVPAQEKNFTTAPAICHDGKAHFPREGVFVSNGTHWFVTQRNFYEPQIITTDNTFVSGNCDVVIGIVNNTVYDPLQPELDSFKEELDKYFKNHTSPDVDLGDISGINASVVNIQKEIDRLNEVAKNLNESLIDLQELGKYEQYIKWPWYIWLGFIAGLIAIVMVTIMLCCMTSCCSCLKGCCSCGSCCKFDEDDSEPVLKGVKLHYT

SEQ ID NO: 22963 - protein, 1273 aa, Artificial Sequence
  SARS-CoV-2/Wuhan/WIV05/2019__EPI_ISL_402128 spike protein (1-1273)(K986P_V987P_K986P_V987P_L18F_T20N_P26S_D138Y_R190S_K417T _E484K_N501Y_D614G_H655Y_T1027I)
MFVFLVLLPLVSSQCVNFTNRTQLPSAYTNSFTRGVYYPDKVFRSSVLHSTQDLFLPFFSNVTWFHAIHVSGTNGTKRFDNPVLPFNDGVYFASTEKSNIIRGWIFGTTLDSKTQSLLIVNNATNVVIKVCEFQFCNYPFLGVYYHKNNKSWMESEFRVYSSANNCTFEYVSQPFLMDLEGKQGNFKNLSEFVFKNIDGYFKIYSKHTPINLVRDLPQGFSALEPLVDLPIGINITRFQTLLALHRSYLTPGDSSSGWTAGAAAYYVGYLQPRTFLLKYNENGTITDAVDCALDPLSETKCTLKSFTVEKGIYQTSNFRVQPTESIVRFPNITNLCPFGEVFNATRFASVYAWNRKRISNCVADYSVLYNSASFSTFKCYGVSPTKLNDLCFTNVYADSFVIRGDEVRQIAPGQTGTIADYNYKLPDDFTGCVIAWNSNNLDSKVGGNYNYLYRLFRKSNLKPFERDISTEIYQAGSTPCNGVKGFNCYFPLQSYGFQPTYGVGYQPYRVVVLSFELLHAPATVCGPKKSTNLVKNKCVNFNFNGLTGTGVLTESNKKFLPFQQFGRDIADTTDAVRDPQTLEILDITPCSFGGVSVITPGTNTSNQVAVLYQGVNCTEVPVAIHADQLTPTWRVYSTGSNVFQTRAGCLIGAEYVNNSYECDIPIGAGICASYQTQTNSPRRARSVASQSIIAYTMSLGAENSVAYSNNSIAIPTNFTISVTTEILPVSMTKTSVDCTMYICGDSTECSNLLLQYGSFCTQLNRALTGIAVEQDKNTQEVFAQVKQIYKTPPIKDFGGFNFSQILPDPSKPSKRSFIEDLLFNKVTLADAGFIKQYGDCLGDIAARDLICAQKFNGLTVLPPLLTDEMIAQYTSALLAGTITSGWTFGAGAALQIPFAMQMAYRFNGIGVTQNVLYENQKLIANQFNSAIGKIQDSLSSTASALGKLQDVVNQNAQALNTLVKQLSSNFGAISSVLNDILSRLDPPEAEVQIDRLITGRLQSLQTYVTQQLIRAAEIRASANLAAIKMSECVLGQSKRVDFCGKGYHLMSFPQSAPHGVVFLHVTYVPAQEKNFTTAPAICHDGKAHFPREGVFVSNGTHWFVTQRNFYEPQIITTDNTFVSGNCDVVIGIVNNTVYDPLQPELDSFKEELDKYFKNHTSPDVDLGDISGINASVVNIQKEIDRLNEVAKNLNESLIDLQELGKYEQYIKWPWYIWLGFIAGLIAIVMVTIMLCCMTSCCSCLKGCCSCGSCCKFDEDDSEPVLKGVKLHYT

SEQ ID NO: 22964 - protein, 1273 aa, Artificial Sequence
  SARS-CoV-2/Wuhan/WIV05/2019__EPI_ISL_402128 spike protein (1-1273)(K986P_V987P_K986P_V987P_S13I_W152C_L452R_D614G)
MFVFLVLLPLVSIQCVNLTTRTQLPPAYTNSFTRGVYYPDKVFRSSVLHSTQDLFLPFFSNVTWFHAIHVSGTNGTKRFDNPVLPFNDGVYFASTEKSNIIRGWIFGTTLDSKTQSLLIVNNATNVVIKVCEFQFCNDPFLGVYYHKNNKSCMESEFRVYSSANNCTFEYVSQPFLMDLEGKQGNFKNLREFVFKNIDGYFKIYSKHTPINLVRDLPQGFSALEPLVDLPIGINITRFQTLLALHRSYLTPGDSSSGWTAGAAAYYVGYLQPRTFLLKYNENGTITDAVDCALDPLSETKCTLKSFTVEKGIYQTSNFRVQPTESIVRFPNITNLCPFGEVFNATRFASVYAWNRKRISNCVADYSVLYNSASFSTFKCYGVSPTKLNDLCFTNVYADSFVIRGDEVRQIAPGQTGKIADYNYKLPDDFTGCVIAWNSNNLDSKVGGNYNYRYRLFRKSNLKPFERDISTEIYQAGSTPCNGVEGFNCYFPLQSYGFQPTNGVGYQPYRVVVLSFELLHAPATVCGPKKSTNLVKNKCVNFNFNGLTGTGVLTESNKKFLPFQQFGRDIADTTDAVRDPQTLEILDITPCSFGGVSVITPGTNTSNQVAVLYQGVNCTEVPVAIHADQLTPTWRVYSTGSNVFQTRAGCLIGAEHVNNSYECDIPIGAGICASYQTQTNSPRRARSVASQSIIAYTMSLGAENSVAYSNNSIAIPTNFTISVTTEILPVSMTKTSVDCTMYICGDSTECSNLLLQYGSFCTQLNRALTGIAVEQDKNTQEVFAQVKQIYKTPPIKDFGGFNFSQILPDPSKPSKRSFIEDLLFNKVTLADAGFIKQYGDCLGDIAARDLICAQKFNGLTVLPPLLTDEMIAQYTSALLAGTITSGWTFGAGAALQIPFAMQMAYRFNGIGVTQNVLYENQKLIANQFNSAIGKIQDSLSSTASALGKLQDVVNQNAQALNTLVKQLSSNFGAISSVLNDILSRLDPPEAEVQIDRLITGRLQSLQTYVTQQLIRAAEIRASANLAATKMSECVLGQSKRVDFCGKGYHLMSFPQSAPHGVVFLHVTYVPAQEKNFTTAPAICHDGKAHFPREGVFVSNGTHWFVTQRNFYEPQIITTDNTFVSGNCDVVIGIVNNTVYDPLQPELDSFKEELDKYFKNHTSPDVDLGDISGINASVVNIQKEIDRLNEVAKNLNESLIDLQELGKYEQYIKWPWYIWLGFIAGLIAIVMVTIMLCCMTSCCSCLKGCCSCGSCCKFDEDDSEPVLKGVKLHYT

SEQ ID NO: 22965 - RNA, 1152 nt, Artificial Sequence; identical to SEQ ID NO: 22760
  SARS-CoV-2/Wuhan/WIV05/2019__EPI_ISL_402128 spike protein CDS gc (1-15,334-528) Ferritin construct

SEQ ID NO: 22966 - RNA, 750 nt, Artificial Sequence; identical to SEQ ID NO: 22761
  SARS-CoV-2/Wuhan/WIV05/2019__EPI_ISL_402128 spike protein CDS gc (334-528) Foldon construct

SEQ ID NO: 22967 - RNA, 1128 nt, Artificial Sequence; identical to SEQ ID NO: 22762
  SARS-CoV-2/Wuhan/WIV05/2019__EPI_ISL_402128 spike protein CDS gc (1-15,334-528) LumSynth construct

SEQ ID NO: 22968 - RNA, 1089 nt, Artificial Sequence; identical to SEQ ID NO: 22763
  SARS-CoV-2/Wuhan/WIV05/2019__EPI_ISL_402128 spike protein CDS gc (334-528) LumSynth construct

SEQ ID NO: 22969 - RNA, 3822 nt, Artificial Sequence; identical to SEQ ID NO: 136
  SARS-CoV-2/Wuhan/WIV05/2019__EPI_ISL_402128 spike protein CDS gc (1-1273)

SEQ ID NO: 22970 - RNA, 3822 nt, Artificial Sequence; identical to SEQ ID NO: 22764
  SARS-CoV-2/Wuhan/WIV05/2019__EPI_ISL_402128 spike protein CDS gc (1-1273)(D614G)

SEQ ID NO: 22971 - RNA, 3822 nt, Artificial Sequence; identical to SEQ ID NO: 22766
  SARS-CoV-2/Wuhan/WIV05/2019__EPI_ISL_402128 spike protein CDS gc (1-1273)(A222V_D614G)

SEQ ID NO: 22972 - RNA, 3822 nt, Artificial Sequence; identical to SEQ ID NO: 22768
  SARS-CoV-2/Wuhan/WIV05/2019__EPI_ISL_402128 spike protein CDS gc (1-1273)(N439K_D614G)

SEQ ID NO: 22973 - RNA, 3822 nt, Artificial Sequence; identical to SEQ ID NO: 22770
  SARS-CoV-2/Wuhan/WIV05/2019__EPI_ISL_402128 spike protein CDS gc (1-1273)(S477N_D614G)

SEQ ID NO: 22974 - RNA, 3822 nt, Artificial Sequence; identical to SEQ ID NO: 22772
  SARS-CoV-2/Wuhan/WIV05/2019__EPI_ISL_402128 spike protein CDS gc (1-1273)(N501Y_D614G)

SEQ ID NO: 22975 - RNA, 3816 nt, Artificial Sequence; identical to SEQ ID NO: 22774
  SARS-CoV-2/Wuhan/WIV05/2019__EPI_ISL_402128 spike protein CDS gc (1-1273)(H69del_V70del_D614G)

SEQ ID NO: 22976 - RNA, 3822 nt, Artificial Sequence; identical to SEQ ID NO: 22776
  SARS-CoV-2/Wuhan/WIV05/2019__EPI_ISL_402128 spike protein CDS gc (1-1273)(Y453F_D614G)

SEQ ID NO: 22977 - RNA, 3822 nt, Artificial Sequence; identical to SEQ ID NO: 22778
  SARS-CoV-2/Wuhan/WIV05/2019__EPI_ISL_402128 spike protein CDS gc (1-1273)(D614G_I692V)

SEQ ID NO: 22978 - RNA, 3822 nt, Artificial Sequence; identical to SEQ ID NO: 22780
  SARS-CoV-2/Wuhan/WIV05/2019__EPI_ISL_402128 spike protein CDS gc (1-1273)(D614G_M1229I)

SEQ ID NO: 22979 - RNA, 3816 nt, Artificial Sequence; identical to SEQ ID NO: 22782
  SARS-CoV-2/Wuhan/WIV05/2019__EPI_ISL_402128 spike protein CDS gc (1-1273)(H69del_V70del_A222V_Y453F_S477N_D614G_I692V)

SEQ ID NO: 22980 - RNA, 3816 nt, Artificial Sequence; identical to SEQ ID NO: 22784
  SARS-CoV-2/Wuhan/WIV05/2019__EPI_ISL_402128 spike protein CDS gc (1-1273)(H69del_V70del_Y453F_D614G_I692V_M1229I)

SEQ ID NO: 22981 - RNA, 3813 nt, Artificial Sequence
  SARS-CoV-2/Wuhan/WIV05/2019__EPI_ISL_402128 spike protein CDS gc (1-1273)(H69del_V70del_Y144del_N501Y_A570D_D614G_P681H_T716I_S982 A_D1118H)
auguucguguuccugguccuccugccccuggugagcucccagugcgugaaccucaccacccgcacgcagcugccgcccgccuacaccaacagcuucacccggggcgucuacuaccccgacaagguguuccgcuccagcgugcugcacuccacccaggaccucuuccugcccuucuucagcaacgucacgugguuccacgccaucuccgggaccaacggcaccaagcgguucgacaacccggugcugcccuucaacgacggggucuacuucgcgagcaccgagaaguccaacaucauccgcggcuggaucuucgggacgacccucgacagcaagacccagucccugcugaucgugaacaacgccaccaacguggucaucaaggugugcgaguuccaguucugcaacgaccccuuccucggcguguaccacaagaacaacaagagcuggauggaguccgaguuccgggucuacagcuccgccaacaacugcacguucgaguacgugagccagcccuuccugauggaccuggagggcaagcaggggaacuucaagaaccuccgcgaguucguguucaagaacaucgacggcuacuucaagaucuacuccaagcacaccccgaucaaccugguccgggaccugccccagggguucagcgcccucgagccccugguggaccugcccaucggcaucaacaucacccgcuuccagacccuccuggcccugcaccgguccuaccucacgccgggggacagcagcuccggcuggaccgcgggcgccgccgccuacuacgugggguaccugcagccccgcaccuuccugcucaaguacaacgagaacggcaccaucacggacgcggucgacugcgcccuggacccccugagcgagaccaagugcacccucaaguccuucaccguggagaaggggaucuaccagacgagcaacuuccgggugcagcccaccgaguccaucguccgcuucccgaacaucaccaaccugugccccuucggcgagguguucaacgccacccgguucgccagcgucuacgccuggaaccgcaagcggaucuccaacugcguggcggacuacagcgugcuguacaacuccgccagcuucuccacguucaagugcuacggcgucagccccaccaagcucaacgaccugugcuucaccaacguguacgccgacuccuucgugauccgcggggacgagguccggcagaucgcccccggccagaccgggaagaucgccgacuacaacuacaagcugccggacgacuucacgggcugcgugaucgcguggaacagcaacaaccucgacuccaaggucgggggcaacuacaacuaccuguaccgccuguuccgcaagagcaaccucaagcccuucgagcgggacaucuccaccgagaucuaccaggccggcagcacccccugcaacgggguggagggcuucaacugcuacuucccccugcaguccuacggguuccagccgaccuacggcgugggguaccagcccuaccggguggucgugcugagcuucgagcuccugcacgcccccgccacggugugcggccccaagaaguccaccaaccuggucaagaacaagugcgugaacuucaacuucaacggccucaccgggaccggcgugcugaccgagagcaacaagaaguuccugccguuccagcaguucgggcgcgacaucgacgacacgaccgacgcgguccgcgacccccagacccuggagauccucgacaucacccccugcagcuucggcgggguguccgugaucacgccgggcaccaacaccagcaaccaggucgccgugcuguaccagggcgugaacugcaccgagguccccguggccauccacgccgaccagcugacgcccaccuggcggguguacuccaccggcagcaacgucuuccagacccgcgccgggugccucaucggcgcggagcacgugaacaacuccuacgagugcgacauccccaucggggccggcaucugcgccagcuaccagacgcagaccaacucccaccggcgcgcccggagcguggcgucccagagcaucaucgccuacaccaugucccugggcgccgagaacagcgucgccuacuccaacaacagcaucgccauccccaucaacuucacgaucuccgugaccaccgagauccugcccgugagcaugaccaagacgagcgucgacugcaccauguacaucugcggggacuccaccgagugcagcaaccuccugcugcaguacggcuccuucugcacccagcucaaccgcgcgcugacggggaucgccguggagcaggacaagaacacccaggagguguucgcccaggucaagcagaucuacaagacgcccccgaucaaggacuucggcggguucaacuucagccagauccugcccgaccccuccaagcccagcaagcgguccuucaucgaggaccuccuguucaacaaggugacccuggccgacgccggcuucaucaagcaguacggcgacugccucggggacaucgcggcccgcgaccugaucugcgcccagaaguucaacggccugaccgugcucccgccccugcugaccgacgagaugaucgcccaguacaccagcgcccuccuggcggggaccaucacguccggcuggaccuucggggccggcgccgcccugcagauccccuucgcgaugcagauggccuaccgguucaacggcaucggggucacccagaacgugcucuacgagaaccagaagcugaucgccaaccaguucaacagcgccaucggcaagauccaggacucccugagcuccaccgccagcgcgcucgggaagcugcaggacguggucaaccagaacgcccaggcccugaacacgcucgugaagcagcuguccagcaacuucggcgccaucuccagcgugcugaacgacauccucgcccgccuggacaaggucgaggccgaggugcagaucgaccggcugaucaccgggcgccuccagagccugcagaccuacgugacccagcagcugauccgggcggccgagauccgcgccagcgccaaccucgccgcgaccaagauguccgagugcguccugggccagagcaagcggguggacuucugcggcaagggguaccaccugauguccuucccccagagcgccccgcacggcguggucuuccuccacgugacguacguccccgcccaggagaagaacuucaccaccgcccccgcgaucugccacgacgggaaggcccacuucccccgcgagggcguguucguguccaacgggacccacugguucgucacgcagcggaacuucuacgagccgcagaucaucaccacccacaacaccuucgugagcggcaacugcgacguggucaucggcaucgugaacaacacgguguacgacccccugcagcccgagcuggacuccuucaaggaggagcucgacaaguacuucaagaaccacaccagccccgacgucgaccugggggacaucuccggcaucaacgccagcguggugaacauccagaaggagaucgaccgccugaacgaggucgccaagaaccucaacgagucccugaucgaccugcaggagcucgggaaguacgagcaguacaucaaguggccgugguacaucuggcugggcuucaucgccggccugaucgcgaucgugauggugaccaucaugcucugcugcaugaccagcugcugcuccugccugaaggggugcugcagcugcggcuccugcugcaaguucgacgaggacgacagcgagcccguccugaagggggugaagcuccacuacacguga

SEQ ID NO: 22982 - RNA, 3822 nt, Artificial Sequence
  SARS-CoV-2/Wuhan/WIV05/2019__EPI_ISL_402128 spike protein CDS gc (1-1273)(K417N_E484K_N501Y_D614G)
auguucguguuccugguccuccugccccuggugagcucccagugcgugaaccucaccacccgcacgcagcugccgcccgccuacaccaacagcuucacccggggcgucuacuaccccgacaagguguuccgcuccagcgugcugcacuccacccaggaccucuuccugcccuucuucagcaacgucacgugguuccacgccauccacguguccgggaccaacggcaccaagcgguucgacaacccggugcugcccuucaacgacggggucuacuucgcgagcaccgagaaguccaacaucauccgcggcuggaucuucgggacgacccucgacagcaagacccagucccugcugaucgugaacaacgccaccaacguggucaucaaggugugcgaguuccaguucugcaacgaccccuuccucggcguguacuaccacaagaacaacaagagcuggauggaguccgaguuccgggucuacagcuccgccaacaacugcacguucgaguacgugagccagcccuuccugauggaccuggagggcaagcaggggaacuucaagaaccuccgcgaguucguguucaagaacaucgacggcuacuucaagaucuacuccaagcacaccccgaucaaccugguccgggaccugccccagggguucagcgcccucgagccccugguggaccugcccaucggcaucaacaucacccgcuuccagacccuccuggcccugcaccgguccuaccucacgccgggggacagcagcuccggcuggaccgcgggcgccgccgccuacuacgugggguaccugcagccccgcaccuuccugcucaaguacaacgagaacggcaccaucacggacgcggucgacugcgcccuggacccccugagcgagaccaagugcacccucaaguccuucaccguggagaaggggaucuaccagacgagcaacuuccgggugcagcccaccgaguccaucguccgcuucccgaacaucaccaaccugugccccuucggcgagguguucaacgccacccgguucgccagcgucuacgccuggaaccgcaagcggaucuccaacugcguggcggacuacagcgugcuguacaacuccgccagcuucuccacguucaagugcuacggcgucagccccaccaagcucaacgaccugugcuucaccaacguguacgccgacuccuucgugauccgcggggacgagguccggcagaucgcccccggccagaccgggaacaucgccgacuacaacuacaagcugccggacgacuucacgggcugcgugaucgcguggaacagcaacaaccucgacuccaaggucgggggcaacuacaacuaccuguaccgccuguuccgcaagagcaaccucaagcccuucgagcgggacaucuccaccgagaucuaccaggccggcagcacccccugcaacggggugaagggcuucaacugcuacuucccccugcaguccuacggguuccagccgaccuacggcgugggguaccagcccuaccggguggucgugcugagcuucgagcuccugcacgcccccgccacggugugcggccccaagaaguccaccaaccuggucaagaacaagugcgugaacuucaacuucaacggccucaccgggaccggcgugcugaccgagagcaacaagaaguuccugccguuccagcaguucgggcgcgacaucgccgacacgaccgacgcgguccgcgacccccagacccuggagauccucgacaucacccccugcagcuucggcgggguguccgugaucacgccgggcaccaacaccagcaaccaggucgccgugcuguaccagggcgugaacugcaccgagguccccguggccauccacgccgaccagcugacgcccaccuggcggguguacuccaccggcagcaacgucuuccagacccgcgccgggugccucaucggcgcggagcacgugaacaacuccuacgagugcgacauccccaucggggccggcaucugcgccagcuaccagacgcagaccaacuccccgcggcgcgcccggagcguggcgucccagagcaucaucgccuacaccaugucccugggcgccgagaacagcgucgccuacuccaacaacagcaucgccauccccaccaacuucacgaucuccgugaccaccgagauccugcccgugagcaugaccaagacgagcgucgacugcaccauguacaucugcggggacuccaccgagugcagcaaccuccugcugcaguacggcuccuucugcacccagcucaaccgcgcgcugacggggaucgccguggagcaggacaagaacacccaggagguguucgcccaggucaagcagaucuacaagacgcccccgaucaaggacuucggcggguucaacuucagccagauccugcccgaccccuccaagcccagcaagcgguccuucaucgaggaccuccuguucaacaaggugacccuggccgacgccggcuucaucaagcaguacggcgacugccucggggacaucgcggcccgcgaccugaucugcgcccagaaguucaacggccugaccgugcucccgccccugcugaccgacgagaugaucgcccaguacaccagcgcccuccuggcggggaccaucacguccggcuggaccuucggggccggcgccgcccugcagauccccuucgcgaugcagauggccuaccgguucaacggcaucggggucacccagaacgugcucuacgagaaccagaagcugaucgccaaccaguucaacagcgccaucggcaagauccaggacucccugagcuccaccgccagcgcgcucgggaagcugcaggacguggucaaccagaacgcccaggcccugaacacgcucgugaagcagcuguccagcaacuucggcgccaucuccagcgugcugaacgacauccucucccgccuggacaaggucgaggccgaggugcagaucgaccggcugaucaccgggcgccuccagagccugcagaccuacgugacccagcagcugauccgggcggccgagauccgcgccagcgccaaccucgccgcgaccaagauguccgagugcguccugggccagagcaagcggguggacuucugcggcaagggguaccaccugauguccuucccccagagcgccccgcacggcguggucuuccuccacgugacguacguccccgcccaggagaagaacuucaccaccgcccccgcgaucugccacgacgggaaggcccacuucccccgcgagggcguguucguguccaacgggacccacugguucgucacgcagcggaacuucuacgagccgcagaucaucaccaccgacaacaccuucgugagcggcaacugcgacguggucaucggcaucgugaacaacacgguguacgacccccugcagcccgagcuggacuccuucaaggaggagcucgacaaguacuucaagaaccacaccagccccgacgucgaccugggggacaucuccggcaucaacgccagcguggugaacauccagaaggagaucgaccgccugaacgaggucgccaagaaccucaacgagucccugaucgaccugcaggagcucgggaaguacgagcaguacaucaaguggccgugguacaucuggcugggcuucaucgccggccugaucgcgaucgugauggugaccaucaugcucugcugcaugaccagcugcugcuccugccugaaggggugcugcagcugcggcuccugcugcaaguucgacgaggacgacagcgagcccguccugaagggggugaagcuccacuacacguga

SEQ ID NO: 22983 - RNA, 3813 nt, Artificial Sequence
  SARS-CoV-2/Wuhan/WIV05/2019__EPI_ISL_402128 spike protein CDS gc (1-1273)(L18F_D80A_D215G_L242del_A243del_L244del_R246I_K417N_E484 K_N501Y_D614G_A701V)
auguucguguuccugguccuccugccccuggugagcucccagugcgugaacuucaccacccgcacgcagcugccgcccgccuacaccaacagcuucacccggggcgucuacuaccccgacaagguguuccgcuccagcgugcugcacuccacccaggaccucuuccugcccuucuucagcaacgucacgugguuccacgccauccacguguccgggaccaacggcaccaagcgguucgccaacccggugcugcccuucaacgacggggucuacuucgcgagcaccgagaaguccaacaucauccgcggcuggaucuucgggacgacccucgacagcaagacccagucccugcugaucgugaacaacgccaccaacguggucaucaaggugugcgaguuccaguucugcaacgaccccuuccucggcguguacuaccacaagaacaacaagagcuggauggaguccgaguuccgggucuacagcuccgccaacaacugcacguucgaguacgugagccagcccuuccugauggaccuggagggcaagcaggggaacuucaagaaccuccgcgaguucguguucaagaacaucgacggcuacuucaagaucuacuccaagcacaccccgaucaaccugguccggggccugccccagggguucagcgcccucgagccccugguggaccugcccaucggcaucaacaucacccgcuuccagacccuccacaucuccuaccucacgccgggggacagcagcuccggcuggaccgcgggcgccgccgccuacuacgugggguaccugcagccccgcaccuuccugcucaaguacaacgagaacggcaccaucacggacgcggucgacugcgcccuggacccccugagcgagaccaagugcacccucaaguccuucaccguggagaaggggaucuaccagacgagcaacuuccgggugcagcccaccgaguccaucguccgcuucccgaacaucaccaaccugugccccuucggcgagguguucaacgccacccgguucgccagcgucuacgccuggaaccgcaagcggaucuccaacugcguggcggacuacagcgugcuguacaacuccgccagcuucuccacguucaagugcuacggcgucagccccaccaagcucaacgaccugugcuucaccaacguguacgccgacuccuucgugauccgcggggacgagguccggcagaucgcccccggccagaccgggaacaucgccgacuacaacuacaagcugccggacgacuucacgggcugcgugaucgcguggaacagcaacaaccucgacuccaaggucgggggcaacuacaacuaccuguaccgccuguuccgcaagagcaaccucaagcccuucgagcgggacaucuccaccgagaucuaccaggccggcagcacccccugcaacggggugaagggcuucaacugcuacuucccccugcaguccuacggguuccagccgaccuacggcgugggguaccagcccuaccggguggucgugcugagcuucgagcuccugcacgcccccgccacggugugcggccccaagaaguccaccaaccuggucaagaacaagugcgugaacuucaacuucaacggccucaccgggaccggcgugcugaccgagagcaacaagaaguuccugccguuccagcaguucgggcgcgacaucgccgacacgaccgacgcgguccgcgacccccagacccuggagauccucgacaucacccccugcagcuucggcgggguguccgugaucacgccgggcaccaacaccagcaaccaggucgccgugcuguaccagggcgugaacugcaccgagguccccguggccauccacgccgaccagcugacgcccaccuggcggguguacuccaccggcagcaacgucuuccagacccgcgccgggugccucaucggcgcggagcacgugaacaacuccuacgagugcgacauccccaucggggccggcaucugcgccagcuaccagacgcagaccaacuccccgcggcgcgcccggagcguggcgucccagagcaucaucgccuacaccaugucccugggcguggagaacagcgucgccuacuccaacaacagcaucgccauccccaccaacuucacgaucuccgugaccaccgagauccugcccgugagcaugaccaagacgagcgucgacugcaccauguacaucugcggggacuccaccgagugcagcaaccuccugcugcaguacggcuccuucugcacccagcucaaccgcgcgcugacggggaucgccguggagcaggacaagaacacccaggagguguucgcccaggucaagcagaucuacaagacgcccccgaucaaggacuucggcggguucaacuucagccagauccugcccgaccccuccaagcccagcaagcgguccuucaucgaggaccuccuguucaacaaggugacccuggccgacgccggcuucaucaagcaguacggcgacugccucggggacaucgcggcccgcgaccugaucugcgcccagaaguucaacggccugaccgugcucccgccccugcugaccgacgagaugaucgcccaguacaccagcgcccuccuggcggggaccaucacguccggcuggaccuucggggccggcgccgcccugcagauccccuucgcgaugcagauggccuaccgguucaacggcaucggggucacccagaacgugcucuacgagaaccagaagcugaucgccaaccaguucaacagcgccaucggcaagauccaggacucccugagcuccaccgccagcgcgcucgggaagcugcaggacguggucaaccagaacgcccaggcccugaacacgcucgugaagcagcuguccagcaacuucggcgccaucuccagcgugcugaacgacauccucucccgccuggacaaggucgaggccgaggugcagaucgaccggcugaucaccgggcgccuccagagccugcagaccuacgugacccagcagcugauccgggcggccgagauccgcgccagcgccaaccucgccgcgaccaagauguccgagugcguccugggccagagcaagcggguggacuucugcggcaagggguaccaccugauguccuucccccagagcgccccgcacggcguggucuuccuccacgugacguacguccccgcccaggagaagaacuucaccaccgcccccgcgaucugccacgacgggaaggcccacuucccccgcgagggcguguucguguccaacgggacccacugguucgucacgcagcggaacuucuacgagccgcagaucaucaccaccgacaacaccuucgugagcggcaacugcgacguggucaucggcaucgugaacaacacgguguacgacccccugcagcccgagcuggacuccuucaaggaggagcucgacaaguacuucaagaaccacaccagccccgacgucgaccugggggacaucuccggcaucaacgccagcguggugaacauccagaaggagaucgaccgccugaacgaggucgccaagaaccucaacgagucccugaucgaccugcaggagcucgggaaguacgagcaguacaucaaguggccgugguacaucuggcugggcuucaucgccggccugaucgcgaucgugauggugaccaucaugcucugcugcaugaccagcugcugcuccugccugaaggggugcugcagcugcggcuccugcugcaaguucgacgaggacgacagcgagcccguccugaagggggugaagcuccacuacacguga

SEQ ID NO: 22984 - RNA, 3822 nt, Artificial Sequence
  SARS-CoV-2/Wuhan/WIV05/2019__EPI_ISL_402128 spike protein CDS gc (1-1273)(E484K_D614G)
auguucguguuccugguccuccugccccuggugagcucccagugcgugaaccucaccacccgcacgcagcugccgcccgccuacaccaacagcuucacccggggcgucuacuaccccgacaagguguuccgcuccagcgugcugcacuccacccaggaccucuuccugcccuucuucagcaacgucacgugguuccacgccauccacguguccgggaccaacggcaccaagcgguucgacaacccggugcugcccuucaacgacggggucuacuucgcgagcaccgagaaguccaacaucauccgcggcuggaucuucgggacgacccucgacagcaagacccagucccugcugaucgugaacaacgccaccaacguggucaucaaggugugcgaguuccaguucugcaacgaccccuuccucggcguguacuaccacaagaacaacaagagcuggauggaguccgaguuccgggucuacagcuccgccaacaacugcacguucgaguacgugagccagcccuuccugauggaccuggagggcaagcaggggaacuucaagaaccuccgcgaguucguguucaagaacaucgacggcuacuucaagaucuacuccaagcacaccccgaucaaccugguccgggaccugccccagggguucagcgcccucgagccccugguggaccugcccaucggcaucaacaucacccgcuuccagacccuccuggcccugcaccgguccuaccucacgccgggggacagcagcuccggcuggaccgcgggcgccgccgccuacuacgugggguaccugcagccccgcaccuuccugcucaaguacaacgagaacggcaccaucacggacgcggucgacugcgcccuggacccccugagcgagaccaagugcacccucaaguccuucaccguggagaaggggaucuaccagacgagcaacuuccgggugcagcccaccgaguccaucguccgcuucccgaacaucaccaaccugugccccuucggcgagguguucaacgccacccgguucgccagcgucuacgccuggaaccgcaagcggaucuccaacugcguggcggacuacagcgugcuguacaacuccgccagcuucuccacguucaagugcuacggcgucagccccaccaagcucaacgaccugugcuucaccaacguguacgccgacuccuucgugauccgcggggacgagguccggcagaucgcccccggccagaccgggaagaucgccgacuacaacuacaagcugccggacgacuucacgggcugcgugaucgcguggaacagcaacaaccucgacuccaaggucgggggcaacuacaacuaccuguaccgccuguuccgcaagagcaaccucaagcccuucgagcgggacaucuccaccgagaucuaccaggccggcagcacccccugcaacggggugaagggcuucaacugcuacuucccccugcaguccuacggguuccagccgaccaacggcgugggguaccagcccuaccggguggucgugcugagcuucgagcuccugcacgcccccgccacggugugcggccccaagaaguccaccaaccuggucaagaacaagugcgugaacuucaacuucaacggccucaccgggaccggcgugcugaccgagagcaacaagaaguuccugccguuccagcaguucgggcgcgacaucgccgacacgaccgacgcgguccgcgacccccagacccuggagauccucgacaucacccccugcagcuucggcgggguguccgugaucacgccgggcaccaacaccagcaaccaggucgccgugcuguaccagggcgugaacugcaccgagguccccguggccauccacgccgaccagcugacgcccaccuggcggguguacuccaccggcagcaacgucuuccagacccgcgccgggugccucaucggcgcggagcacgugaacaacuccuacgagugcgacauccccaucggggccggcaucugcgccagcuaccagacgcagaccaacuccccgcggcgcgcccggagcguggcgucccagagcaucaucgccuacaccaugucccugggcgccgagaacagcgucgccuacuccaacaacagcaucgccauccccaccaacuucacgaucuccgugaccaccgagauccugcccgugagcaugaccaagacgagcgucgacugcaccauguacaucugcggggacuccaccgagugcagcaaccuccugcugcaguacggcuccuucugcacccagcucaaccgcgcgcugacggggaucgccguggagcaggacaagaacacccaggagguguucgcccaggucaagcagaucuacaagacgcccccgaucaaggacuucggcggguucaacuucagccagauccugcccgaccccuccaagcccagcaagcgguccuucaucgaggaccuccuguucaacaaggugacccuggccgacgccggcuucaucaagcaguacggcgacugccucggggacaucgcggcccgcgaccugaucugcgcccagaaguucaacggccugaccgugcucccgccccugcugaccgacgagaugaucgcccaguacaccagcgcccuccuggcggggaccaucacguccggcuggaccuucggggccggcgccgcccugcagauccccuucgcgaugcagauggccuaccgguucaacggcaucggggucacccagaacgugcucuacgagaaccagaagcugaucgccaaccaguucaacagcgccaucggcaagauccaggacucccugagcuccaccgccagcgcgcucgggaagcugcaggacguggucaaccagaacgcccaggcccugaacacgcucgugaagcagcuguccagcaacuucggcgccaucuccagcgugcugaacgacauccucucccgccuggacaaggucgaggccgaggugcagaucgaccggcugaucaccgggcgccuccagagccugcagaccuacgugacccagcagcugauccgggcggccgagauccgcgccagcgccaaccucgccgcgaccaagauguccgagugcguccugggccagagcaagcggguggacuucugcggcaagggguaccaccugauguccuucccccagagcgccccgcacggcguggucuuccuccacgugacguacguccccgcccaggagaagaacuucaccaccgcccccgcgaucugccacgacgggaaggcccacuucccccgcgagggcguguucguguccaacgggacccacugguucgucacgcagcggaacuucuacgagccgcagaucaucaccaccgacaacaccuucgugagcggcaacugcgacguggucaucggcaucgugaacaacacgguguacgacccccugcagcccgagcuggacuccuucaaggaggagcucgacaaguacuucaagaaccacaccagccccgacgucgaccugggggacaucuccggcaucaacgccagcguggugaacauccagaaggagaucgaccgccugaacgaggucgccaagaaccucaacgagucccugaucgaccugcaggagcucgggaaguacgagcaguacaucaaguggccgugguacaucuggcugggcuucaucgccggccugaucgcgaucgugauggugaccaucaugcucugcugcaugaccagcugcugcuccugccugaaggggugcugcagcugcggcuccugcugcaaguucgacgaggacgacagcgagcccguccugaagggggugaagcuccacuacacguga

SEQ ID NO: 22985 - RNA, 3822 nt, Artificial Sequence
  SARS-CoV-2/Wuhan/WIV05/2019__EPI_ISL_402128 spike protein CDS gc (1-1273)(L18F_T20N_P26S_D138Y_R190S_K417T_E484K_N501Y_D614G_H655Y _T1027I)
auguucguguuccugguccuccugccccuggugagcucccagugcgugaacuucaccaaccgcacgcagcugccgagcgccuacaccaacagcuucacccggggcgucuacuaccccgacaagguguuccgcuccagcgugcugcacuccacccaggaccucuuccugcccuucuucagcaacgucacgugguuccacgccauccacguguccgggaccaacggcaccaagcgguucgacaacccggugcugcccuucaacgacggggucuacuucgcgagcaccgagaaguccaacaucauccgcggcuggaucuucgggacgacccucgacagcaagacccagucccugcugaucgugaacaacgccaccaacguggucaucaaggugugcgaguuccaguucugcaacuaccccuuccucggcguguacuaccacaagaacaacaagagcuggauggaguccgaguuccgggucuacagcuccgccaacaacugcacguucgaguacgugagccagcccuuccugauggaccuggagggcaagcaggggaacuucaagaaccucagcgaguucguguucaagaacaucgacggcuacuucaagaucuacuccaagcacaccccgaucaaccugguccgggaccugccccagggguucagcgcccucgagccccugguggaccugcccaucggcaucaacaucacccgcuuccagacccuccuggcccugcaccgguccuaccucacgccgggggacagcagcuccggcuggaccgcgggcgccgccgccuacuacgugggguaccugcagccccgcaccuuccugcucaaguacaacgagaacggcaccaucacggacgcggucgacugcgcccuggacccccugagcgagaccaagugcacccucaaguccuucaccguggagaaggggaucuaccagacgagcaacuuccgggugcagcccaccgaguccaucguccgcuucccgaacaucaccaaccugugccccuucggcgagguguucaacgccacccgguucgccagcgucuacgccuggaaccgcaagcggaucuccaacugcguggcggacuacagcgugcuguacaacuccgccagcuucuccacguucaagugcuacggcgucagccccaccaagcucaacgaccugugcuucaccaacguguacgccgacuccuucgugauccgcggggacgagguccggcagaucgcccccggccagaccgggaccaucgccgacuacaacuacaagcugccggacgacuucacgggcugcgugaucgcguggaacagcaacaaccucgacuccaaggucgggggcaacuacaacuaccuguaccgccuguuccgcaagagcaaccucaagcccuucgagcgggacaucuccaccgagaucuaccaggccggcagcacccccugcaacggggugaagggcuucaacugcuacuucccccugcaguccuacggguuccagccgaccuacggcgugggguaccagcccuaccggguggucgugcugagcuucgagcuccugcacgcccccgccacggugugcggccccaagaaguccaccaaccuggucaagaacaagugcgugaacuucaacuucaacggccucaccgggaccggcgugcugaccgagagcaacaagaaguuccugccguuccagcaguucgggcgcgacaucgccgacacgaccgacgcgguccgcgacccccagacccuggagauccucgacaucacccccugcagcuucggcgggguguccgugaucacgccgggcaccaacaccagcaaccaggucgccgugcuguaccagggcgugaacugcaccgagguccccguggccauccacgccgaccagcugacgcccaccuggcggguguacuccaccggcagcaacgucuuccagacccgcgccgggugccucaucggcgcggaguacgugaacaacuccuacgagugcgacauccccaucggggccggcaucugcgccagcuaccagacgcagaccaacuccccgcggcgcgcccggagcguggcgucccagagcaucaucgccuacaccaugucccugggcgccgagaacagcgucgccuacuccaacaacagcaucgccauccccaccaacuucacgaucuccgugaccaccgagauccugcccgugagcaugaccaagacgagcgucgacugcaccauguacaucugcggggacuccaccgagugcagcaaccuccugcugcaguacggcuccuucugcacccagcucaaccgcgcgcugacggggaucgccguggagcaggacaagaacacccaggagguguucgcccaggucaagcagaucuacaagacgcccccgaucaaggacuucggcggguucaacuucagccagauccugcccgaccccuccaagcccagcaagcgguccuucaucgaggaccuccuguucaacaaggugacccuggccgacgccggcuucaucaagcaguacggcgacugccucggggacaucgcggcccgcgaccugaucugcgcccagaaguucaacggccugaccgugcucccgccccugcugaccgacgagaugaucgcccaguacaccagcgcccuccuggcggggaccaucacguccggcuggaccuucggggccggcgccgcccugcagauccccuucgcgaugcagauggccuaccgguucaacggcaucggggucacccagaacgugcucuacgagaaccagaagcugaucgccaaccaguucaacagcgccaucggcaagauccaggacucccugagcuccaccgccagcgcgcucgggaagcugcaggacguggucaaccagaacgcccaggcccugaacacgcucgugaagcagcuguccagcaacuucggcgccaucuccagcgugcugaacgacauccucucccgccuggacaaggucgaggccgaggugcagaucgaccggcugaucaccgggcgccuccagagccugcagaccuacgugacccagcagcugauccgggcggccgagauccgcgccagcgccaaccucgccgcgaucaagauguccgagugcguccugggccagagcaagcggguggacuucugcggcaagggguaccaccugauguccuucccccagagcgccccgcacggcguggucuuccuccacgugacguacguccccgcccaggagaagaacuucaccaccgcccccgcgaucugccacgacgggaaggcccacuucccccgcgagggcguguucguguccaacgggacccacugguucgucacgcagcggaacuucuacgagccgcagaucaucaccaccgacaacaccuucgugagcggcaacugcgacguggucaucggcaucgugaacaacacgguguacgacccccugcagcccgagcuggacuccuucaaggaggagcucgacaaguacuucaagaaccacaccagccccgacgucgaccugggggacaucuccggcaucaacgccagcguggugaacauccagaaggagaucgaccgccugaacgaggucgccaagaaccucaacgagucccugaucgaccugcaggagcucgggaaguacgagcaguacaucaaguggccgugguacaucuggcugggcuucaucgccggccugaucgcgaucgugauggugaccaucaugcucugcugcaugaccagcugcugcuccugccugaaggggugcugcagcugcggcuccugcugcaaguucgacgaggacgacagcgagcccguccugaagggggugaagcuccacuacacguga

SEQ ID NO: 22986 - RNA, 3822 nt, Artificial Sequence
  SARS-CoV-2/Wuhan/WIV05/2019__EPI_ISL_402128 spike protein CDS gc (1-1273)(S13I_W152C_L452R_D614G)
auguucguguuccugguccuccugccccuggugagcauccagugcgugaaccucaccacccgcacgcagcugccgcccgccuacaccaacagcuucacccggggcgucuacuaccccgacaagguguuccgcuccagcgugcugcacuccacccaggaccucuuccugcccuucuucagcaacgucacgugguuccacgccauccacguguccgggaccaacggcaccaagcgguucgacaacccggugcugcccuucaacgacggggucuacuucgcgagcaccgagaaguccaacaucauccgcggcuggaucuucgggacgacccucgacagcaagacccagucccugcugaucgugaacaacgccaccaacguggucaucaaggugugcgaguuccaguucugcaacgaccccuuccucggcguguacuaccacaagaacaacaagagcugcauggaguccgaguuccgggucuacagcuccgccaacaacugcacguucgaguacgugagccagcccuuccugauggaccuggagggcaagcaggggaacuucaagaaccuccgcgaguucguguucaagaacaucgacggcuacuucaagaucuacuccaagcacaccccgaucaaccugguccgggaccugccccagggguucagcgcccucgagccccugguggaccugcccaucggcaucaacaucacccgcuuccagacccuccuggcccugcaccgguccuaccucacgccgggggacagcagcuccggcuggaccgcgggcgccgccgccuacuacgugggguaccugcagccccgcaccuuccugcucaaguacaacgagaacggcaccaucacggacgcggucgacugcgcccuggacccccugagcgagaccaagugcacccucaaguccuucaccguggagaaggggaucuaccagacgagcaacuuccgggugcagcccaccgaguccaucguccgcuucccgaacaucaccaaccugugccccuucggcgagguguucaacgccacccgguucgccagcgucuacgccuggaaccgcaagcggaucuccaacugcguggcggacuacagcgugcuguacaacuccgccagcuucuccacguucaagugcuacggcgucagccccaccaagcucaacgaccugugcuucaccaacguguacgccgacuccuucgugauccgcggggacgagguccggcagaucgcccccggccagaccgggaagaucgccgacuacaacuacaagcugccggacgacuucacgggcugcgugaucgcguggaacagcaacaaccucgacuccaaggucgggggcaacuacaacuaccgcuaccgccuguuccgcaagagcaaccucaagcccuucgagcgggacaucuccaccgagaucuaccaggccggcagcacccccugcaacgggguggagggcuucaacugcuacuucccccugcaguccuacggguuccagccgaccaacggcgugggguaccagcccuaccggguggucgugcugagcuucgagcuccugcacgcccccgccacggugugcggccccaagaaguccaccaaccuggucaagaacaagugcgugaacuucaacuucaacggccucaccgggaccggcgugcugaccgagagcaacaagaaguuccugccguuccagcaguucgggcgcgacaucgccgacacgaccgacgcgguccgcgacccccagacccuggagauccucgacaucacccccugcagcuucggcgggguguccgugaucacgccgggcaccaacaccagcaaccaggucgccgugcuguaccagggcgugaacugcaccgagguccccguggccauccacgccgaccagcugacgcccaccuggcggguguacuccaccggcagcaacgucuuccagacccgcgccgggugccucaucggcgcggagcacgugaacaacuccuacgagugcgacauccccaucggggccggcaucugcgccagcuaccagacgcagaccaacuccccgcggcgcgcccggagcguggcgucccagagcaucaucgccuacaccaugucccugggcgccgagaacagcgucgccuacuccaacaacagcaucgccauccccaccaacuucacgaucuccgugaccaccgagauccugcccgugagcaugaccaagacgagcgucgacugcaccauguacaucugcggggacuccaccgagugcagcaaccuccugcugcaguacggcuccuucugcacccagcucaaccgcgcgcugacggggaucgccguggagcaggacaagaacacccaggagguguucgcccaggucaagcagaucuacaagacgcccccgaucaaggacuucggcggguucaacuucagccagauccugcccgaccccuccaagcccagcaagcgguccuucaucgaggaccuccuguucaacaaggugacccuggccgacgccggcuucaucaagcaguacggcgacugccucggggacaucgcggcccgcgaccugaucugcgcccagaaguucaacggccugaccgugcucccgccccugcugaccgacgagaugaucgcccaguacaccagcgcccuccuggcggggaccaucacguccggcuggaccuucggggccggcgccgcccugcagauccccuucgcgaugcagauggccuaccgguucaacggcaucggggucacccagaacgugcucuacgagaaccagaagcugaucgccaaccaguucaacagcgccaucggcaagauccaggacucccugagcuccaccgccagcgcgcucgggaagcugcaggacguggucaaccagaacgcccaggcccugaacacgcucgugaagcagcuguccagcaacuucggcgccaucuccagcgugcugaacgacauccucucccgccuggacaaggucgaggccgaggugcagaucgaccggcugaucaccgggcgccuccagagccugcagaccuacgugacccagcagcugauccgggcggccgagauccgcgccagcgccaaccucgccgcgaccaagauguccgagugcguccugggccagagcaagcggguggacuucugcggcaagggguaccaccugauguccuucccccagagcgccccgcacggcguggucuuccuccacgugacguacguccccgcccaggagaagaacuucaccaccgcccccgcgaucugccacgacgggaaggcccacuucccccgcgagggcguguucguguccaacgggacccacugguucgucacgcagcggaacuucuacgagccgcagaucaucaccaccgacaacaccuucgugagcggcaacugcgacguggucaucggcaucgugaacaacacgguguacgacccccugcagcccgagcuggacuccuucaaggaggagcucgacaaguacuucaagaaccacaccagccccgacgucgaccugggggacaucuccggcaucaacgccagcguggugaacauccagaaggagaucgaccgccugaacgaggucgccaagaaccucaacgagucccugaucgaccugcaggagcucgggaaguacgagcaguacaucaaguggccgugguacaucuggcugggcuucaucgccggccugaucgcgaucgugauggugaccaucaugcucugcugcaugaccagcugcugcuccugccugaaggggugcugcagcugcggcuccugcugcaaguucgacgaggacgacagcgagcccguccugaagggggugaagcuccacuacacguga

SEQ ID NO: 22987 - RNA, 3822 nt, Artificial Sequence; identical to SEQ ID NO: 136
  SARS-CoV-2/Wuhan/WIV05/2019__EPI_ISL_402128 spike protein CDS gc (1-1273)

SEQ ID NO: 22988 - RNA, 3822 nt, Artificial Sequence; identical to SEQ ID NO: 11739
  SARS-CoV-2/Wuhan/WIV05/2019__EPI_ISL_402128 spike protein CDS gc (1-1273)(D614G)

SEQ ID NO: 22989 - RNA, 3822 nt, Artificial Sequence
  SARS-CoV-2/Wuhan/WIV05/2019__EPI_ISL_402128 spike protein CDS gc (1-1273)(A222V_D614G)
auguucguguuccugguccuccugccccuggugagcucccagugcgugaaccucaccacccgcacgcagcugccgcccgccuacaccaacagcuucacccggggcgucuacuaccccgacaagguguuccgcuccagcgugcugcacuccacccaggaccucuuccugcccuucuucagcaacgucacgugguuccacgccauccacguguccgggaccaacggcaccaagcgguucgacaacccggugcugcccuucaacgacggggucuacuucgcgagcaccgagaaguccaacaucauccgcggcuggaucuucgggacgacccucgacagcaagacccagucccugcugaucgugaacaacgccaccaacguggucaucaaggugugcgaguuccaguucugcaacgaccccuuccucggcguguacuaccacaagaacaacaagagcuggauggaguccgaguuccgggucuacagcuccgccaacaacugcacguucgaguacgugagccagcccuuccugauggaccuggagggcaagcaggggaacuucaagaaccuccgcgaguucguguucaagaacaucgacggcuacuucaagaucuacuccaagcacaccccgaucaaccugguccgggaccugccccagggguucagcgugcucgagccccugguggaccugcccaucggcaucaacaucacccgcuuccagacccuccuggcccugcaccgguccuaccucacgccgggggacagcagcuccggcuggaccgccggcgcggccgccuacuacgucggguaccugcagccccgcaccuuccugcucaaguacaacgagaacggcaccaucacggacgccguggacugcgcgcuggacccccugagcgagaccaagugcacccucaaguccuucaccguggagaaggggaucuaccagacgagcaacuuccggguccagcccaccgaguccaucgugcgcuucccgaacaucaccaaccugugccccuucggcgaggucuucaacgccacccgguucgccagcguguacgccuggaaccgcaagcggaucuccaacugcguggccgacuacagcguccuguacaacuccgcgagcuucuccacguucaagugcuacggcgugagccccaccaagcucaacgaccugugcuucaccaacguguacgccgacuccuucgucauccgcggggacgaggugcggcagaucgcccccggccagaccgggaagaucgccgacuacaacuacaagcugccggacgacuucacgggcugcgugaucgccuggaacagcaacaaccucgacuccaaggucgggggcaacuacaacuaccuguaccgccuguuccgcaagagcaaccucaagcccuucgagcgggacaucuccaccgagaucuaccaggcgggcagcacccccugcaacgggguggagggcuucaacugcuacuucccccugcaguccuacggguuccagccgaccaacggcgugggguaccagcccuaccgggucguggugcugagcuucgagcuccugcacgcccccgccacggucugcggccccaagaaguccaccaaccuggugaagaacaagugcgugaacuucaacuucaacggccucaccgggaccggcguccugaccgagagcaacaagaaguuccugccguuccagcaguucgggcgcgacaucgccgacacgaccgacgccgugcgcgacccccagacccuggagauccucgacaucacccccugcagcuucggcgggguguccgucaucacgccgggcaccaacaccagcaaccagguggcggugcuguaccagggcgucaacugcaccgaggugcccguggccauccacgccgaccagcugacgcccaccuggcgggucuacuccaccgggagcaacguguuccagacccgcgccggcugccucaucggggccgagcacgugaacaacuccuacgagugcgacauccccaucggcgcgggcaucugcgccagcuaccagacgcagaccaacuccccgcggcgcgcccggagcgucgccucccagagcaucaucgcguacaccaugucccugggggccgagaacagcguggccuacuccaacaacagcaucgccauccccaccaacuucacgaucuccgugaccaccgagauccugcccgucagcaugaccaagacgagcguggacugcaccauguacaucugcggcgacuccaccgagugcagcaaccuccugcugcaguacggguccuucugcacccagcucaaccgcgcccugacgggcaucgcgguggagcaggacaagaacacccaggaggucuucgcccaggugaagcagaucuacaagacgcccccgaucaaggacuucgggggcuucaacuucagccagauccugcccgaccccuccaagcccagcaagcgguccuucaucgaggaccuccuguucaacaaggugacccuggccgacgccggcuucaucaagcaguacggggacugccucggcgacaucgccgcgcgcgaccugaucugcgcccagaaguucaacgggcugaccguccucccgccccugcugaccgacgagaugaucgcccaguacaccagcgcccuccuggccggcaccaucacguccggguggaccuucggcgcgggcgccgcccugcagauccccuucgccaugcagauggcguaccgguucaacgggaucggcgugacccagaacgugcucuacgagaaccagaagcugaucgccaaccaguucaacagcgccaucgggaagauccaggacucccugagcuccaccgccagcgcccucggcaagcugcaggacgucgugaaccagaacgcgcaggcccugaacacgcucgugaagcagcuguccagcaacuucggggccaucuccagcguccugaacgacauccucucccgccuggacaagguggaggccgaggugcagaucgaccggcugaucaccggccgccuccagagccugcagaccuacgucacccagcagcugauccgggccgcggagauccgcgccagcgccaaccucgccgccaccaagauguccgagugcgugcugggccagagcaagcggguggacuucugcgggaagggcuaccaccugauguccuucccccagagcgcgccgcacggggucguguuccuccacgucacguacgugcccgcccaggagaagaacuucaccaccgcccccgccaucugccacgacggcaaggcgcacuucccccgcgaggggguguucgucuccaacggcacccacugguucgugacgcagcggaacuucuacgagccgcagaucaucaccaccgacaacaccuucgugagcggcaacugcgacgucgugaucgggaucgugaacaacacggucuacgacccccugcagcccgagcuggacuccuucaaggaggagcucgacaaguacuucaagaaccacaccagccccgacguggaccugggcgacaucuccgggaucaacgccagcguggucaacauccagaaggagaucgaccgccugaacgagguggccaagaaccucaacgagucccugaucgaccugcaggagcucggcaaguacgagcaguacaucaaguggccgugguacaucuggcugggcuucaucgccgggcugaucgccaucgugauggucaccaucaugcucugcugcaugaccagcugcugcuccugccugaagggcugcugcagcugcggguccugcugcaaguucgacgaggacgacagcgagcccgugcugaagggcgugaagcuccacuacacguga

SEQ ID NO: 22990 - RNA, 3822 nt, Artificial Sequence
  SARS-CoV-2/Wuhan/WIV05/2019__EPI_ISL_402128 spike protein CDS gc (1-1273)(N439K_D614G)
auguucguguuccugguccuccugccccuggugagcucccagugcgugaaccucaccacccgcacgcagcugccgcccgccuacaccaacagcuucacccggggcgucuacuaccccgacaagguguuccgcuccagcgugcugcacuccacccaggaccucuuccugcccuucuucagcaacgucacgugguuccacgccauccacguguccgggaccaacggcaccaagcgguucgacaacccggugcugcccuucaacgacggggucuacuucgcgagcaccgagaaguccaacaucauccgcggcuggaucuucgggacgacccucgacagcaagacccagucccugcugaucgugaacaacgccaccaacguggucaucaaggugugcgaguuccaguucugcaacgaccccuuccucggcguguacuaccacaagaacaacaagagcuggauggaguccgaguuccgggucuacagcuccgccaacaacugcacguucgaguacgugagccagcccuuccugauggaccuggagggcaagcaggggaacuucaagaaccuccgcgaguucguguucaagaacaucgacggcuacuucaagaucuacuccaagcacaccccgaucaaccugguccgggaccugccccagggguucagcgcccucgagccccugguggaccugcccaucggcaucaacaucacccgcuuccagacccuccuggcccugcaccgguccuaccucacgccgggggacagcagcuccggcuggaccgcgggcgccgccgccuacuacgugggguaccugcagccccgcaccuuccugcucaaguacaacgagaacggcaccaucacggacgcggucgacugcgcccuggacccccugagcgagaccaagugcacccucaaguccuucaccguggagaaggggaucuaccagacgagcaacuuccgggugcagcccaccgaguccaucguccgcuucccgaacaucaccaaccugugccccuucggcgagguguucaacgccacccgguucgccagcgucuacgccuggaaccgcaagcggaucuccaacugcguggcggacuacagcgugcuguacaacuccgccagcuucuccacguucaagugcuacggcgucagccccaccaagcucaacgaccugugcuucaccaacguguacgccgacuccuucgugauccgcggggacgagguccggcagaucgcccccggccagaccgggaagaucgccgacuacaacuacaagcugccggacgacuucacgggcugcgugaucgcguggaacagcaagaaccucgacuccaaggucgggggcaacuacaacuaccuguaccgccuguuccgcaagagcaaccucaagcccuucgagcgggacaucuccaccgagaucuaccaggccggcagcacccccugcaacgggguggagggcuucaacugcuacuucccccugcaguccuacggguuccagccgaccaacggcgugggguaccagcccuaccggguggucgugcugagcuucgagcuccugcacgcccccgccacggugugcggccccaagaaguccaccaaccuggucaagaacaagugcgugaacuucaacuucaacggccucaccgggaccggcgugcugaccgagagcaacaagaaguuccugccguuccagcaguucgggcgcgacaucgccgacacgaccgacgcgguccgcgacccccagacccuggagauccucgacaucacccccugcagcuucggcgggguguccgugaucacgccgggcaccaacaccagcaaccaggucgccgugcuguaccagggcgugaacugcaccgagguccccguggccauccacgccgaccagcugacgcccaccuggcggguguacuccaccgggagcaacgucuuccagacccgcgccggcugccucaucggggcggagcacgugaacaacuccuacgagugcgacauccccaucggcgccggcaucugcgccagcuaccagacgcagaccaacuccccgcggcgcgcccggagcguggcgucccagagcaucaucgccuacaccaugucccugggggccgagaacagcgucgccuacuccaacaacagcaucgccauccccaccaacuucacgaucuccgugaccaccgagauccugcccgugagcaugaccaagacgagcgucgacugcaccauguacaucugcggcgacuccaccgagugcagcaaccuccugcugcaguacggguccuucugcacccagcucaaccgcgcgcugacgggcaucgccguggagcaggacaagaacacccaggagguguucgcccaggucaagcagaucuacaagacgcccccgaucaaggacuucgggggcuucaacuucagccagauccugcccgaccccuccaagcccagcaagcgguccuucaucgaggaccuccuguucaacaaggugacccuggccgacgccggcuucaucaagcaguacggggacugccucggcgacaucgcggcccgcgaccugaucugcgcccagaaguucaacgggcugaccgugcucccgccccugcugaccgacgagaugaucgcccaguacaccagcgcccuccuggcgggcaccaucacguccggguggaccuucggcgccggcgccgcccugcagauccccuucgcgaugcagauggccuaccgguucaacgggaucggcgucacccagaacgugcucuacgagaaccagaagcugaucgccaaccaguucaacagcgccaucgggaagauccaggacucccugagcuccaccgccagcgcgcucggcaagcugcaggacguggucaaccagaacgcccaggcccugaacacgcucgugaagcagcuguccagcaacuucggggccaucuccagcgugcugaacgacauccucucccgccuggacaaggucgaggccgaggugcagaucgaccggcugaucaccggccgccuccagagccugcagaccuacgugacccagcagcugauccgggcggccgagauccgcgccagcgccaaccucgccgcgaccaagauguccgagugcguccugggccagagcaagcggguggacuucugcgggaagggcuaccaccugauguccuucccccagagcgccccgcacgggguggucuuccuccacgugacguacguccccgcccaggagaagaacuucaccaccgcccccgcgaucugccacgacggcaaggcccacuucccccgcgaggggguguucguguccaacggcacccacugguucgucacgcagcggaacuucuacgagccgcagaucaucaccaccgacaacaccuucgugagcggcaacugcgacguggucaucgggaucgugaacaacacgguguacgacccccugcagcccgagcuggacuccuucaaggaggagcucgacaaguacuucaagaaccacaccagccccgacgucgaccugggcgacaucuccgggaucaacgccagcguggugaacauccagaaggagaucgaccgccugaacgaggucgccaagaaccucaacgagucccugaucgaccugcaggagcucggcaaguacgagcaguacaucaaguggccgugguacaucuggcugggcuucaucgccgggcugaucgcgaucgugauggugaccaucaugcucugcugcaugaccagcugcugcuccugccugaagggcugcugcagcugcggguccugcugcaaguucgacgaggacgacagcgagcccguccugaagggcgugaagcuccacuacacguga

SEQ ID NO: 22991 - RNA, 3822 nt, Artificial Sequence
  SARS-CoV-2/Wuhan/WIV05/2019__EPI_ISL_402128 spike protein CDS gc (1-1273)(S477N_D614G)
auguucguguuccugguccuccugccccuggugagcucccagugcgugaaccucaccacccgcacgcagcugccgcccgccuacaccaacagcuucacccggggcgucuacuaccccgacaagguguuccgcuccagcgugcugcacuccacccaggaccucuuccugcccuucuucagcaacgucacgugguuccacgccauccacguguccgggaccaacggcaccaagcgguucgacaacccggugcugcccuucaacgacggggucuacuucgcgagcaccgagaaguccaacaucauccgcggcuggaucuucgggacgacccucgacagcaagacccagucccugcugaucgugaacaacgccaccaacguggucaucaaggugugcgaguuccaguucugcaacgaccccuuccucggcguguacuaccacaagaacaacaagagcuggauggaguccgaguuccgggucuacagcuccgccaacaacugcacguucgaguacgugagccagcccuuccugauggaccuggagggcaagcaggggaacuucaagaaccuccgcgaguucguguucaagaacaucgacggcuacuucaagaucuacuccaagcacaccccgaucaaccugguccgggaccugccccagggguucagcgcccucgagccccugguggaccugcccaucggcaucaacaucacccgcuuccagacccuccuggcccugcaccgguccuaccucacgccgggggacagcagcuccggcuggaccgcgggcgccgccgccuacuacgugggguaccugcagccccgcaccuuccugcucaaguacaacgagaacggcaccaucacggacgcggucgacugcgcccuggacccccugagcgagaccaagugcacccucaaguccuucaccguggagaaggggaucuaccagacgagcaacuuccgggugcagcccaccgaguccaucguccgcuucccgaacaucaccaaccugugccccuucggcgagguguucaacgccacccgguucgccagcgucuacgccuggaaccgcaagcggaucuccaacugcguggcggacuacagcgugcuguacaacuccgccagcuucuccacguucaagugcuacggcgucagccccaccaagcucaacgaccugugcuucaccaacguguacgccgacuccuucgugauccgcggggacgagguccggcagaucgcccccggccagaccgggaagaucgccgacuacaacuacaagcugccggacgacuucacgggcugcgugaucgcguggaacagcaacaaccucgacuccaaggucgggggcaacuacaacuaccuguaccgccuguuccgcaagagcaaccucaagcccuucgagcgggacaucuccaccgagaucuaccaggccggcaacacccccugcaacgggguggagggcuucaacugcuacuucccccugcagagcuacggguuccagccgaccaacggcgugggguaccagcccuaccggguggucgugcuguccuucgagcuccugcacgcccccgccacggugugcggccccaagaaguccaccaaccuggucaagaacaagugcgugaacuucaacuucaacggccucaccgggaccggcgugcugaccgagagcaacaagaaguuccugccguuccagcaguucgggcgcgacaucgccgacacgaccgacgcgguccgcgacccccagacccuggagauccucgacaucacccccugcagcuucggcggggugagcgugaucacgccgggcaccaacaccuccaaccaggucgccgugcuguaccagggcgugaacugcaccgagguccccguggccauccacgccgaccagcugacgcccaccuggcggguguacagcaccggguccaacgucuuccagacccgcgccggcugccucaucggggcggagcacgugaacaacagcuacgagugcgacauccccaucggcgccggcaucugcgccuccuaccagacgcagaccaacagcccgcggcgcgcccgguccguggcgagccaguccaucaucgccuacaccaugagccugggggccgagaacuccgucgccuacagcaacaacuccaucgccauccccaccaacuucacgaucagcgugaccaccgagauccugcccguguccaugaccaagacgagcgucgacugcaccauguacaucugcggcgacagcaccgagugcuccaaccuccugcugcaguacgggagcuucugcacccagcucaaccgcgcgcugacgggcaucgccguggagcaggacaagaacacccaggagguguucgcccaggucaagcagaucuacaagacgcccccgaucaaggacuucgggggcuucaacuucucccagauccugcccgaccccagcaagcccuccaagcggagcuucaucgaggaccuccuguucaacaaggugacccuggccgacgccggcuucaucaagcaguacggggacugccucggcgacaucgcggcccgcgaccugaucugcgcccagaaguucaacgggcugaccgugcucccgccccugcugaccgacgagaugaucgcccaguacaccuccgcccuccuggcgggcaccaucacgagcggguggaccuucggcgccggcgccgcccugcagauccccuucgcgaugcagauggccuaccgguucaacgggaucggcgucacccagaacgugcucuacgagaaccagaagcugaucgccaaccaguucaacuccgccaucgggaagauccaggacagccuguccagcaccgccuccgcgcucggcaagcugcaggacguggucaaccagaacgcccaggcccugaacacgcucgugaagcagcugagcuccaacuucggggccaucagcuccgugcugaacgacauccucagccgccuggacaaggucgaggccgaggugcagaucgaccggcugaucaccggccgccuccagucccugcagaccuacgugacccagcagcugauccgggcggccgagauccgcgccagcgccaaccucgccgcgaccaagaugagcgagugcguccugggccaguccaagcggguggacuucugcgggaagggcuaccaccugaugagcuucccccaguccgccccgcacgggguggucuuccuccacgugacguacguccccgcccaggagaagaacuucaccaccgcccccgcgaucugccacgacggcaaggcccacuucccccgcgaggggguguucgugagcaacggcacccacugguucgucacgcagcggaacuucuacgagccgcagaucaucaccaccgacaacaccuucguguccggcaacugcgacguggucaucgggaucgugaacaacacgguguacgacccccugcagcccgagcuggacagcuucaaggaggagcucgacaaguacuucaagaaccacaccucccccgacgucgaccugggcgacaucagcgggaucaacgccuccguggugaacauccagaaggagaucgaccgccugaacgaggucgccaagaaccucaacgagagccugaucgaccugcaggagcucggcaaguacgagcaguacaucaaguggccgugguacaucuggcugggcuucaucgccgggcugaucgcgaucgugauggugaccaucaugcucugcugcaugaccuccugcugcagcugccugaagggcugcugcuccugcgggagcugcugcaaguucgacgaggacgacuccgagcccguccugaagggcgugaagcuccacuacacguga

SEQ ID NO: 22992 - RNA, 3822 nt, Artificial Sequence
  SARS-CoV-2/Wuhan/WIV05/2019__EPI_ISL_402128 spike protein CDS gc (1-1273)(N501Y_D614G)
auguucguguuccugguccuccugccccuggugagcucccagugcgugaaccucaccacccgcacgcagcugccgcccgccuacaccaacagcuucacccggggcgucuacuaccccgacaagguguuccgcuccagcgugcugcacuccacccaggaccucuuccugcccuucuucagcaacgucacgugguuccacgccauccacguguccgggaccaacggcaccaagcgguucgacaacccggugcugcccuucaacgacggggucuacuucgcgagcaccgagaaguccaacaucauccgcggcuggaucuucgggacgacccucgacagcaagacccagucccugcugaucgugaacaacgccaccaacguggucaucaaggugugcgaguuccaguucugcaacgaccccuuccucggcguguacuaccacaagaacaacaagagcuggauggaguccgaguuccgggucuacagcuccgccaacaacugcacguucgaguacgugagccagcccuuccugauggaccuggagggcaagcaggggaacuucaagaaccuccgcgaguucguguucaagaacaucgacggcuacuucaagaucuacuccaagcacaccccgaucaaccugguccgggaccugccccagggguucagcgcccucgagccccugguggaccugcccaucggcaucaacaucacccgcuuccagacccuccuggcccugcaccgguccuaccucacgccgggggacagcagcuccggcuggaccgcgggcgccgccgccuacuacgugggguaccugcagccccgcaccuuccugcucaaguacaacgagaacggcaccaucacggacgcggucgacugcgcccuggacccccugagcgagaccaagugcacccucaaguccuucaccguggagaaggggaucuaccagacgagcaacuuccgggugcagcccaccgaguccaucguccgcuucccgaacaucaccaaccugugccccuucggcgagguguucaacgccacccgguucgccagcgucuacgccuggaaccgcaagcggaucuccaacugcguggcggacuacagcgugcuguacaacuccgccagcuucuccacguucaagugcuacggcgucagccccaccaagcucaacgaccugugcuucaccaacguguacgccgacuccuucgugauccgcggggacgagguccggcagaucgcccccggccagaccgggaagaucgccgacuacaacuacaagcugccggacgacuucacgggcugcgugaucgcguggaacagcaacaaccucgacuccaaggucgggggcaacuacaacuaccuguaccgccuguuccgcaagagcaaccucaagcccuucgagcgggacaucuccaccgagaucuaccaggccggcagcacccccugcaacgggguggagggcuucaacugcuacuucccccugcaguccuacggguuccagccgaccuacggcgugggguaccagcccuaccggguggucgugcugagcuucgagcuccugcacgcccccgccacggugugcggccccaagaaguccaccaaccuggucaagaacaagugcgugaacuucaacuucaacggccucaccgggaccggcgugcugaccgagagcaacaagaaguuccugccguuccagcaguucgggcgcgacaucgccgacacgaccgacgcgguccgcgacccccagacccuggagauccucgacaucacccccugcagcuucggcgggguguccgugaucacgccgggcaccaacaccagcaaccaggucgccgugcuguaccagggcgugaacugcaccgagguccccguggccauccacgccgaccagcugacgcccaccuggcggguguacuccaccgggagcaacgucuuccagacccgcgccggcugccucaucggggcggagcacgugaacaacuccuacgagugcgacauccccaucggcgccggcaucugcgccagcuaccagacgcagaccaacuccccgcggcgcgcccggagcguggcgucccagagcaucaucgccuacaccaugucccugggggccgagaacagcgucgccuacuccaacaacagcaucgccauccccaccaacuucacgaucuccgugaccaccgagauccugcccgugagcaugaccaagacgagcgucgacugcaccauguacaucugcggcgacuccaccgagugcagcaaccuccugcugcaguacggguccuucugcacccagcucaaccgcgcgcugacgggcaucgccguggagcaggacaagaacacccaggagguguucgcccaggucaagcagaucuacaagacgcccccgaucaaggacuucgggggcuucaacuucagccagauccugcccgaccccuccaagcccagcaagcgguccuucaucgaggaccuccuguucaacaaggugacccuggccgacgccggcuucaucaagcaguacggggacugccucggcgacaucgcggcccgcgaccugaucugcgcccagaaguucaacgggcugaccgugcucccgccccugcugaccgacgagaugaucgcccaguacaccagcgcccuccuggcgggcaccaucacguccggguggaccuucggcgccggcgccgcccugcagauccccuucgcgaugcagauggccuaccgguucaacgggaucggcgucacccagaacgugcucuacgagaaccagaagcugaucgccaaccaguucaacagcgccaucgggaagauccaggacucccugagcuccaccgccagcgcgcucggcaagcugcaggacguggucaaccagaacgcccaggcccugaacacgcucgugaagcagcuguccagcaacuucggggccaucuccagcgugcugaacgacauccucucccgccuggacaaggucgaggccgaggugcagaucgaccggcugaucaccggccgccuccagagccugcagaccuacgugacccagcagcugauccgggcggccgagauccgcgccagcgccaaccucgccgcgaccaagauguccgagugcguccugggccagagcaagcggguggacuucugcgggaagggcuaccaccugauguccuucccccagagcgccccgcacgggguggucuuccuccacgugacguacguccccgcccaggagaagaacuucaccaccgcccccgcgaucugccacgacggcaaggcccacuucccccgcgaggggguguucguguccaacggcacccacugguucgucacgcagcggaacuucuacgagccgcagaucaucaccaccgacaacaccuucgugagcggcaacugcgacguggucaucgggaucgugaacaacacgguguacgacccccugcagcccgagcuggacuccuucaaggaggagcucgacaaguacuucaagaaccacaccagccccgacgucgaccugggcgacaucuccgggaucaacgccagcguggugaacauccagaaggagaucgaccgccugaacgaggucgccaagaaccucaacgagucccugaucgaccugcaggagcucggcaaguacgagcaguacaucaaguggccgugguacaucuggcugggcuucaucgccgggcugaucgcgaucgugauggugaccaucaugcucugcugcaugaccagcugcugcuccugccugaagggcugcugcagcugcggguccugcugcaaguucgacgaggacgacagcgagcccguccugaagggcgugaagcuccacuacacguga

SEQ ID NO: 22993 - RNA, 3816 nt, Artificial Sequence
  SARS-CoV-2/Wuhan/WIV05/2019__EPI_ISL_402128 spike protein CDS gc (1-1273)(H69del_V70del_D614G)
auguucguguuccugguccuccugccccuggugagcucccagugcgugaaccucaccacccgcacgcagcugccgcccgccuacaccaacagcuucacccggggcgucuacuaccccgacaagguguuccgcuccagcgugcugcacuccacccaggaccucuuccugcccuucuucagcaacgucacgugguuccacgccaucuccgggaccaacggcaccaagcgguucgacaacccggugcugcccuucaacgacgggguguacuucgcgagcaccgagaaguccaacaucauccgcggcuggaucuucgggacgacccucgacagcaagacccagucccugcugaucgucaacaacgccaccaacguggugaucaaggucugcgaguuccaguucugcaacgaccccuuccucggcguguacuaccacaagaacaacaagagcuggauggaguccgaguuccggguguacagcuccgccaacaacugcacguucgaguacgucagccagcccuuccugauggaccuggagggcaagcaggggaacuucaagaaccuccgcgaguucguguucaagaacaucgacggcuacuucaagaucuacuccaagcacaccccgaucaaccuggugcgggaccugccccagggguucagcgcccucgagccccuggucgaccugcccaucggcaucaacaucacccgcuuccagacccuccuggcccugcaccgguccuaccucacgccgggggacagcagcuccggcuggaccgcgggcgccgccgccuacuacgugggguaccugcagccccgcaccuuccugcucaaguacaacgagaacggcaccaucacggacgcgguggacugcgcccuggacccccugagcgagaccaagugcacccucaaguccuucaccgucgagaaggggaucuaccagacgagcaacuuccgggugcagcccaccgaguccaucgugcgcuucccgaacaucaccaaccugugccccuucggcgaggucuucaacgccacccgguucgccagcguguacgccuggaaccgcaagcggaucuccaacugcgucgcggacuacagcgugcuguacaacuccgccagcuucuccacguucaagugcuacggcgugagccccaccaagcucaacgaccugugcuucaccaacgucuacgccgacuccuucgugauccgcggggacgaggugcggcagaucgcccccggccagaccgggaagaucgccgacuacaacuacaagcugccggacgacuucacgggcugcgucaucgcguggaacagcaacaaccucgacuccaaggucgggggcaacuacaacuaccuguaccgccuguuccgcaagagcaaccucaagcccuucgagcgggacaucuccaccgagaucuaccaggccggcagcacccccugcaacgggguggagggcuucaacugcuacuucccccugcaguccuacggguuccagccgaccaacggcgugggguaccagcccuaccggguggugguccugagcuucgagcuccugcacgcccccgccacggugugcggccccaagaaguccaccaaccuggugaagaacaagugcgucaacuucaacuucaacggccucaccgggaccggcgugcugaccgagagcaacaagaaguuccugccguuccagcaguucgggcgcgacaucgccgacacgaccgacgcggugcgcgacccccagacccuggagauccucgacaucacccccugcagcuucggcggggucuccgugaucacgccgggcaccaacaccagcaaccagguggccguccuguaccagggcgugaacugcaccgaggugcccgucgccauccacgccgaccagcugacgcccaccuggcggguguacuccaccgggagcaacguguuccagacccgcgccggcugccucaucggggcggagcacgucaacaacuccuacgagugcgacauccccaucggcgccggcaucugcgccagcuaccagacgcagaccaacuccccgcggcgcgcccggagcguggcgucccagagcaucaucgccuacaccaugucccugggggccgagaacagcguggccuacuccaacaacagcaucgccauccccaccaacuucacgaucuccgucaccaccgagauccugcccgugagcaugaccaagacgagcguggacugcaccauguacaucugcggcgacuccaccgagugcagcaaccuccugcugcaguacggguccuucugcacccagcucaaccgcgcgcugacgggcaucgccgucgagcaggacaagaacacccaggagguguucgcccaggugaagcagaucuacaagacgcccccgaucaaggacuucgggggcuucaacuucagccagauccugcccgaccccuccaagcccagcaagcgguccuucaucgaggaccuccuguucaacaaggucacccuggccgacgccggcuucaucaagcaguacggggacugccucggcgacaucgcggcccgcgaccugaucugcgcccagaaguucaacgggcugaccgugcucccgccccugcugaccgacgagaugaucgcccaguacaccagcgcccuccuggcgggcaccaucacguccggguggaccuucggcgccggcgccgcccugcagauccccuucgcgaugcagauggccuaccgguucaacgggaucggcgugacccagaacguccucuacgagaaccagaagcugaucgccaaccaguucaacagcgccaucgggaagauccaggacucccugagcuccaccgccagcgcgcucggcaagcugcaggacguggugaaccagaacgcccaggcccugaacacgcucgucaagcagcuguccagcaacuucggggccaucuccagcgugcugaacgacauccucucccgccuggacaagguggaggccgagguccagaucgaccggcugaucaccggccgccuccagagccugcagaccuacgugacccagcagcugauccgggcggccgagauccgcgccagcgccaaccucgccgcgaccaagauguccgagugcgugcugggccagagcaagcgggucgacuucugcgggaagggcuaccaccugauguccuucccccagagcgccccgcacggggugguguuccuccacgucacguacgugcccgcccaggagaagaacuucaccaccgcccccgcgaucugccacgacggcaaggcccacuucccccgcgagggggucuucguguccaacggcacccacugguucgugacgcagcggaacuucuacgagccgcagaucaucaccaccgacaacaccuucgucagcggcaacugcgacguggugaucgggaucgucaacaacacgguguacgacccccugcagcccgagcuggacuccuucaaggaggagcucgacaaguacuucaagaaccacaccagccccgacguggaccugggcgacaucuccgggaucaacgccagcgucgugaacauccagaaggagaucgaccgccugaacgagguggccaagaaccucaacgagucccugaucgaccugcaggagcucggcaaguacgagcaguacaucaaguggccgugguacaucuggcugggcuucaucgccgggcugaucgcgaucgucauggugaccaucaugcucugcugcaugaccagcugcugcuccugccugaagggcugcugcagcugcggguccugcugcaaguucgacgaggacgacagcgagcccgugcugaagggcgucaagcuccacuacacguga

SEQ ID NO: 22994 - RNA, 3822 nt, Artificial Sequence
  SARS-CoV-2/Wuhan/WIV05/2019__EPI_ISL_402128 spike protein CDS gc (1-1273)(Y453F_D614G)
auguucguguuccugguccuccugccccuggugagcucccagugcgugaaccucaccacccgcacgcagcugccgcccgccuacaccaacagcuucacccggggcgucuacuaccccgacaagguguuccgcuccagcgugcugcacuccacccaggaccucuuccugcccuucuucagcaacgucacgugguuccacgccauccacguguccgggaccaacggcaccaagcgguucgacaacccggugcugcccuucaacgacggggucuacuucgcgagcaccgagaaguccaacaucauccgcggcuggaucuucgggacgacccucgacagcaagacccagucccugcugaucgugaacaacgccaccaacguggucaucaaggugugcgaguuccaguucugcaacgaccccuuccucggcguguacuaccacaagaacaacaagagcuggauggaguccgaguuccgggucuacagcuccgccaacaacugcacguucgaguacgugagccagcccuuccugauggaccuggagggcaagcaggggaacuucaagaaccuccgcgaguucguguucaagaacaucgacggcuacuucaagaucuacuccaagcacaccccgaucaaccugguccgggaccugccccagggguucagcgcccucgagccccugguggaccugcccaucggcaucaacaucacccgcuuccagacccuccuggcccugcaccgguccuaccucacgccgggggacagcagcuccggcuggaccgcgggcgccgccgccuacuacgugggguaccugcagccccgcaccuuccugcucaaguacaacgagaacggcaccaucacggacgcggucgacugcgcccuggacccccugagcgagaccaagugcacccucaaguccuucaccguggagaaggggaucuaccagacgagcaacuuccgggugcagcccaccgaguccaucguccgcuucccgaacaucaccaaccugugccccuucggcgagguguucaacgccacccgguucgccagcgucuacgccuggaaccgcaagcggaucuccaacugcguggcggacuacagcgugcuguacaacuccgccagcuucuccacguucaagugcuacggcgucagccccaccaagcucaacgaccugugcuucaccaacguguacgccgacuccuucgugauccgcggggacgagguccggcagaucgcccccggccagaccgggaagaucgccgacuacaacuacaagcugccggacgacuucacgggcugcgugaucgcguggaacagcaacaaccucgacuccaaggucgggggcaacuacaacuaccuguuccgccuguuccgcaagagcaaccucaagcccuucgagcgggacaucuccaccgagaucuaccaggccggcagcacccccugcaacgggguggagggcuucaacugcuacuucccccugcaguccuacggguuccagccgaccaacggcgugggguaccagcccuaccggguggucgugcugagcuucgagcuccugcacgcccccgccacggugugcggccccaagaaguccaccaaccuggucaagaacaagugcgugaacuucaacuucaacggccucaccgggaccggcgugcugaccgagagcaacaagaaguuccugccguuccagcaguucgggcgcgacaucgccgacacgaccgacgcgguccgcgacccccagacccuggagauccucgacaucacccccugcagcuucggcgggguguccgugaucacgccgggcaccaacaccagcaaccaggucgccgugcuguaccagggcgugaacugcaccgagguccccguggccauccacgccgaccagcugacgcccaccuggcggguguacuccaccgggagcaacgucuuccagacccgcgccggcugccucaucggggcggagcacgugaacaacuccuacgagugcgacauccccaucggcgccggcaucugcgccagcuaccagacgcagaccaacuccccgcggcgcgcccggagcguggcgucccagagcaucaucgccuacaccaugucccugggggccgagaacagcgucgccuacuccaacaacagcaucgccauccccaccaacuucacgaucuccgugaccaccgagauccugcccgugagcaugaccaagacgagcgucgacugcaccauguacaucugcggcgacuccaccgagugcagcaaccuccugcugcaguacggguccuucugcacccagcucaaccgcgcgcugacgggcaucgccguggagcaggacaagaacacccaggagguguucgcccaggucaagcagaucuacaagacgcccccgaucaaggacuucgggggcuucaacuucagccagauccugcccgaccccuccaagcccagcaagcgguccuucaucgaggaccuccuguucaacaaggugacccuggccgacgccggcuucaucaagcaguacggggacugccucggcgacaucgcggcccgcgaccugaucugcgcccagaaguucaacgggcugaccgugcucccgccccugcugaccgacgagaugaucgcccaguacaccagcgcccuccuggcgggcaccaucacguccggguggaccuucggcgccggcgccgcccugcagauccccuucgcgaugcagauggccuaccgguucaacgggaucggcgucacccagaacgugcucuacgagaaccagaagcugaucgccaaccaguucaacagcgccaucgggaagauccaggacucccugagcuccaccgccagcgcgcucggcaagcugcaggacguggucaaccagaacgcccaggcccugaacacgcucgugaagcagcuguccagcaacuucggggccaucuccagcgugcugaacgacauccucucccgccuggacaaggucgaggccgaggugcagaucgaccggcugaucaccggccgccuccagagccugcagaccuacgugacccagcagcugauccgggcggccgagauccgcgccagcgccaaccucgccgcgaccaagauguccgagugcguccugggccagagcaagcggguggacuucugcgggaagggcuaccaccugauguccuucccccagagcgccccgcacgggguggucuuccuccacgugacguacguccccgcccaggagaagaacuucaccaccgcccccgcgaucugccacgacggcaaggcccacuucccccgcgaggggguguucguguccaacggcacccacugguucgucacgcagcggaacuucuacgagccgcagaucaucaccaccgacaacaccuucgugagcggcaacugcgacguggucaucgggaucgugaacaacacgguguacgacccccugcagcccgagcuggacuccuucaaggaggagcucgacaaguacuucaagaaccacaccagccccgacgucgaccugggcgacaucuccgggaucaacgccagcguggugaacauccagaaggagaucgaccgccugaacgaggucgccaagaaccucaacgagucccugaucgaccugcaggagcucggcaaguacgagcaguacaucaaguggccgugguacaucuggcugggcuucaucgccgggcugaucgcgaucgugauggugaccaucaugcucugcugcaugaccagcugcugcuccugccugaagggcugcugcagcugcggguccugcugcaaguucgacgaggacgacagcgagcccguccugaagggcgugaagcuccacuacacguga

SEQ ID NO: 22995 - RNA, 3822 nt, Artificial Sequence
  SARS-CoV-2/Wuhan/WIV05/2019__EPI_ISL_402128 spike protein CDS gc (1-1273)(D614G_I692V)
auguucguguuccugguccuccugccccuggugagcucccagugcgugaaccucaccacccgcacgcagcugccgcccgccuacaccaacagcuucacccggggcgucuacuaccccgacaagguguuccgcuccagcgugcugcacuccacccaggaccucuuccugcccuucuucagcaacgucacgugguuccacgccauccacguguccgggaccaacggcaccaagcgguucgacaacccggugcugcccuucaacgacggggucuacuucgcgagcaccgagaaguccaacaucauccgcggcuggaucuucgggacgacccucgacagcaagacccagucccugcugaucgugaacaacgccaccaacguggucaucaaggugugcgaguuccaguucugcaacgaccccuuccucggcguguacuaccacaagaacaacaagagcuggauggaguccgaguuccgggucuacagcuccgccaacaacugcacguucgaguacgugagccagcccuuccugauggaccuggagggcaagcaggggaacuucaagaaccuccgcgaguucguguucaagaacaucgacggcuacuucaagaucuacuccaagcacaccccgaucaaccugguccgggaccugccccagggguucagcgcccucgagccccugguggaccugcccaucggcaucaacaucacccgcuuccagacccuccuggcccugcaccgguccuaccucacgccgggggacagcagcuccggcuggaccgcgggcgccgccgccuacuacgugggguaccugcagccccgcaccuuccugcucaaguacaacgagaacggcaccaucacggacgcggucgacugcgcccuggacccccugagcgagaccaagugcacccucaaguccuucaccguggagaaggggaucuaccagacgagcaacuuccgggugcagcccaccgaguccaucguccgcuucccgaacaucaccaaccugugccccuucggcgagguguucaacgccacccgguucgccagcgucuacgccuggaaccgcaagcggaucuccaacugcguggcggacuacagcgugcuguacaacuccgccagcuucuccacguucaagugcuacggcgucagccccaccaagcucaacgaccugugcuucaccaacguguacgccgacuccuucgugauccgcggggacgagguccggcagaucgcccccggccagaccgggaagaucgccgacuacaacuacaagcugccggacgacuucacgggcugcgugaucgcguggaacagcaacaaccucgacuccaaggucgggggcaacuacaacuaccuguaccgccuguuccgcaagagcaaccucaagcccuucgagcgggacaucuccaccgagaucuaccaggccggcagcacccccugcaacgggguggagggcuucaacugcuacuucccccugcaguccuacggguuccagccgaccaacggcgugggguaccagcccuaccggguggucgugcugagcuucgagcuccugcacgcccccgccacggugugcggccccaagaaguccaccaaccuggucaagaacaagugcgugaacuucaacuucaacggccucaccgggaccggcgugcugaccgagagcaacaagaaguuccugccguuccagcaguucgggcgcgacaucgccgacacgaccgacgcgguccgcgacccccagacccuggagauccucgacaucacccccugcagcuucggcgggguguccgugaucacgccgggcaccaacaccagcaaccaggucgccgugcuguaccagggcgugaacugcaccgagguccccguggccauccacgccgaccagcugacgcccaccuggcggguguacuccaccgggagcaacgucuuccagacccgcgccggcugccucaucggggcggagcacgugaacaacuccuacgagugcgacauccccaucggcgccggcaucugcgccagcuaccagacgcagaccaacuccccgcggcgcgcccggagcguggcgucccagagcgucaucgccuacaccaugucccugggggccgagaacagcguggccuacuccaacaacagcaucgccauccccaccaacuucacgaucuccgugaccaccgagauccugcccgucagcaugaccaagacgagcguggacugcaccauguacaucugcggcgacuccaccgagugcagcaaccuccugcugcaguacggguccuucugcacccagcucaaccgcgcgcugacgggcaucgccguggagcaggacaagaacacccaggaggucuucgcccaggugaagcagaucuacaagacgcccccgaucaaggacuucgggggcuucaacuucagccagauccugcccgaccccuccaagcccagcaagcgguccuucaucgaggaccuccuguucaacaaggugacccuggccgacgccggcuucaucaagcaguacggggacugccucggcgacaucgcggcccgcgaccugaucugcgcccagaaguucaacgggcugaccguccucccgccccugcugaccgacgagaugaucgcccaguacaccagcgcccuccuggcgggcaccaucacguccggguggaccuucggcgccggcgccgcccugcagauccccuucgcgaugcagauggccuaccgguucaacgggaucggcgugacccagaacgugcucuacgagaaccagaagcugaucgccaaccaguucaacagcgccaucgggaagauccaggacucccugagcuccaccgccagcgcgcucggcaagcugcaggacgucgugaaccagaacgcccaggcccugaacacgcucgugaagcagcuguccagcaacuucggggccaucuccagcguccugaacgacauccucucccgccuggacaagguggaggccgaggugcagaucgaccggcugaucaccggccgccuccagagccugcagaccuacgucacccagcagcugauccgggcggccgagauccgcgccagcgccaaccucgccgcgaccaagauguccgagugcgugcugggccagagcaagcggguggacuucugcgggaagggcuaccaccugauguccuucccccagagcgccccgcacggggucguguuccuccacgucacguacgugcccgcccaggagaagaacuucaccaccgcccccgcgaucugccacgacggcaaggcccacuucccccgcgaggggguguucgucuccaacggcacccacugguucgugacgcagcggaacuucuacgagccgcagaucaucaccaccgacaacaccuucgugagcggcaacugcgacgucgugaucgggaucgugaacaacacggucuacgacccccugcagcccgagcuggacuccuucaaggaggagcucgacaaguacuucaagaaccacaccagccccgacguggaccugggcgacaucuccgggaucaacgccagcguggucaacauccagaaggagaucgaccgccugaacgagguggccaagaaccucaacgagucccugaucgaccugcaggagcucggcaaguacgagcaguacaucaaguggccgugguacaucuggcugggcuucaucgccgggcugaucgcgaucgugauggucaccaucaugcucugcugcaugaccagcugcugcuccugccugaagggcugcugcagcugcggguccugcugcaaguucgacgaggacgacagcgagcccgugcugaagggcgugaagcuccacuacacguga

SEQ ID NO: 22996 - RNA, 3822 nt, Artificial Sequence; identical to SEQ ID NO: 11784
  SARS-CoV-2/Wuhan/WIV05/2019__EPI_ISL_402128 spike protein CDS gc (1-1273)(D614G_M1229I)

SEQ ID NO: 22997 - RNA, 3816 nt, Artificial Sequence
  SARS-CoV-2/Wuhan/WIV05/2019__EPI_ISL_402128 spike protein CDS gc (1-1273)(H69del_V70del_A222V_Y453F_S477N_D614G_I692V)
auguucguguuccugguccuccugccccuggugagcucccagugcgugaaccucaccacccgcacgcagcugccgcccgccuacaccaacagcuucacccggggcgucuacuaccccgacaagguguuccgcuccagcgugcugcacuccacccaggaccucuuccugcccuucuucagcaacgucacgugguuccacgccaucuccgggaccaacggcaccaagcgguucgacaacccggugcugcccuucaacgacgggguguacuucgcgagcaccgagaaguccaacaucauccgcggcuggaucuucgggacgacccucgacagcaagacccagucccugcugaucgucaacaacgccaccaacguggugaucaaggucugcgaguuccaguucugcaacgaccccuuccucggcguguacuaccacaagaacaacaagagcuggauggaguccgaguuccggguguacagcuccgccaacaacugcacguucgaguacgucagccagcccuuccugauggaccuggagggcaagcaggggaacuucaagaaccuccgcgaguucguguucaagaacaucgacggcuacuucaagaucuacuccaagcacaccccgaucaaccuggugcgggaccugccccagggguucagcguccucgagccccugguggaccugcccaucggcaucaacaucacccgcuuccagacccuccuggcccugcaccgguccuaccucacgccgggggacagcagcuccggcuggaccgccggcgcggccgccuacuacgugggguaccugcagccccgcaccuuccugcucaaguacaacgagaacggcaccaucacggacgccgucgacugcgcgcuggacccccugagcgagaccaagugcacccucaaguccuucaccguggagaaggggaucuaccagacgagcaacuuccgggugcagcccaccgaguccaucguccgcuucccgaacaucaccaaccugugccccuucggcgagguguucaacgccacccgguucgccagcgucuacgccuggaaccgcaagcggaucuccaacugcguggccgacuacagcgugcuguacaacuccgcgagcuucuccacguucaagugcuacggcgucagccccaccaagcucaacgaccugugcuucaccaacguguacgccgacuccuucgugauccgcggggacgagguccggcagaucgcccccggccagaccgggaagaucgccgacuacaacuacaagcugccggacgacuucacgggcugcgugaucgccuggaacagcaacaaccucgacuccaaggucgggggcaacuacaacuaccuguuccgccuguuccgcaagagcaaccucaagcccuucgagcgggacaucuccaccgagaucuaccaggcgggcaacacccccugcaacgggguggagggcuucaacugcuacuucccccugcagagcuacggguuccagccgaccaacggcgugggguaccagcccuaccggguggucgugcuguccuucgagcuccugcacgcccccgccacggugugcggccccaagaaguccaccaaccuggucaagaacaagugcgugaacuucaacuucaacggccucaccgggaccggcgugcugaccgagagcaacaagaaguuccugccguuccagcaguucgggcgcgacaucgccgacacgaccgacgccguccgcgacccccagacccuggagauccucgacaucacccccugcagcuucggcggggugagcgugaucacgccgggcaccaacaccuccaaccaggucgcggugcuguaccagggcgugaacugcaccgagguccccguggccauccacgccgaccagcugacgcccaccuggcggguguacagcaccggguccaacgucuuccagacccgcgccggcugccucaucggggccgagcacgugaacaacagcuacgagugcgacauccccaucggcgcgggcaucugcgccuccuaccagacgcagaccaacagcccgcggcgcgcccgguccguggccagccaguccgucaucgcguacaccaugagccugggggccgagaacuccguggccuacagcaacaacuccaucgccauccccaccaacuucacgaucagcgugaccaccgagauccugcccgucuccaugaccaagacgagcguggacugcaccauguacaucugcggcgacagcaccgagugcuccaaccuccugcugcaguacgggagcuucugcacccagcucaaccgcgcccugacgggcaucgcgguggagcaggacaagaacacccaggaggucuucgcccaggugaagcagaucuacaagacgcccccgaucaaggacuucgggggcuucaacuucucccagauccugcccgaccccagcaagcccuccaagcggagcuucaucgaggaccuccuguucaacaaggugacccuggccgacgccggcuucaucaagcaguacggggacugccucggcgacaucgccgcgcgcgaccugaucugcgcccagaaguucaacgggcugaccguccucccgccccugcugaccgacgagaugaucgcccaguacaccuccgcccuccuggccggcaccaucacgagcggguggaccuucggcgcgggcgccgcccugcagauccccuucgccaugcagauggcguaccgguucaacgggaucggcgugacccagaacgugcucuacgagaaccagaagcugaucgccaaccaguucaacuccgccaucgggaagauccaggacagccuguccagcaccgccuccgcccucggcaagcugcaggacgucgugaaccagaacgcgcaggcccugaacacgcucgugaagcagcugagcuccaacuucggggccaucagcuccguccugaacgacauccucagccgccuggacaagguggaggccgaggugcagaucgaccggcugaucaccggccgccuccagucccugcagaccuacgucacccagcagcugauccgggccgcggagauccgcgccagcgccaaccucgccgccaccaagaugagcgagugcgugcugggccaguccaagcggguggacuucugcgggaagggcuaccaccugaugagcuucccccaguccgcgccgcacggggucguguuccuccacgucacguacgugcccgcccaggagaagaacuucaccaccgcccccgccaucugccacgacggcaaggcgcacuucccccgcgaggggguguucgucagcaacggcacccacugguucgugacgcagcggaacuucuacgagccgcagaucaucaccaccgacaacaccuucguguccggcaacugcgacgucgugaucgggaucgugaacaacacggucuacgacccccugcagcccgagcuggacagcuucaaggaggagcucgacaaguacuucaagaaccacaccucccccgacguggaccugggcgacaucagcgggaucaacgccuccguggucaacauccagaaggagaucgaccgccugaacgagguggccaagaaccucaacgagagccugaucgaccugcaggagcucggcaaguacgagcaguacaucaaguggccgugguacaucuggcugggcuucaucgccgggcugaucgccaucgugauggucaccaucaugcucugcugcaugaccuccugcugcagcugccugaagggcugcugcuccugcgggagcugcugcaaguucgacgaggacgacuccgagcccgugcugaagggcgugaagcuccacuacacguga

SEQ ID NO: 22998 - RNA, 3816 nt, Artificial Sequence
  SARS-CoV-2/Wuhan/WIV05/2019__EPI_ISL_402128 spike protein CDS gc (1-1273)(H69del_V70del_Y453F_D614G_I692V_M1229I)
auguucguguuccugguccuccugccccuggugagcucccagugcgugaaccucaccacccgcacgcagcugccgcccgccuacaccaacagcuucacccggggcgucuacuaccccgacaagguguuccgcuccagcgugcugcacuccacccaggaccucuuccugcccuucuucagcaacgucacgugguuccacgccaucuccgggaccaacggcaccaagcgguucgacaacccggugcugcccuucaacgacgggguguacuucgcgagcaccgagaaguccaacaucauccgcggcuggaucuucgggacgacccucgacagcaagacccagucccugcugaucgucaacaacgccaccaacguggugaucaaggucugcgaguuccaguucugcaacgaccccuuccucggcguguacuaccacaagaacaacaagagcuggauggaguccgaguuccggguguacagcuccgccaacaacugcacguucgaguacgucagccagcccuuccugauggaccuggagggcaagcaggggaacuucaagaaccuccgcgaguucguguucaagaacaucgacggcuacuucaagaucuacuccaagcacaccccgaucaaccuggugcgggaccugccccagggguucagcgcccucgagccccuggucgaccugcccaucggcaucaacaucacccgcuuccagacccuccuggcccugcaccgguccuaccucacgccgggggacagcagcuccggcuggaccgcgggcgccgccgccuacuacgugggguaccugcagccccgcaccuuccugcucaaguacaacgagaacggcaccaucacggacgcgguggacugcgcccuggacccccugagcgagaccaagugcacccucaaguccuucaccgucgagaaggggaucuaccagacgagcaacuuccgggugcagcccaccgaguccaucgugcgcuucccgaacaucaccaaccugugccccuucggcgaggucuucaacgccacccgguucgccagcguguacgccuggaaccgcaagcggaucuccaacugcgucgcggacuacagcgugcuguacaacuccgccagcuucuccacguucaagugcuacggcgugagccccaccaagcucaacgaccugugcuucaccaacgucuacgccgacuccuucgugauccgcggggacgaggugcggcagaucgcccccggccagaccgggaagaucgccgacuacaacuacaagcugccggacgacuucacgggcugcgucaucgcguggaacagcaacaaccucgacuccaaggucgggggcaacuacaacuaccuguuccgccuguuccgcaagagcaaccucaagcccuucgagcgggacaucuccaccgagaucuaccaggccggcagcacccccugcaacgggguggagggcuucaacugcuacuucccccugcaguccuacggguuccagccgaccaacggcgugggguaccagcccuaccggguggugguccugagcuucgagcuccugcacgcccccgccacggugugcggccccaagaaguccaccaaccuggugaagaacaagugcgucaacuucaacuucaacggccucaccgggaccggcgugcugaccgagagcaacaagaaguuccugccguuccagcaguucgggcgcgacaucgccgacacgaccgacgcggugcgcgacccccagacccuggagauccucgacaucacccccugcagcuucggcggggucuccgugaucacgccgggcaccaacaccagcaaccagguggccguccuguaccagggcgugaacugcaccgaggugcccgucgccauccacgccgaccagcugacgcccaccuggcggguguacuccaccgggagcaacguguuccagacccgcgccggcugccucaucggggcggagcacgucaacaacuccuacgagugcgacauccccaucggcgccggcaucugcgccagcuaccagacgcagaccaacuccccgcggcgcgcccggagcguggcgucccagagcgugaucgccuacaccaugucccugggggccgagaacagcgucgccuacuccaacaacagcaucgccauccccaccaacuucacgaucuccgugaccaccgagauccugcccgugagcaugaccaagacgagcgucgacugcaccauguacaucugcggcgacuccaccgagugcagcaaccuccugcugcaguacggguccuucugcacccagcucaaccgcgcgcugacgggcaucgccguggagcaggacaagaacacccaggagguguucgcccaggucaagcagaucuacaagacgcccccgaucaaggacuucgggggcuucaacuucagccagauccugcccgaccccuccaagcccagcaagcgguccuucaucgaggaccuccuguucaacaaggugacccuggccgacgccggcuucaucaagcaguacggggacugccucggcgacaucgcggcccgcgaccugaucugcgcccagaaguucaacgggcugaccgugcucccgccccugcugaccgacgagaugaucgcccaguacaccagcgcccuccuggcgggcaccaucacguccggguggaccuucggcgccggcgccgcccugcagauccccuucgcgaugcagauggccuaccgguucaacgggaucggcgucacccagaacgugcucuacgagaaccagaagcugaucgccaaccaguucaacagcgccaucgggaagauccaggacucccugagcuccaccgccagcgcgcucggcaagcugcaggacguggucaaccagaacgcccaggcccugaacacgcucgugaagcagcuguccagcaacuucggggccaucuccagcgugcugaacgacauccucucccgccuggacaaggucgaggccgaggugcagaucgaccggcugaucaccggccgccuccagagccugcagaccuacgugacccagcagcugauccgggcggccgagauccgcgccagcgccaaccucgccgcgaccaagauguccgagugcguccugggccagagcaagcggguggacuucugcgggaagggcuaccaccugauguccuucccccagagcgccccgcacgggguggucuuccuccacgugacguacguccccgcccaggagaagaacuucaccaccgcccccgcgaucugccacgacggcaaggcccacuucccccgcgaggggguguucguguccaacggcacccacugguucgucacgcagcggaacuucuacgagccgcagaucaucaccaccgacaacaccuucgugagcggcaacugcgacguggucaucgggaucgugaacaacacgguguacgacccccugcagcccgagcuggacuccuucaaggaggagcucgacaaguacuucaagaaccacaccagccccgacgucgaccugggcgacaucuccgggaucaacgccagcguggugaacauccagaaggagaucgaccgccugaacgaggucgccaagaaccucaacgagucccugaucgaccugcaggagcucggcaaguacgagcaguacaucaaguggccgugguacaucuggcugggcuucaucgccgggcugaucgcgaucgugaucgugaccaucaugcucugcugcaugaccagcugcugcuccugccugaagggcugcugcagcugcggguccugcugcaaguucgacgaggacgacagcgagcccguccugaagggcgugaagcuccacuacacguga

SEQ ID NO: 22999 - RNA, 3813 nt, Artificial Sequence
  SARS-CoV-2/Wuhan/WIV05/2019__EPI_ISL_402128 spike protein CDS gc (1-1273)(H69del_V70del_Y144del_N501Y_A570D_D614G_P681H_T716I_S982 A_D1118H)
auguucguguuccugguccuccugccccuggugagcucccagugcgugaaccucaccacccgcacgcagcugccgcccgccuacaccaacagcuucacccggggcgucuacuaccccgacaagguguuccgcuccagcgugcugcacuccacccaggaccucuuccugcccuucuucagcaacgucacgugguuccacgccaucuccgggaccaacggcaccaagcgguucgacaacccggugcugcccuucaacgacgggguguacuucgcgagcaccgagaaguccaacaucauccgcggcuggaucuucgggacgacccucgacagcaagacccagucccugcugaucgucaacaacgccaccaacguggugaucaaggucugcgaguuccaguucugcaacgaccccuuccucggcguguaccacaagaacaacaagagcuggauggaguccgaguuccggguguacagcuccgccaacaacugcacguucgaguacgucagccagcccuuccugauggaccuggagggcaagcaggggaacuucaagaaccuccgcgaguucguguucaagaacaucgacggcuacuucaagaucuacuccaagcacaccccgaucaaccuggugcgggaccugccccagggguucagcgcccucgagccccuggucgaccugcccaucggcaucaacaucacccgcuuccagacccuccuggcccugcaccgguccuaccucacgccgggggacagcagcuccggcuggaccgcgggcgccgccgccuacuacgugggguaccugcagccccgcaccuuccugcucaaguacaacgagaacggcaccaucacggacgcgguggacugcgcccuggacccccugagcgagaccaagugcacccucaaguccuucaccgucgagaaggggaucuaccagacgagcaacuuccgggugcagcccaccgaguccaucgugcgcuucccgaacaucaccaaccugugccccuucggcgaggucuucaacgccacccgguucgccagcguguacgccuggaaccgcaagcggaucuccaacugcgucgcggacuacagcgugcuguacaacuccgccagcuucuccacguucaagugcuacggcgugagccccaccaagcucaacgaccugugcuucaccaacgucuacgccgacuccuucgugauccgcggggacgaggugcggcagaucgcccccggccagaccgggaagaucgccgacuacaacuacaagcugccggacgacuucacgggcugcgucaucgcguggaacagcaacaaccucgacuccaaggucgggggcaacuacaacuaccuguaccgccuguuccgcaagagcaaccucaagcccuucgagcgggacaucuccaccgagaucuaccaggccggcagcacccccugcaacgggguggagggcuucaacugcuacuucccccugcaguccuacggguuccagccgaccuacggcgugggguaccagcccuaccggguggugguccugagcuucgagcuccugcacgcccccgccacggugugcggccccaagaaguccaccaaccuggugaagaacaagugcgucaacuucaacuucaacggccucaccgggaccggcgugcugaccgagagcaacaagaaguuccugccguuccagcaguucgggcgcgacaucgacgacacgaccgacgccgugcgcgacccccagacccuggagauccucgacaucacccccugcagcuucggcggggucuccgugaucacgccgggcaccaacaccagcaaccagguggcgguccuguaccagggcgugaacugcaccgaggugcccgucgccauccacgccgaccagcugacgcccaccuggcggguguacuccaccgggagcaacguguuccagacccgcgccggcugccucaucggggccgagcacgucaacaacuccuacgagugcgacauccccaucggcgcgggcaucugcgccagcuaccagacgcagaccaacucccaccggcgcgcccggagcguggccucccagagcaucaucgcguacaccaugucccugggggccgagaacagcguggccuacuccaacaacagcaucgccaucccgaucaacuucaccaucuccgucacgaccgagauccugcccgugagcaugaccaagaccagcguggacugcacgauguacaucugcggcgacuccaccgagugcagcaaccuccugcugcaguacggguccuucugcacccagcucaaccgcgcccugaccggcaucgcggucgagcaggacaagaacacgcaggagguguucgcccaggugaagcagaucuacaagaccccgcccaucaaggacuucgggggcuucaacuucagccagauccugcccgaccccuccaagcccagcaagcgguccuucaucgaggaccuccuguucaacaaggucacccuggccgacgccggcuucaucaagcaguacggggacugccucggcgacaucgccgcgcgcgaccugaucugcgcccagaaguucaacgggcugaccgugcugcccccgcuccugacggacgagaugaucgcccaguacaccagcgcccuccuggccggcaccaucaccuccggguggacguucggcgcgggcgccgcccugcagauccccuucgccaugcagauggcguaccgguucaacgggaucggcgugacccagaacguccucuacgagaaccagaagcugaucgccaaccaguucaacagcgccaucgggaagauccaggacucccugagcuccaccgccagcgcccucggcaagcugcaggacguggugaaccagaacgcgcaggcccugaacacccucgucaagcagcuguccagcaacuucggggccaucuccagcgugcugaacgacauccucgcccgccuggacaagguggaggccgagguccagaucgaccggcugaucacgggccgccuccagucccugcagaccuacgugacccagcagcugauccgggcggccgagauccgcgccagcgccaaccucgccgcgaccaagaugagcgagugcgugcugggccaguccaagcgggucgacuucugcgggaagggcuaccaccugaugagcuucccccaguccgcgccccacggggugguguuccuccacgucaccuacgugccggcccaggagaagaacuucacgaccgcccccgccaucugccacgacggcaaggcccacuucccccgcgagggggucuucgugagcaacggcacccacugguucgugacccagcggaacuucuacgagccccagaucaucacgacccacaacaccuucgucuccggcaacugcgacguggugaucgggaucgucaacaacaccguguacgacccgcugcagcccgagcuggacagcuucaaggaggagcucgacaaguacuucaagaaccacacgucccccgacguggaccugggcgacaucagcgggaucaacgccuccgucgugaacauccagaaggagaucgaccgccugaacgagguggccaagaaccucaacgagagccugaucgaccugcaggagcucggcaaguacgagcaguacaucaaguggcccugguacaucuggcugggcuucaucgccgggcugaucgcgaucgucauggugaccaucaugcucugcugcaugaccuccugcugcagcugccugaagggcugcugcuccugcgggagcugcugcaaguucgacgaggacgacuccgagccggugcugaagggcgucaagcuccacuacaccuga

SEQ ID NO: 23000 - RNA, 3822 nt, Artificial Sequence
  SARS-CoV-2/Wuhan/WIV05/2019__EPI_ISL_402128 spike protein CDS gc (1-1273)(K417N_E484K_N501Y_D614G)
auguucguguuccugguccuccugccccuggugagcucccagugcgugaaccucaccacccgcacgcagcugccgcccgccuacaccaacagcuucacccggggcgucuacuaccccgacaagguguuccgcuccagcgugcugcacuccacccaggaccucuuccugcccuucuucagcaacgucacgugguuccacgccauccacguguccgggaccaacggcaccaagcgguucgacaacccggugcugcccuucaacgacggggucuacuucgcgagcaccgagaaguccaacaucauccgcggcuggaucuucgggacgacccucgacagcaagacccagucccugcugaucgugaacaacgccaccaacguggucaucaaggugugcgaguuccaguucugcaacgaccccuuccucggcguguacuaccacaagaacaacaagagcuggauggaguccgaguuccgggucuacagcuccgccaacaacugcacguucgaguacgugagccagcccuuccugauggaccuggagggcaagcaggggaacuucaagaaccuccgcgaguucguguucaagaacaucgacggcuacuucaagaucuacuccaagcacaccccgaucaaccugguccgggaccugccccagggguucagcgcccucgagccccugguggaccugcccaucggcaucaacaucacccgcuuccagacccuccuggcccugcaccgguccuaccucacgccgggggacagcagcuccggcuggaccgcgggcgccgccgccuacuacgugggguaccugcagccccgcaccuuccugcucaaguacaacgagaacggcaccaucacggacgcggucgacugcgcccuggacccccugagcgagaccaagugcacccucaaguccuucaccguggagaaggggaucuaccagacgagcaacuuccgggugcagcccaccgaguccaucguccgcuucccgaacaucaccaaccugugccccuucggcgagguguucaacgccacccgguucgccagcgucuacgccuggaaccgcaagcggaucuccaacugcguggcggacuacagcgugcuguacaacuccgccagcuucuccacguucaagugcuacggcgucagccccaccaagcucaacgaccugugcuucaccaacguguacgccgacuccuucgugauccgcggggacgagguccggcagaucgcccccggccagaccgggaacaucgccgacuacaacuacaagcugccggacgacuucacgggcugcgugaucgcguggaacagcaacaaccucgacuccaaggucgggggcaacuacaacuaccuguaccgccuguuccgcaagagcaaccucaagcccuucgagcgggacaucuccaccgagaucuaccaggccggcagcacccccugcaacggggugaagggcuucaacugcuacuucccccugcaguccuacggguuccagccgaccuacggcgugggguaccagcccuaccggguggucgugcugagcuucgagcuccugcacgcccccgccacggugugcggccccaagaaguccaccaaccuggucaagaacaagugcgugaacuucaacuucaacggccucaccgggaccggcgugcugaccgagagcaacaagaaguuccugccguuccagcaguucgggcgcgacaucgccgacacgaccgacgcgguccgcgacccccagacccuggagauccucgacaucacccccugcagcuucggcgggguguccgugaucacgccgggcaccaacaccagcaaccaggucgccgugcuguaccagggcgugaacugcaccgagguccccguggccauccacgccgaccagcugacgcccaccuggcggguguacuccaccgggagcaacgucuuccagacccgcgccggcugccucaucggggcggagcacgugaacaacuccuacgagugcgacauccccaucggcgccggcaucugcgccagcuaccagacgcagaccaacuccccgcggcgcgcccggagcguggcgucccagagcaucaucgccuacaccaugucccugggggccgagaacagcgucgccuacuccaacaacagcaucgccauccccaccaacuucacgaucuccgugaccaccgagauccugcccgugagcaugaccaagacgagcgucgacugcaccauguacaucugcggcgacuccaccgagugcagcaaccuccugcugcaguacggguccuucugcacccagcucaaccgcgcgcugacgggcaucgccguggagcaggacaagaacacccaggagguguucgcccaggucaagcagaucuacaagacgcccccgaucaaggacuucgggggcuucaacuucagccagauccugcccgaccccuccaagcccagcaagcgguccuucaucgaggaccuccuguucaacaaggugacccuggccgacgccggcuucaucaagcaguacggggacugccucggcgacaucgcggcccgcgaccugaucugcgcccagaaguucaacgggcugaccgugcucccgccccugcugaccgacgagaugaucgcccaguacaccagcgcccuccuggcgggcaccaucacguccggguggaccuucggcgccggcgccgcccugcagauccccuucgcgaugcagauggccuaccgguucaacgggaucggcgucacccagaacgugcucuacgagaaccagaagcugaucgccaaccaguucaacagcgccaucgggaagauccaggacucccugagcuccaccgccagcgcgcucggcaagcugcaggacguggucaaccagaacgcccaggcccugaacacgcucgugaagcagcuguccagcaacuucggggccaucuccagcgugcugaacgacauccucucccgccuggacaaggucgaggccgaggugcagaucgaccggcugaucaccggccgccuccagagccugcagaccuacgugacccagcagcugauccgggcggccgagauccgcgccagcgccaaccucgccgcgaccaagauguccgagugcguccugggccagagcaagcggguggacuucugcgggaagggcuaccaccugauguccuucccccagagcgccccgcacgggguggucuuccuccacgugacguacguccccgcccaggagaagaacuucaccaccgcccccgcgaucugccacgacggcaaggcccacuucccccgcgaggggguguucguguccaacggcacccacugguucgucacgcagcggaacuucuacgagccgcagaucaucaccaccgacaacaccuucgugagcggcaacugcgacguggucaucgggaucgugaacaacacgguguacgacccccugcagcccgagcuggacuccuucaaggaggagcucgacaaguacuucaagaaccacaccagccccgacgucgaccugggcgacaucuccgggaucaacgccagcguggugaacauccagaaggagaucgaccgccugaacgaggucgccaagaaccucaacgagucccugaucgaccugcaggagcucggcaaguacgagcaguacaucaaguggccgugguacaucuggcugggcuucaucgccgggcugaucgcgaucgugauggugaccaucaugcucugcugcaugaccagcugcugcuccugccugaagggcugcugcagcugcggguccugcugcaaguucgacgaggacgacagcgagcccguccugaagggcgugaagcuccacuacacguga

SEQ ID NO: 23001 - RNA, 3813 nt, Artificial Sequence
  SARS-CoV-2/Wuhan/WIV05/2019__EPI_ISL_402128 spike protein CDS gc (1-1273)(L18F_D80A_D215G_L242del_A243del_L244del_R246I_K417N_E484 K_N501Y_D614G_A701V)
auguucguguuccugguccuccugccccuggugagcucccagugcgugaacuucaccacccgcacgcagcucccgcccgccuacaccaacagcuucacccggggcgucuacuaccccgacaagguguuccgcuccagcgugcugcacuccacccaggaccuguuccuccccuucuucagcaacgucacgugguuccacgccauccacguguccgggaccaacggcaccaagcgguucgcgaacccggugcugcccuucaacgacggggucuacuucgccagcaccgagaaguccaacaucauccgcggcuggaucuucgggacgacccuggacagcaagacccagucccuccugaucgugaacaacgccaccaacguggucaucaaggugugcgaguuccaguucugcaacgaccccuuccugggcguguacuaccacaagaacaacaagagcuggauggaguccgaguuccgggucuacagcuccgccaacaacugcacguucgaguacgugagccagcccuuccucauggaccuggagggcaagcaggggaacuucaagaaccugcgcgaguucguguucaagaacaucgacggcuacuucaagaucuacuccaagcacaccccgaucaaccucguccgggggcugccccagggcuucagcgcccuggagccccucguggaccugcccaucgggaucaacaucacccgcuuccagacccugcacaucuccuaccucacgccgggcgacagcagcuccggcuggaccgcgggggccgccgccuacuacgugggcuaccugcagccccggaccuuccugcucaaguacaacgagaacgggaccaucacggacgcggucgacugcgcccuggacccccugagcgagaccaagugcacccucaaguccuucaccguggagaagggcaucuaccagacgagcaacuuccgcgugcagcccaccgaguccaucguccgguucccgaacaucaccaaccugugccccuucggcgagguguucaacgccacccgcuucgccagcgucuacgccuggaaccggaagcgcaucuccaacugcguggcggacuacagcgugcuguacaacuccgccagcuucuccacguucaagugcuacggggucagccccaccaagcucaacgaccugugcuucaccaacguguacgccgacuccuucgugauccggggcgacgagguccgccagaucgcccccgggcagaccggcaacaucgccgacuacaacuacaagcugccggacgacuucacggggugcgugaucgcguggaacagcaacaaccucgacuccaaggugggcggcaacuacaacuaccuguaccggcuguuccgcaagagcaaccucaagcccuucgagcgggacaucuccaccgagaucuaccaggccgggagcacccccugcaacggcgucaagggguucaacugcuacuucccccugcaguccuacggcuuccagccgaccuacggggugggcuaccagcccuaccgcguggucgugcugagcuucgagcuccugcacgcccccgccacggugugcggccccaagaaguccaccaaccuggucaagaacaagugcgugaacuucaacuucaacgggcucaccggcaccggggugcugaccgagagcaacaagaaguuccugccguuccagcaguucggccgggacaucgccgacacgaccgacgcgguccgcgacccccagacccucgagauccuggacaucacccccugcagcuucgggggcguguccgugaucacgccgggcaccaacaccagcaaccaggucgccgugcuguaccagggggugaacugcaccgagguccccguggccauccacgccgaccagcugacgcccaccuggcgcguguacuccaccggcagcaacgucuuccagacccgggccgggugccucaucggcgcggagcacgugaacaacuccuacgagugcgacauccccaucggcgccgggaucugcgccagcuaccagacgcagaccaacuccccgcgccgggcccgcagcguggcgucccagagcaucaucgccuacaccaugucccugggcgucgagaacagcguggccuacuccaacaacagcaucgccauccccaccaacuucacgaucuccgugaccaccgagauccugcccgucagcaugaccaagacgagcguggacugcaccauguacaucugcggggacuccaccgagugcagcaaccuccugcugcaguacggcuccuucugcacccagcucaaccgggcccugacggggaucgcgguggagcaggacaagaacacccaggaggucuucgcccaggugaagcagaucuacaagacgcccccgaucaaggacuucggcggcuucaacuucagccagauccugcccgaccccuccaagcccagcaagcgcuccuucaucgaggaccuccuguucaacaaggugacccuggccgacgccggguucaucaagcaguacggcgacugccucggggacaucgccgcgcgggaccugaucugcgcccagaaguucaacggccugaccguccucccgccccugcugaccgacgagaugaucgcccaguacaccagcgcccuccuggccgggaccaucacguccggcuggaccuucggcgcgggggccgcccugcagauccccuucgccaugcagauggcguaccgcuucaacggcaucggggugacccagaacgugcucuacgagaaccagaagcugaucgccaaccaguucaacagcgccaucggcaagauccaggacucccugagcuccaccgccagcgcccucgggaagcugcaggacgucgugaaccagaacgcgcaggcccugaacacgcucgugaagcagcuguccagcaacuucggcgccaucuccagcguccugaacgacauccucucccggcuggacaagguggaggccgaggugcagaucgaccgccugaucaccggccggcuccagagccugcagaccuacgucacccagcagcugauccgcgccgcggagauccgggccagcgccaaccucgccgccaccaagauguccgagugcgugcuggggcagagcaagcgcguggacuucugcggcaagggguaccaccugauguccuucccccagagcgcgccgcacggcgucguguuccuccacgucacguacgugcccgcccaggagaagaacuucaccaccgcccccgccaucugccacgacgggaaggcgcacuucccccgggagggcguguucgucuccaacggcacccacugguucgugacgcagcgcaacuucuacgagccgcagaucaucaccaccgacaacaccuucgugagcgggaacugcgacgucgugaucggcaucgugaacaacacggucuacgacccccugcagcccgagcuggacuccuucaaggaggagcucgacaaguacuucaagaaccacaccagccccgacguggaccugggggacaucuccggcaucaacgccagcguggucaacauccagaaggagaucgaccggcugaacgagguggccaagaaccucaacgagucccugaucgaccugcaggagcucggcaaguacgagcaguacaucaaguggccgugguacaucuggcugggguucaucgccggccugaucgccaucgugauggucaccaucaugcucugcugcaugaccagcugcugcuccugccugaaggggugcugcagcugcggcuccugcugcaaguucgacgaggacgacagcgagcccgugcugaagggggugaagcuccacuacacguga

SEQ ID NO: 23002 - RNA, 3822 nt, Artificial Sequence
  SARS-CoV-2/Wuhan/WIV05/2019__EPI_ISL_402128 spike protein CDS gc (1-1273)(E484K_D614G)
auguucguguuccugguccuccugccccuggugagcucccagugcgugaaccucaccacccgcacgcagcugccgcccgccuacaccaacagcuucacccggggcgucuacuaccccgacaagguguuccgcuccagcgugcugcacuccacccaggaccucuuccugcccuucuucagcaacgucacgugguuccacgccauccacguguccgggaccaacggcaccaagcgguucgacaacccggugcugcccuucaacgacggggucuacuucgcgagcaccgagaaguccaacaucauccgcggcuggaucuucgggacgacccucgacagcaagacccagucccugcugaucgugaacaacgccaccaacguggucaucaaggugugcgaguuccaguucugcaacgaccccuuccucggcguguacuaccacaagaacaacaagagcuggauggaguccgaguuccgggucuacagcuccgccaacaacugcacguucgaguacgugagccagcccuuccugauggaccuggagggcaagcaggggaacuucaagaaccuccgcgaguucguguucaagaacaucgacggcuacuucaagaucuacuccaagcacaccccgaucaaccugguccgggaccugccccagggguucagcgcccucgagccccugguggaccugcccaucggcaucaacaucacccgcuuccagacccuccuggcccugcaccgguccuaccucacgccgggggacagcagcuccggcuggaccgcgggcgccgccgccuacuacgugggguaccugcagccccgcaccuuccugcucaaguacaacgagaacggcaccaucacggacgcggucgacugcgcccuggacccccugagcgagaccaagugcacccucaaguccuucaccguggagaaggggaucuaccagacgagcaacuuccgggugcagcccaccgaguccaucguccgcuucccgaacaucaccaaccugugccccuucggcgagguguucaacgccacccgguucgccagcgucuacgccuggaaccgcaagcggaucuccaacugcguggcggacuacagcgugcuguacaacuccgccagcuucuccacguucaagugcuacggcgucagccccaccaagcucaacgaccugugcuucaccaacguguacgccgacuccuucgugauccgcggggacgagguccggcagaucgcccccggccagaccgggaagaucgccgacuacaacuacaagcugccggacgacuucacgggcugcgugaucgcguggaacagcaacaaccucgacuccaaggucgggggcaacuacaacuaccuguaccgccuguuccgcaagagcaaccucaagcccuucgagcgggacaucuccaccgagaucuaccaggccggcagcacccccugcaacggggugaagggcuucaacugcuacuucccccugcaguccuacggguuccagccgaccaacggcgugggguaccagcccuaccggguggucgugcugagcuucgagcuccugcacgcccccgccacggugugcggccccaagaaguccaccaaccuggucaagaacaagugcgugaacuucaacuucaacggccucaccgggaccggcgugcugaccgagagcaacaagaaguuccugccguuccagcaguucgggcgcgacaucgccgacacgaccgacgcgguccgcgacccccagacccuggagauccucgacaucacccccugcagcuucggcgggguguccgugaucacgccgggcaccaacaccagcaaccaggucgccgugcuguaccagggcgugaacugcaccgagguccccguggccauccacgccgaccagcugacgcccaccuggcggguguacuccaccgggagcaacgucuuccagacccgcgccggcugccucaucggggcggagcacgugaacaacuccuacgagugcgacauccccaucggcgccggcaucugcgccagcuaccagacgcagaccaacuccccgcggcgcgcccggagcguggcgucccagagcaucaucgccuacaccaugucccugggggccgagaacagcgucgccuacuccaacaacagcaucgccauccccaccaacuucacgaucuccgugaccaccgagauccugcccgugagcaugaccaagacgagcgucgacugcaccauguacaucugcggcgacuccaccgagugcagcaaccuccugcugcaguacggguccuucugcacccagcucaaccgcgcgcugacgggcaucgccguggagcaggacaagaacacccaggagguguucgcccaggucaagcagaucuacaagacgcccccgaucaaggacuucgggggcuucaacuucagccagauccugcccgaccccuccaagcccagcaagcgguccuucaucgaggaccuccuguucaacaaggugacccuggccgacgccggcuucaucaagcaguacggggacugccucggcgacaucgcggcccgcgaccugaucugcgcccagaaguucaacgggcugaccgugcucccgccccugcugaccgacgagaugaucgcccaguacaccagcgcccuccuggcgggcaccaucacguccggguggaccuucggcgccggcgccgcccugcagauccccuucgcgaugcagauggccuaccgguucaacgggaucggcgucacccagaacgugcucuacgagaaccagaagcugaucgccaaccaguucaacagcgccaucgggaagauccaggacucccugagcuccaccgccagcgcgcucggcaagcugcaggacguggucaaccagaacgcccaggcccugaacacgcucgugaagcagcuguccagcaacuucggggccaucuccagcgugcugaacgacauccucucccgccuggacaaggucgaggccgaggugcagaucgaccggcugaucaccggccgccuccagagccugcagaccuacgugacccagcagcugauccgggcggccgagauccgcgccagcgccaaccucgccgcgaccaagauguccgagugcguccugggccagagcaagcggguggacuucugcgggaagggcuaccaccugauguccuucccccagagcgccccgcacgggguggucuuccuccacgugacguacguccccgcccaggagaagaacuucaccaccgcccccgcgaucugccacgacggcaaggcccacuucccccgcgaggggguguucguguccaacggcacccacugguucgucacgcagcggaacuucuacgagccgcagaucaucaccaccgacaacaccuucgugagcggcaacugcgacguggucaucgggaucgugaacaacacgguguacgacccccugcagcccgagcuggacuccuucaaggaggagcucgacaaguacuucaagaaccacaccagccccgacgucgaccugggcgacaucuccgggaucaacgccagcguggugaacauccagaaggagaucgaccgccugaacgaggucgccaagaaccucaacgagucccugaucgaccugcaggagcucggcaaguacgagcaguacaucaaguggccgugguacaucuggcugggcuucaucgccgggcugaucgcgaucgugauggugaccaucaugcucugcugcaugaccagcugcugcuccugccugaagggcugcugcagcugcggguccugcugcaaguucgacgaggacgacagcgagcccguccugaagggcgugaagcuccacuacacguga

SEQ ID NO: 23003 - RNA, 3822 nt, Artificial Sequence
  SARS-CoV-2/Wuhan/WIV05/2019__EPI_ISL_402128 spike protein CDS gc (1-1273)(L18F_T20N_P26S_D138Y_R190S_K417T_E484K_N501Y_D614G_H655Y _T1027I)
auguucguguuccugguccuccugccccuggugagcucccagugcgugaacuucaccaaccgcacccagcucccgagcgccuacacgaacuccuucacccggggcgucuacuaccccgacaagguguuccgcagcuccgugcugcacagcacccaggaccuguuccuccccuucuucuccaacgucaccugguuccacgccauccacgugagcgggacgaacggcaccaagcgguucgacaaccccgugcugccguucaacgacggggucuacuucgcguccaccgagaaguccaacaucauccgcggcuggaucuucgggaccacgcuggacuccaagacccagagccuccugaucgugaacaacgccaccaacguggucaucaaggugugcgaguuccaguucugcaacuaccccuuccugggcguguacuaccacaagaacaacaaguccuggauggagagcgaguuccgggucuacuccagcgccaacaacugcaccuucgaguacgugucccagcccuuccucauggaccuggagggcaagcaggggaacuucaagaaccugagcgaguucguguucaagaacaucgacggcuacuucaagaucuacuccaagcacacgcccaucaaccucguccgcgaccugccgcagggguucagcgcccuggagccccucguggaccugcccaucggcaucaacaucacccgguuccagacccugcucgcccugcaccgcagcuaccugacccccggggacuccagcuccggcuggacggcgggcgccgccgccuacuacgugggguaccuccagccgcggaccuuccugcugaaguacaacgagaacggcaccaucaccgacgcggucgacugcgcccucgacccccugagcgagacgaagugcacccugaaguccuucaccguggagaaggggaucuaccagaccagcaacuuccgcgugcagcccacggaguccaucguccgguuccccaacaucaccaaccucugcccguucggcgagguguucaacgccacccgcuucgccagcgucuacgccuggaaccggaagcgcaucuccaacugcguggcggacuacagcgugcuguacaacuccgccagcuucuccaccuucaagugcuacggcgucagccccacgaagcugaacgaccucugcuucaccaacguguacgccgacuccuucgugauccgcggggacgagguccggcagaucgcccccggccagaccgggaccaucgccgacuacaacuacaagcugcccgacgacuucacgggcugcgugaucgcguggaacagcaacaaccuggacuccaaggucgggggcaacuacaacuaccucuaccggcuguuccgcaagagcaaccugaagccguucgagcgggacaucuccaccgagaucuaccaggccggcagcacccccugcaacggggugaagggcuucaacugcuacuucccccuccagagcuacggguuccagcccaccuacggcgugggguaccagccguaccgcguggucgugcuguccuucgagcugcuccacgcccccgccacggugugcggccccaagaaguccaccaaccuggucaagaacaagugcgugaacuucaacuucaacggccugaccgggaccggcgugcucaccgagagcaacaagaaguuccugcccuuccagcaguucgggcgggacaucgccgacacgaccgacgcgguccgcgacccgcagacccuggagauccuggacaucacccccugcagcuucggcgggguguccgugaucacgcccggcaccaacaccagcaaccaggucgccgugcucuaccagggcgugaacugcaccgaggucccgguggccauccacgccgaccagcugacgcccaccuggcgcguguacuccaccgggagcaacgucuuccagacccgggccggcugccugaucggggcggaguacgugaacaacuccuacgagugcgacauccccaucggcgccggcaucugcgccagcuaccagacgcagaccaacagcccccgccgggcccgcagcguggcgucccagagcaucaucgccuacaccaugucccucggggccgagaacagcgucgccuacuccaacaacagcaucgccaucccgaccaacuucacgaucagcgugaccaccgagauccugcccguguccaugaccaagacgagcgucgacugcaccauguacaucugcggcgacuccaccgagugcagcaaccugcuccugcaguacggguccuucugcacccagcugaaccgggcgcucacgggcaucgccguggagcaggacaagaacacccaggagguguucgcccaggucaagcagaucuacaagaccccgcccaucaaggacuucgggggcuucaacuucagccagauccugcccgaccccuccaagcccagcaagcgcuccuucaucgaggaccuccuguucaacaaggugacccuggccgacgccggcuucaucaagcaguacggggacugccugggcgacaucgcggcccgggaccucaucugcgcccagaaguucaacgggcugacggugcugcccccgcuccugaccgacgagaugaucgcccaguacaccagcgcccugcucgcgggcaccaucacguccggguggaccuucggcgccggcgccgcccugcagauccccuucgcgaugcagauggccuaccgcuucaacgggaucggcgucacccagaacgugcuguacgagaaccagaagcucaucgccaaccaguucaacagcgccaucgggaagauccaggacucccugagcuccaccgccagcgcgcugggcaagcuccaggacguggucaaccagaacgcccaggcccugaacacgcuggugaagcagcucuccagcaacuucggggccaucuccagcgugcugaacgacauccugagccggcucgacaaggucgaggccgaggugcagaucgaccgccugaucaccggccggcugcagucccuccagaccuacgugacccagcagcugauccgcgcggccgagauccgggccagcgccaaccuggccgcgaucaagauguccgagugcguccucggccagagcaagcgcguggacuucugcgggaagggcuaccaccugauguccuucccccagagcgcgccccacgggguggucuuccugcacgugaccuacgucccggcccaggagaagaacuucacgaccgcccccgccaucugccacgacggcaaggcccacuucccccgggaggggguguucguguccaacggcacccacugguucgucacccagcgcaacuucuacgagccccagaucaucacgaccgacaacaccuucgugagcggcaacugcgacguggucaucgggaucgugaacaacaccguguacgacccgcuccagcccgagcuggacuccuucaaggaggagcuggacaaguacuucaagaaccacacgagccccgacgucgaccucggcgacaucuccgggaucaacgccagcguggugaacauccagaaggagaucgaccggcugaacgaggucgccaagaaccugaacgagucccucaucgaccugcaggagcugggcaaguacgagcaguacaucaaguggcccugguacaucuggcucggcuucaucgccgggcugaucgcgaucgugauggugaccaucaugcugugcugcaugaccagcugcugcuccugccucaagggcugcugcagcugcggguccugcugcaaguucgacgaggacgacagcgagccgguccugaagggcgugaagcugcacuacaccuga

SEQ ID NO: 23004 - RNA, 3822 nt, Artificial Sequence
  SARS-CoV-2/Wuhan/WIV05/2019__EPI_ISL_402128 spike protein CDS gc (1-1273)(S13I_W152C_L452R_D614G)
auguucguguuccugguccuccugccccuggugagcauccagugcgugaaccucaccacccgcacgcagcugccgcccgccuacaccaacuccuucacccggggcgucuacuaccccgacaagguguuccgcagcuccgugcugcacagcacccaggaccucuuccugcccuucuucuccaacgucacgugguuccacgccauccacgugagcgggaccaacggcaccaagcgguucgacaacccggugcugcccuucaacgacggggucuacuucgcguccaccgagaaguccaacaucauccgcggcuggaucuucgggacgacccucgacagcaagacccagagccugcugaucgugaacaacgccaccaacguggucaucaaggugugcgaguuccaguucugcaacgaccccuuccucggcguguacuaccacaagaacaacaaguccugcauggagagcgaguuccgggucuacuccagcgccaacaacugcacguucgaguacgugucccagcccuuccugauggaccuggagggcaagcaggggaacuucaagaaccuccgcgaguucguguucaagaacaucgacggcuacuucaagaucuacagcaagcacaccccgaucaaccugguccgggaccugccccagggguucuccgcccucgagccccugguggaccugcccaucggcaucaacaucacccgcuuccagacccuccuggcccugcaccggagcuaccucacgccgggggacuccagcagcggcuggaccgcgggcgccgccgccuacuacgugggguaccugcagccccgcaccuuccugcucaaguacaacgagaacggcaccaucacggacgcggucgacugcgcccuggacccccuguccgagaccaagugcacccucaagagcuucaccguggagaaggggaucuaccagacguccaacuuccgggugcagcccaccgagagcaucguccgcuucccgaacaucaccaaccugugccccuucggcgagguguucaacgccacccgguucgccuccgucuacgccuggaaccgcaagcggaucagcaacugcguggcggacuacuccgugcuguacaacagcgccuccuucagcacguucaagugcuacggcgucucccccaccaagcucaacgaccugugcuucaccaacguguacgccgacagcuucgugauccgcggggacgagguccggcagaucgcccccggccagaccgggaagaucgccgacuacaacuacaagcugccggacgacuucacgggcugcgugaucgcguggaacuccaacaaccucgacagcaaggucgggggcaacuacaacuaccgcuaccggcuguuccgcaaguccaaccugaagcccuucgagcgggacaucagcaccgagaucuaccaggccggcuccacccccugcaacgggguggagggcuucaacugcuacuucccccuccagagcuacggguuccagccgaccaacggcgugggguaccagcccuaccgcguggucgugcuguccuucgagcugcuccacgcccccgccacggugugcggccccaagaaguccaccaaccuggucaagaacaagugcgugaacuucaacuucaacggccugaccgggaccggcgugcucaccgagagcaacaagaaguuccugccguuccagcaguucgggcgcgacaucgccgacacgaccgacgcgguccgggacccccagacccuggagauccuggacaucacccccugcagcuucggcggggugagcgugaucacgccgggcaccaacaccuccaaccaggucgccgugcucuaccagggcgugaacugcaccgagguccccguggccauccacgccgaccagcugacgcccaccuggcgcguguacagcaccggguccaacgucuuccagacccgggccggcugccugaucggggcggagcacgugaacaacagcuacgagugcgacauccccaucggcgccggcaucugcgccuccuaccagacgcagaccaacagcccgcgccgggcccgcuccguggcgagccaguccaucaucgccuacaccaugagccucggggccgagaacuccgucgccuacagcaacaacuccaucgccauccccaccaacuucacgaucagcgugaccaccgagauccugcccguguccaugaccaagacgagcgucgacugcaccauguacaucugcggcgacagcaccgagugcuccaaccugcuccugcaguacgggagcuucugcacccagcugaaccgggcgcucacgggcaucgccguggagcaggacaagaacacccaggagguguucgcccaggucaagcagaucuacaagacgcccccgaucaaggacuucgggggcuucaacuucucccagauccugcccgaccccagcaagcccuccaagcgcagcuucaucgaggaccuccuguucaacaaggugacccuggccgacgccggcuucaucaagcaguacggggacugccugggcgacaucgcggcccgggaccucaucugcgcccagaaguucaacgggcugaccgugcugccgccccuccugaccgacgagaugaucgcccaguacaccuccgcccugcucgcgggcaccaucacgagcggguggaccuucggcgccggcgccgcccugcagauccccuucgcgaugcagauggccuaccgcuucaacgggaucggcgucacccagaacgugcuguacgagaaccagaagcucaucgccaaccaguucaacuccgccaucgggaagauccaggacagccuguccagcaccgccuccgcgcugggcaagcuccaggacguggucaaccagaacgcccaggcccugaacacgcuggugaagcagcucagcuccaacuucggggccaucagcuccgugcugaacgacauccugagccggcucgacaaggucgaggccgaggugcagaucgaccgccugaucaccggccggcugcagucccuccagaccuacgugacccagcagcugauccgcgcggccgagauccgggccagcgccaaccuggccgcgaccaagaugagcgagugcguccucggccaguccaagcgcguggacuucugcgggaagggcuaccaccugaugagcuucccccaguccgccccgcacgggguggucuuccugcacgugacguacguccccgcccaggagaagaacuucaccaccgcccccgcgaucugccacgacggcaaggcccacuucccccgggaggggguguucgugagcaacggcacccacugguucgucacgcagcgcaacuucuacgagccgcagaucaucaccaccgacaacaccuucguguccggcaacugcgacguggucaucgggaucgugaacaacacgguguacgacccccuccagcccgagcuggacagcuucaaggaggagcuggacaaguacuucaagaaccacaccucccccgacgucgaccucggcgacaucagcgggaucaacgccuccguggugaacauccagaaggagaucgaccggcugaacgaggucgccaagaaccugaacgagagccucaucgaccugcaggagcugggcaaguacgagcaguacaucaaguggccgugguacaucuggcucggcuucaucgccgggcugaucgcgaucgugauggugaccaucaugcugugcugcaugaccuccugcugcagcugccucaagggcugcugcuccugcgggagcugcugcaaguucgacgaggacgacuccgagcccguccugaagggcgugaagcugcacuacacguga

SEQ ID NO: 23005 - RNA, 3822 nt, Artificial Sequence
  SARS-CoV-2/Wuhan/WIV05/2019__EPI_ISL_402128 spike protein CDS gc (1-1273)
auguucguguuccuggugcugcugccccuggugagcagccagugcgugaaccugaccacccggacccagcugccaccagccuacaccaacagcuucacccggggcgucuacuaccccgacaagguguuccggagcagcguccugcacagcacccaggaccuguuccugcccuucuucagcaacgugaccugguuccacgccauccacgugagcggcaccaacggcaccaagcgguucgacaaccccgugcugcccuucaacgacggcguguacuucgccagcaccgagaagagcaacaucauccggggcuggaucuucggcaccacccuggacagcaagacccagagccugcugaucgugaauaacgccaccaacguggugaucaaggugugcgaguuccaguucugcaacgaccccuuccugggcguguacuaccacaagaacaacaagagcuggauggagagcgaguuccggguguacagcagcgccaacaacugcaccuucgaguacgugagccagcccuuccugauggaccuggagggcaagcagggcaacuucaagaaccugcgggaguucguguucaagaacaucgacggcuacuucaagaucuacagcaagcacaccccaaucaaccuggugcgggaucugccccagggcuucucagcccuggagccccugguggaccugcccaucggcaucaacaucacccgguuccagacccugcuggcccugcaccggagcuaccugaccccaggcgacagcagcagcggguggacagcaggcgcggcugcuuacuacgugggcuaccugcagccccggaccuuccugcugaaguacaacgagaacggcaccaucaccgacgccguggacugcgcccuggacccucugagcgagaccaagugcacccugaagagcuucaccguggagaagggcaucuaccagaccagcaacuuccgggugcagcccaccgagagcaucgugcgguuccccaacaucaccaaccugugccccuucggcgagguguucaacgccacccgguucgccagcguguacgccuggaaccggaagcggaucagcaacugcguggccgacuacagcgugcuguacaacagcgccagcuucagcaccuucaagugcuacggcgugagccccaccaagcugaacgaccugugcuucaccaacguguacgccgacagcuucgugauccguggcgacgaggugcggcagaucgcacccggccagacaggcaagaucgccgacuacaacuacaagcugcccgacgacuucaccggcugcgugaucgccuggaacagcaacaaccucgacagcaaggugggcggcaacuacaacuaccuguaccggcuguuccggaagagcaaccugaagcccuucgagcgggacaucagcaccgagaucuaccaagccggcuccaccccuugcaacggcguggagggcuucaacugcuacuucccucugcagagcuacggcuuccagcccaccaacggcgugggcuaccagcccuaccgggugguggugcugagcuucgagcugcugcacgccccagccaccguguguggccccaagaagagcaccaaccuggugaagaacaagugcgugaacuucaacuucaacggccuuaccggcaccggcgugcugaccgagagcaacaagaaauuccugcccuuucagcaguucggccgggacaucgccgacaccaccgacgcugugcgggauccccagacccuggagauccuggacaucaccccuugcagcuucggcggcgugagcgugaucaccccaggcaccaacaccagcaaccagguggccgugcuguaccaggacgugaacugcaccgaggugcccguggccauccacgccgaccagcugacacccaccuggcgggucuacagcaccggcagcaacguguuccagacccgggccgguugccugaucggcgccgagcacgugaacaacagcuacgagugcgacauccccaucggcgccggcaucugugccagcuaccagacccagaccaauucaccccggagggcaaggagcguggccagccagagcaucaucgccuacaccaugagccugggcgccgagaacagcguggccuacagcaacaacagcaucgccauccccaccaacuucaccaucagcgugaccaccgagauucugcccgugagcaugaccaagaccagcguggacugcaccauguacaucugcggcgacagcaccgagugcagcaaccugcugcugcaguacggcagcuucugcacccagcugaaccgggcccugaccggcaucgccguggagcaggacaagaacacccaggagguguucgcccaggugaagcagaucuacaagaccccucccaucaaggacuucggcggcuucaacuucagccagauccugcccgaccccagcaagcccagcaagcggagcuucaucgaggaccugcuguucaacaaggugacccuagccgacgccggcuucaucaagcaguacggcgacugccucggcgacauagccgcccgggaccugaucugcgcccagaaguucaacggccugaccgugcugccuccccugcugaccgacgagaugaucgcccaguacaccagcgcccuguuagccggaaccaucaccagcggcuggacuuucggcgcuggagccgcucugcagauccccuucgccaugcagauggccuaccgguucaacggcaucggcgugacccagaacgugcuguacgagaaccagaagcugaucgccaaccaguucaacagcgccaucggcaagauccaggacagccugagcagcaccgcuagcgcccugggcaagcugcaggacguggugaaccagaacgcccaggcccugaacacccuggugaagcagcugagcagcaacuucggcgccaucagcagcgugcugaacgacauccugagccggcuggacaaggucgaggccgaggugcagaucgaccggcugaucacuggccggcugcagagccugcagaccuacgugacccagcagcugauccgggccgccgagauucgggccagcgccaaccuggccgccaccaagaugagcgagugcgugcugggccagagcaagcggguggacuucugcggcaagggcuaccaccugaugagcuuuccccagagcgcaccccacggagugguguuccugcacgugaccuacgugcccgcccaggagaagaacuucaccaccgccccagccaucugccacgacggcaaggcccacuuuccccgggagggcguguucgugagcaacggcacccacugguucgugacccagcggaacuucuacgagccccagaucaucaccaccgacaacaccuucgugagcggcaacugcgacguggugaucggcaucgugaacaacaccguguacgauccccugcagcccgagcuggacagcuucaaggaggagcuggacaaguacuucaagaaucacaccagccccgacguggaccugggcgacaucagcggcaucaacgccagcguggugaacauccagaaggagaucgaucggcugaacgagguggccaagaaccugaacgagagccugaucgaccugcaggagcugggcaaguacgagcaguacaucaaguggcccugguacaucuggcugggcuucaucgccggccugaucgccaucgugauggugaccaucaugcugugcugcaugaccagcugcugcagcugccugaagggcuguugcagcugcggcagcugcugcaaguucgacgaggacgacagcgagcccgugcugaagggcgugaagcugcacuacaccuga

SEQ ID NO: 23006 - RNA, 3822 nt, Artificial Sequence
  SARS-CoV-2/Wuhan/WIV05/2019__EPI_ISL_402128 spike protein CDS gc (1-1273)(D614G)
auguucguguuccuggugcugcugccccuggugagcagccagugcgugaaccugaccacccggacccagcugccaccagccuacaccaacagcuucacccggggcgucuacuaccccgacaagguguuccggagcagcguccugcacagcacccaggaccuguuccugcccuucuucagcaacgugaccugguuccacgccauccacgugagcggcaccaacggcaccaagcgguucgacaaccccgugcugcccuucaacgacggcguguacuucgccagcaccgagaagagcaacaucauccggggcuggaucuucggcaccacccuggacagcaagacccagagccugcugaucgugaauaacgccaccaacguggugaucaaggugugcgaguuccaguucugcaacgaccccuuccugggcguguacuaccacaagaacaacaagagcuggauggagagcgaguuccggguguacagcagcgccaacaacugcaccuucgaguacgugagccagcccuuccugauggaccuggagggcaagcagggcaacuucaagaaccugcgggaguucguguucaagaacaucgacggcuacuucaagaucuacagcaagcacaccccaaucaaccuggugcgggaucugccccagggcuucucagcccuggagccccugguggaccugcccaucggcaucaacaucacccgguuccagacccugcuggcccugcaccggagcuaccugaccccaggcgacagcagcagcggguggacagcaggcgcggcugcuuacuacgugggcuaccugcagccccggaccuuccugcugaaguacaacgagaacggcaccaucaccgacgccguggacugcgcccuggacccucugagcgagaccaagugcacccugaagagcuucaccguggagaagggcaucuaccagaccagcaacuuccgggugcagcccaccgagagcaucgugcgguuccccaacaucaccaaccugugccccuucggcgagguguucaacgccacccgguucgccagcguguacgccuggaaccggaagcggaucagcaacugcguggccgacuacagcgugcuguacaacagcgccagcuucagcaccuucaagugcuacggcgugagccccaccaagcugaacgaccugugcuucaccaacguguacgccgacagcuucgugauccguggcgacgaggugcggcagaucgcacccggccagacaggcaagaucgccgacuacaacuacaagcugcccgacgacuucaccggcugcgugaucgccuggaacagcaacaaccucgacagcaaggugggcggcaacuacaacuaccuguaccggcuguuccggaagagcaaccugaagcccuucgagcgggacaucagcaccgagaucuaccaagccggcuccaccccuugcaacggcguggagggcuucaacugcuacuucccucugcagagcuacggcuuccagcccaccaacggcgugggcuaccagcccuaccgggugguggugcugagcuucgagcugcugcacgccccagccaccguguguggccccaagaagagcaccaaccuggugaagaacaagugcgugaacuucaacuucaacggccuuaccggcaccggcgugcugaccgagagcaacaagaaauuccugcccuuucagcaguucggccgggacaucgccgacaccaccgacgcugugcgggauccccagacccuggagauccuggacaucaccccuugcagcuucggcggcgugagcgugaucaccccaggcaccaacaccagcaaccagguggccgugcuguaccagggcgugaacugcaccgaggugcccguggccauccacgccgaccagcugacacccaccuggcgggucuacagcaccggcagcaacguguuccagacccgggccgguugccugaucggcgccgagcacgugaacaacagcuacgagugcgacauccccaucggcgccggcaucugugccagcuaccagacccagaccaauucaccccggagggcaaggagcguggccagccagagcaucaucgccuacaccaugagccugggcgccgagaacagcguggccuacagcaacaacagcaucgccauccccaccaacuucaccaucagcgugaccaccgagauucugcccgugagcaugaccaagaccagcguggacugcaccauguacaucugcggcgacagcaccgagugcagcaaccugcugcugcaguacggcagcuucugcacccagcugaaccgggcccugaccggcaucgccguggagcaggacaagaacacccaggagguguucgcccaggugaagcagaucuacaagaccccucccaucaaggacuucggcggcuucaacuucagccagauccugcccgaccccagcaagcccagcaagcggagcuucaucgaggaccugcuguucaacaaggugacccuagccgacgccggcuucaucaagcaguacggcgacugccucggcgacauagccgcccgggaccugaucugcgcccagaaguucaacggccugaccgugcugccuccccugcugaccgacgagaugaucgcccaguacaccagcgcccuguuagccggaaccaucaccagcggcuggacuuucggcgcuggagccgcucugcagauccccuucgccaugcagauggccuaccgguucaacggcaucggcgugacccagaacgugcuguacgagaaccagaagcugaucgccaaccaguucaacagcgccaucggcaagauccaggacagccugagcagcaccgcuagcgcccugggcaagcugcaggacguggugaaccagaacgcccaggcccugaacacccuggugaagcagcugagcagcaacuucggcgccaucagcagcgugcugaacgacauccugagccggcuggacaaggucgaggccgaggugcagaucgaccggcugaucacuggccggcugcagagccugcagaccuacgugacccagcagcugauccgggccgccgagauucgggccagcgccaaccuggccgccaccaagaugagcgagugcgugcugggccagagcaagcggguggacuucugcggcaagggcuaccaccugaugagcuuuccccagagcgcaccccacggagugguguuccugcacgugaccuacgugcccgcccaggagaagaacuucaccaccgccccagccaucugccacgacggcaaggcccacuuuccccgggagggcguguucgugagcaacggcacccacugguucgugacccagcggaacuucuacgagccccagaucaucaccaccgacaacaccuucgugagcggcaacugcgacguggugaucggcaucgugaacaacaccguguacgauccccugcagcccgagcuggacagcuucaaggaggagcuggacaaguacuucaagaaucacaccagccccgacguggaccugggcgacaucagcggcaucaacgccagcguggugaacauccagaaggagaucgaucggcugaacgagguggccaagaaccugaacgagagccugaucgaccugcaggagcugggcaaguacgagcaguacaucaaguggcccugguacaucuggcugggcuucaucgccggccugaucgccaucgugauggugaccaucaugcugugcugcaugaccagcugcugcagcugccugaagggcuguugcagcugcggcagcugcugcaaguucgacgaggacgacagcgagcccgugcugaagggcgugaagcugcacuacaccuga

SEQ ID NO: 23007 - RNA, 3822 nt, Artificial Sequence
  SARS-CoV-2/Wuhan/WIV05/2019__EPI_ISL_402128 spike protein CDS gc (1-1273)(A222V_D614G)
auguucguguuccuggugcugcugccccuggugagcagccagugcgugaaccugaccacccggacccagcugccaccagccuacaccaacagcuucacccggggcgucuacuaccccgacaagguguuccggagcagcguccugcacagcacccaggaccuguuccugcccuucuucagcaacgugaccugguuccacgccauccacgugagcggcaccaacggcaccaagcgguucgacaaccccgugcugcccuucaacgacggcguguacuucgccagcaccgagaagagcaacaucauccggggcuggaucuucggcaccacccuggacagcaagacccagagccugcugaucgugaauaacgccaccaacguggugaucaaggugugcgaguuccaguucugcaacgaccccuuccugggcguguacuaccacaagaacaacaagagcuggauggagagcgaguuccggguguacagcagcgccaacaacugcaccuucgaguacgugagccagcccuuccugauggaccuggagggcaagcagggcaacuucaagaaccugcgggaguucguguucaagaacaucgacggcuacuucaagaucuacagcaagcacaccccaaucaaccuggugcgggaucugccccagggcuucucagugcuggagccccugguggaccugcccaucggcaucaacaucacccgguuccagacccugcuggcccugcaccggagcuaccugaccccaggcgacagcagcagcggguggacagcaggcgcggcugcuuacuacgugggcuaccugcagccccggaccuuccugcugaaguacaacgagaacggcaccaucaccgacgccguggacugcgcccuggacccucugagcgagaccaagugcacccugaagagcuucaccguggagaagggcaucuaccagaccagcaacuuccgggugcagcccaccgagagcaucgugcgguuccccaacaucaccaaccugugccccuucggcgagguguucaacgccacccgguucgccagcguguacgccuggaaccggaagcggaucagcaacugcguggccgacuacagcgugcuguacaacagcgccagcuucagcaccuucaagugcuacggcgugagccccaccaagcugaacgaccugugcuucaccaacguguacgccgacagcuucgugauccguggcgacgaggugcggcagaucgcacccggccagacaggcaagaucgccgacuacaacuacaagcugcccgacgacuucaccggcugcgugaucgccuggaacagcaacaaccucgacagcaaggugggcggcaacuacaacuaccuguaccggcuguuccggaagagcaaccugaagcccuucgagcgggacaucagcaccgagaucuaccaagccggcuccaccccuugcaacggcguggagggcuucaacugcuacuucccucugcagagcuacggcuuccagcccaccaacggcgugggcuaccagcccuaccgggugguggugcugagcuucgagcugcugcacgccccagccaccguguguggccccaagaagagcaccaaccuggugaagaacaagugcgugaacuucaacuucaacggccuuaccggcaccggcgugcugaccgagagcaacaagaaauuccugcccuuucagcaguucggccgggacaucgccgacaccaccgacgcugugcgggauccccagacccuggagauccuggacaucaccccuugcagcuucggcggcgugagcgugaucaccccaggcaccaacaccagcaaccagguggccgugcuguaccagggcgugaacugcaccgaggugcccguggccauccacgccgaccagcugacacccaccuggcgggucuacagcaccggcagcaacguguuccagacccgggccgguugccugaucggcgccgagcacgugaacaacagcuacgagugcgacauccccaucggcgccggcaucugugccagcuaccagacccagaccaauucaccccggagggcaaggagcguggccagccagagcaucaucgccuacaccaugagccugggcgccgagaacagcguggccuacagcaacaacagcaucgccauccccaccaacuucaccaucagcgugaccaccgagauucugcccgugagcaugaccaagaccagcguggacugcaccauguacaucugcggcgacagcaccgagugcagcaaccugcugcugcaguacggcagcuucugcacccagcugaaccgggcccugaccggcaucgccguggagcaggacaagaacacccaggagguguucgcccaggugaagcagaucuacaagaccccucccaucaaggacuucggcggcuucaacuucagccagauccugcccgaccccagcaagcccagcaagcggagcuucaucgaggaccugcuguucaacaaggugacccuagccgacgccggcuucaucaagcaguacggcgacugccucggcgacauagccgcccgggaccugaucugcgcccagaaguucaacggccugaccgugcugccuccccugcugaccgacgagaugaucgcccaguacaccagcgcccuguuagccggaaccaucaccagcggcuggacuuucggcgcuggagccgcucugcagauccccuucgccaugcagauggccuaccgguucaacggcaucggcgugacccagaacgugcuguacgagaaccagaagcugaucgccaaccaguucaacagcgccaucggcaagauccaggacagccugagcagcaccgcuagcgcccugggcaagcugcaggacguggugaaccagaacgcccaggcccugaacacccuggugaagcagcugagcagcaacuucggcgccaucagcagcgugcugaacgacauccugagccggcuggacaaggucgaggccgaggugcagaucgaccggcugaucacuggccggcugcagagccugcagaccuacgugacccagcagcugauccgggccgccgagauucgggccagcgccaaccuggccgccaccaagaugagcgagugcgugcugggccagagcaagcggguggacuucugcggcaagggcuaccaccugaugagcuuuccccagagcgcaccccacggagugguguuccugcacgugaccuacgugcccgcccaggagaagaacuucaccaccgccccagccaucugccacgacggcaaggcccacuuuccccgggagggcguguucgugagcaacggcacccacugguucgugacccagcggaacuucuacgagccccagaucaucaccaccgacaacaccuucgugagcggcaacugcgacguggugaucggcaucgugaacaacaccguguacgauccccugcagcccgagcuggacagcuucaaggaggagcuggacaaguacuucaagaaucacaccagccccgacguggaccugggcgacaucagcggcaucaacgccagcguggugaacauccagaaggagaucgaucggcugaacgagguggccaagaaccugaacgagagccugaucgaccugcaggagcugggcaaguacgagcaguacaucaaguggcccugguacaucuggcugggcuucaucgccggccugaucgccaucgugauggugaccaucaugcugugcugcaugaccagcugcugcagcugccugaagggcuguugcagcugcggcagcugcugcaaguucgacgaggacgacagcgagcccgugcugaagggcgugaagcugcacuacaccuga

SEQ ID NO: 23008 - RNA, 3822 nt, Artificial Sequence
  SARS-CoV-2/Wuhan/WIV05/2019__EPI_ISL_402128 spike protein CDS gc (1-1273)(N439K_D614G)
auguucguguuccuggugcugcugccccuggugagcagccagugcgugaaccugaccacccggacccagcugccaccagccuacaccaacagcuucacccggggcgucuacuaccccgacaagguguuccggagcagcguccugcacagcacccaggaccuguuccugcccuucuucagcaacgugaccugguuccacgccauccacgugagcggcaccaacggcaccaagcgguucgacaaccccgugcugcccuucaacgacggcguguacuucgccagcaccgagaagagcaacaucauccggggcuggaucuucggcaccacccuggacagcaagacccagagccugcugaucgugaauaacgccaccaacguggugaucaaggugugcgaguuccaguucugcaacgaccccuuccugggcguguacuaccacaagaacaacaagagcuggauggagagcgaguuccggguguacagcagcgccaacaacugcaccuucgaguacgugagccagcccuuccugauggaccuggagggcaagcagggcaacuucaagaaccugcgggaguucguguucaagaacaucgacggcuacuucaagaucuacagcaagcacaccccaaucaaccuggugcgggaucugccccagggcuucucagcccuggagccccugguggaccugcccaucggcaucaacaucacccgguuccagacccugcuggcccugcaccggagcuaccugaccccaggcgacagcagcagcggguggacagcaggcgcggcugcuuacuacgugggcuaccugcagccccggaccuuccugcugaaguacaacgagaacggcaccaucaccgacgccguggacugcgcccuggacccucugagcgagaccaagugcacccugaagagcuucaccguggagaagggcaucuaccagaccagcaacuuccgggugcagcccaccgagagcaucgugcgguuccccaacaucaccaaccugugccccuucggcgagguguucaacgccacccgguucgccagcguguacgccuggaaccggaagcggaucagcaacugcguggccgacuacagcgugcuguacaacagcgccagcuucagcaccuucaagugcuacggcgugagccccaccaagcugaacgaccugugcuucaccaacguguacgccgacagcuucgugauccguggcgacgaggugcggcagaucgcacccggccagacaggcaagaucgccgacuacaacuacaagcugcccgacgacuucaccggcugcgugaucgccuggaacagcaagaaccucgacagcaaggugggcggcaacuacaacuaccuguaccggcuguuccggaagagcaaccugaagcccuucgagcgggacaucagcaccgagaucuaccaagccggcuccaccccuugcaacggcguggagggcuucaacugcuacuucccucugcagagcuacggcuuccagcccaccaacggcgugggcuaccagcccuaccgggugguggugcugagcuucgagcugcugcacgccccagccaccguguguggccccaagaagagcaccaaccuggugaagaacaagugcgugaacuucaacuucaacggccuuaccggcaccggcgugcugaccgagagcaacaagaaauuccugcccuuucagcaguucggccgggacaucgccgacaccaccgacgcugugcgggauccccagacccuggagauccuggacaucaccccuugcagcuucggcggcgugagcgugaucaccccaggcaccaacaccagcaaccagguggccgugcuguaccagggcgugaacugcaccgaggugcccguggccauccacgccgaccagcugacacccaccuggcgggucuacagcaccggcagcaacguguuccagacccgggccgguugccugaucggcgccgagcacgugaacaacagcuacgagugcgacauccccaucggcgccggcaucugugccagcuaccagacccagaccaauucaccccggagggcaaggagcguggccagccagagcaucaucgccuacaccaugagccugggcgccgagaacagcguggccuacagcaacaacagcaucgccauccccaccaacuucaccaucagcgugaccaccgagauucugcccgugagcaugaccaagaccagcguggacugcaccauguacaucugcggcgacagcaccgagugcagcaaccugcugcugcaguacggcagcuucugcacccagcugaaccgggcccugaccggcaucgccguggagcaggacaagaacacccaggagguguucgcccaggugaagcagaucuacaagaccccucccaucaaggacuucggcggcuucaacuucagccagauccugcccgaccccagcaagcccagcaagcggagcuucaucgaggaccugcuguucaacaaggugacccuagccgacgccggcuucaucaagcaguacggcgacugccucggcgacauagccgcccgggaccugaucugcgcccagaaguucaacggccugaccgugcugccuccccugcugaccgacgagaugaucgcccaguacaccagcgcccuguuagccggaaccaucaccagcggcuggacuuucggcgcuggagccgcucugcagauccccuucgccaugcagauggccuaccgguucaacggcaucggcgugacccagaacgugcuguacgagaaccagaagcugaucgccaaccaguucaacagcgccaucggcaagauccaggacagccugagcagcaccgcuagcgcccugggcaagcugcaggacguggugaaccagaacgcccaggcccugaacacccuggugaagcagcugagcagcaacuucggcgccaucagcagcgugcugaacgacauccugagccggcuggacaaggucgaggccgaggugcagaucgaccggcugaucacuggccggcugcagagccugcagaccuacgugacccagcagcugauccgggccgccgagauucgggccagcgccaaccuggccgccaccaagaugagcgagugcgugcugggccagagcaagcggguggacuucugcggcaagggcuaccaccugaugagcuuuccccagagcgcaccccacggagugguguuccugcacgugaccuacgugcccgcccaggagaagaacuucaccaccgccccagccaucugccacgacggcaaggcccacuuuccccgggagggcguguucgugagcaacggcacccacugguucgugacccagcggaacuucuacgagccccagaucaucaccaccgacaacaccuucgugagcggcaacugcgacguggugaucggcaucgugaacaacaccguguacgauccccugcagcccgagcuggacagcuucaaggaggagcuggacaaguacuucaagaaucacaccagccccgacguggaccugggcgacaucagcggcaucaacgccagcguggugaacauccagaaggagaucgaucggcugaacgagguggccaagaaccugaacgagagccugaucgaccugcaggagcugggcaaguacgagcaguacaucaaguggcccugguacaucuggcugggcuucaucgccggccugaucgccaucgugauggugaccaucaugcugugcugcaugaccagcugcugcagcugccugaagggcuguugcagcugcggcagcugcugcaaguucgacgaggacgacagcgagcccgugcugaagggcgugaagcugcacuacaccuga

SEQ ID NO: 23009 - RNA, 3822 nt, Artificial Sequence
  SARS-CoV-2/Wuhan/WIV05/2019__EPI_ISL_402128 spike protein CDS gc (1-1273)(S477N_D614G)
auguucguguuccuggugcugcugccccuggugagcagccagugcgugaaccugaccacccggacccagcugccaccagccuacaccaacagcuucacccggggcgucuacuaccccgacaagguguuccggagcagcguccugcacagcacccaggaccuguuccugcccuucuucagcaacgugaccugguuccacgccauccacgugagcggcaccaacggcaccaagcgguucgacaaccccgugcugcccuucaacgacggcguguacuucgccagcaccgagaagagcaacaucauccggggcuggaucuucggcaccacccuggacagcaagacccagagccugcugaucgugaauaacgccaccaacguggugaucaaggugugcgaguuccaguucugcaacgaccccuuccugggcguguacuaccacaagaacaacaagagcuggauggagagcgaguuccggguguacagcagcgccaacaacugcaccuucgaguacgugagccagcccuuccugauggaccuggagggcaagcagggcaacuucaagaaccugcgggaguucguguucaagaacaucgacggcuacuucaagaucuacagcaagcacaccccaaucaaccuggugcgggaucugccccagggcuucucagcccuggagccccugguggaccugcccaucggcaucaacaucacccgguuccagacccugcuggcccugcaccggagcuaccugaccccaggcgacagcagcagcggguggacagcaggcgcggcugcuuacuacgugggcuaccugcagccccggaccuuccugcugaaguacaacgagaacggcaccaucaccgacgccguggacugcgcccuggacccucugagcgagaccaagugcacccugaagagcuucaccguggagaagggcaucuaccagaccagcaacuuccgggugcagcccaccgagagcaucgugcgguuccccaacaucaccaaccugugccccuucggcgagguguucaacgccacccgguucgccagcguguacgccuggaaccggaagcggaucagcaacugcguggccgacuacagcgugcuguacaacagcgccagcuucagcaccuucaagugcuacggcgugagccccaccaagcugaacgaccugugcuucaccaacguguacgccgacagcuucgugauccguggcgacgaggugcggcagaucgcacccggccagacaggcaagaucgccgacuacaacuacaagcugcccgacgacuucaccggcugcgugaucgccuggaacagcaacaaccucgacagcaaggugggcggcaacuacaacuaccuguaccggcuguuccggaagagcaaccugaagcccuucgagcgggacaucagcaccgagaucuaccaagccggcaacaccccuugcaacggcguggagggcuucaacugcuacuucccucugcagagcuacggcuuccagcccaccaacggcgugggcuaccagcccuaccgggugguggugcugagcuucgagcugcugcacgccccagccaccguguguggccccaagaagagcaccaaccuggugaagaacaagugcgugaacuucaacuucaacggccuuaccggcaccggcgugcugaccgagagcaacaagaaauuccugcccuuucagcaguucggccgggacaucgccgacaccaccgacgcugugcgggauccccagacccuggagauccuggacaucaccccuugcagcuucggcggcgugagcgugaucaccccaggcaccaacaccagcaaccagguggccgugcuguaccagggcgugaacugcaccgaggugcccguggccauccacgccgaccagcugacacccaccuggcgggucuacagcaccggcagcaacguguuccagacccgggccgguugccugaucggcgccgagcacgugaacaacagcuacgagugcgacauccccaucggcgccggcaucugugccagcuaccagacccagaccaauucaccccggagggcaaggagcguggccagccagagcaucaucgccuacaccaugagccugggcgccgagaacagcguggccuacagcaacaacagcaucgccauccccaccaacuucaccaucagcgugaccaccgagauucugcccgugagcaugaccaagaccagcguggacugcaccauguacaucugcggcgacagcaccgagugcagcaaccugcugcugcaguacggcagcuucugcacccagcugaaccgggcccugaccggcaucgccguggagcaggacaagaacacccaggagguguucgcccaggugaagcagaucuacaagaccccucccaucaaggacuucggcggcuucaacuucagccagauccugcccgaccccagcaagcccagcaagcggagcuucaucgaggaccugcuguucaacaaggugacccuagccgacgccggcuucaucaagcaguacggcgacugccucggcgacauagccgcccgggaccugaucugcgcccagaaguucaacggccugaccgugcugccuccccugcugaccgacgagaugaucgcccaguacaccagcgcccuguuagccggaaccaucaccagcggcuggacuuucggcgcuggagccgcucugcagauccccuucgccaugcagauggccuaccgguucaacggcaucggcgugacccagaacgugcuguacgagaaccagaagcugaucgccaaccaguucaacagcgccaucggcaagauccaggacagccugagcagcaccgcuagcgcccugggcaagcugcaggacguggugaaccagaacgcccaggcccugaacacccuggugaagcagcugagcagcaacuucggcgccaucagcagcgugcugaacgacauccugagccggcuggacaaggucgaggccgaggugcagaucgaccggcugaucacuggccggcugcagagccugcagaccuacgugacccagcagcugauccgggccgccgagauucgggccagcgccaaccuggccgccaccaagaugagcgagugcgugcugggccagagcaagcggguggacuucugcggcaagggcuaccaccugaugagcuuuccccagagcgcaccccacggagugguguuccugcacgugaccuacgugcccgcccaggagaagaacuucaccaccgccccagccaucugccacgacggcaaggcccacuuuccccgggagggcguguucgugagcaacggcacccacugguucgugacccagcggaacuucuacgagccccagaucaucaccaccgacaacaccuucgugagcggcaacugcgacguggugaucggcaucgugaacaacaccguguacgauccccugcagcccgagcuggacagcuucaaggaggagcuggacaaguacuucaagaaucacaccagccccgacguggaccugggcgacaucagcggcaucaacgccagcguggugaacauccagaaggagaucgaucggcugaacgagguggccaagaaccugaacgagagccugaucgaccugcaggagcugggcaaguacgagcaguacaucaaguggcccugguacaucuggcugggcuucaucgccggccugaucgccaucgugauggugaccaucaugcugugcugcaugaccagcugcugcagcugccugaagggcuguugcagcugcggcagcugcugcaaguucgacgaggacgacagcgagcccgugcugaagggcgugaagcugcacuacaccuga

SEQ ID NO: 23010 - RNA, 3822 nt, Artificial Sequence
  SARS-CoV-2/Wuhan/WIV05/2019__EPI_ISL_402128 spike protein CDS gc (1-1273)(N501Y_D614G)
auguucguguuccuggugcugcugccccuggugagcagccagugcgugaaccugaccacccggacccagcugccaccagccuacaccaacagcuucacccggggcgucuacuaccccgacaagguguuccggagcagcguccugcacagcacccaggaccuguuccugcccuucuucagcaacgugaccugguuccacgccauccacgugagcggcaccaacggcaccaagcgguucgacaaccccgugcugcccuucaacgacggcguguacuucgccagcaccgagaagagcaacaucauccggggcuggaucuucggcaccacccuggacagcaagacccagagccugcugaucgugaauaacgccaccaacguggugaucaaggugugcgaguuccaguucugcaacgaccccuuccugggcguguacuaccacaagaacaacaagagcuggauggagagcgaguuccggguguacagcagcgccaacaacugcaccuucgaguacgugagccagcccuuccugauggaccuggagggcaagcagggcaacuucaagaaccugcgggaguucguguucaagaacaucgacggcuacuucaagaucuacagcaagcacaccccaaucaaccuggugcgggaucugccccagggcuucucagcccuggagccccugguggaccugcccaucggcaucaacaucacccgguuccagacccugcuggcccugcaccggagcuaccugaccccaggcgacagcagcagcggguggacagcaggcgcggcugcuuacuacgugggcuaccugcagccccggaccuuccugcugaaguacaacgagaacggcaccaucaccgacgccguggacugcgcccuggacccucugagcgagaccaagugcacccugaagagcuucaccguggagaagggcaucuaccagaccagcaacuuccgggugcagcccaccgagagcaucgugcgguuccccaacaucaccaaccugugccccuucggcgagguguucaacgccacccgguucgccagcguguacgccuggaaccggaagcggaucagcaacugcguggccgacuacagcgugcuguacaacagcgccagcuucagcaccuucaagugcuacggcgugagccccaccaagcugaacgaccugugcuucaccaacguguacgccgacagcuucgugauccguggcgacgaggugcggcagaucgcacccggccagacaggcaagaucgccgacuacaacuacaagcugcccgacgacuucaccggcugcgugaucgccuggaacagcaacaaccucgacagcaaggugggcggcaacuacaacuaccuguaccggcuguuccggaagagcaaccugaagcccuucgagcgggacaucagcaccgagaucuaccaagccggcuccaccccuugcaacggcguggagggcuucaacugcuacuucccucugcagagcuacggcuuccagcccaccuacggcgugggcuaccagcccuaccgggugguggugcugagcuucgagcugcugcacgccccagccaccguguguggccccaagaagagcaccaaccuggugaagaacaagugcgugaacuucaacuucaacggccuuaccggcaccggcgugcugaccgagagcaacaagaaauuccugcccuuucagcaguucggccgggacaucgccgacaccaccgacgcugugcgggauccccagacccuggagauccuggacaucaccccuugcagcuucggcggcgugagcgugaucaccccaggcaccaacaccagcaaccagguggccgugcuguaccagggcgugaacugcaccgaggugcccguggccauccacgccgaccagcugacacccaccuggcgggucuacagcaccggcagcaacguguuccagacccgggccgguugccugaucggcgccgagcacgugaacaacagcuacgagugcgacauccccaucggcgccggcaucugugccagcuaccagacccagaccaauucaccccggagggcaaggagcguggccagccagagcaucaucgccuacaccaugagccugggcgccgagaacagcguggccuacagcaacaacagcaucgccauccccaccaacuucaccaucagcgugaccaccgagauucugcccgugagcaugaccaagaccagcguggacugcaccauguacaucugcggcgacagcaccgagugcagcaaccugcugcugcaguacggcagcuucugcacccagcugaaccgggcccugaccggcaucgccguggagcaggacaagaacacccaggagguguucgcccaggugaagcagaucuacaagaccccucccaucaaggacuucggcggcuucaacuucagccagauccugcccgaccccagcaagcccagcaagcggagcuucaucgaggaccugcuguucaacaaggugacccuagccgacgccggcuucaucaagcaguacggcgacugccucggcgacauagccgcccgggaccugaucugcgcccagaaguucaacggccugaccgugcugccuccccugcugaccgacgagaugaucgcccaguacaccagcgcccuguuagccggaaccaucaccagcggcuggacuuucggcgcuggagccgcucugcagauccccuucgccaugcagauggccuaccgguucaacggcaucggcgugacccagaacgugcuguacgagaaccagaagcugaucgccaaccaguucaacagcgccaucggcaagauccaggacagccugagcagcaccgcuagcgcccugggcaagcugcaggacguggugaaccagaacgcccaggcccugaacacccuggugaagcagcugagcagcaacuucggcgccaucagcagcgugcugaacgacauccugagccggcuggacaaggucgaggccgaggugcagaucgaccggcugaucacuggccggcugcagagccugcagaccuacgugacccagcagcugauccgggccgccgagauucgggccagcgccaaccuggccgccaccaagaugagcgagugcgugcugggccagagcaagcggguggacuucugcggcaagggcuaccaccugaugagcuuuccccagagcgcaccccacggagugguguuccugcacgugaccuacgugcccgcccaggagaagaacuucaccaccgccccagccaucugccacgacggcaaggcccacuuuccccgggagggcguguucgugagcaacggcacccacugguucgugacccagcggaacuucuacgagccccagaucaucaccaccgacaacaccuucgugagcggcaacugcgacguggugaucggcaucgugaacaacaccguguacgauccccugcagcccgagcuggacagcuucaaggaggagcuggacaaguacuucaagaaucacaccagccccgacguggaccugggcgacaucagcggcaucaacgccagcguggugaacauccagaaggagaucgaucggcugaacgagguggccaagaaccugaacgagagccugaucgaccugcaggagcugggcaaguacgagcaguacaucaaguggcccugguacaucuggcugggcuucaucgccggccugaucgccaucgugauggugaccaucaugcugugcugcaugaccagcugcugcagcugccugaagggcuguugcagcugcggcagcugcugcaaguucgacgaggacgacagcgagcccgugcugaagggcgugaagcugcacuacaccuga

SEQ ID NO: 23011 - RNA, 3816 nt, Artificial Sequence
  SARS-CoV-2/Wuhan/WIV05/2019__EPI_ISL_402128 spike protein CDS gc (1-1273)(H69del_V70del_D614G)
auguucguguuccuggugcugcugccccuggugagcagccagugcgugaaccugaccacccggacccagcugccaccagccuacaccaacagcuucacccggggcgucuacuaccccgacaagguguuccggagcagcguccugcacagcacccaggaccuguuccugcccuucuucagcaacgugaccugguuccacgccaucagcggcaccaacggcaccaagcgguucgacaaccccgugcugcccuucaacgacggcguguacuucgccagcaccgagaagagcaacaucauccggggcuggaucuucggcaccacccuggacagcaagacccagagccugcugaucgugaauaacgccaccaacguggugaucaaggugugcgaguuccaguucugcaacgaccccuuccugggcguguacuaccacaagaacaacaagagcuggauggagagcgaguuccggguguacagcagcgccaacaacugcaccuucgaguacgugagccagcccuuccugauggaccuggagggcaagcagggcaacuucaagaaccugcgggaguucguguucaagaacaucgacggcuacuucaagaucuacagcaagcacaccccaaucaaccuggugcgggaucugccccagggcuucucagcccuggagccccugguggaccugcccaucggcaucaacaucacccgguuccagacccugcuggcccugcaccggagcuaccugaccccaggcgacagcagcagcggguggacagcaggcgcggcugcuuacuacgugggcuaccugcagccccggaccuuccugcugaaguacaacgagaacggcaccaucaccgacgccguggacugcgcccuggacccucugagcgagaccaagugcacccugaagagcuucaccguggagaagggcaucuaccagaccagcaacuuccgggugcagcccaccgagagcaucgugcgguuccccaacaucaccaaccugugccccuucggcgagguguucaacgccacccgguucgccagcguguacgccuggaaccggaagcggaucagcaacugcguggccgacuacagcgugcuguacaacagcgccagcuucagcaccuucaagugcuacggcgugagccccaccaagcugaacgaccugugcuucaccaacguguacgccgacagcuucgugauccguggcgacgaggugcggcagaucgcacccggccagacaggcaagaucgccgacuacaacuacaagcugcccgacgacuucaccggcugcgugaucgccuggaacagcaacaaccucgacagcaaggugggcggcaacuacaacuaccuguaccggcuguuccggaagagcaaccugaagcccuucgagcgggacaucagcaccgagaucuaccaagccggcuccaccccuugcaacggcguggagggcuucaacugcuacuucccucugcagagcuacggcuuccagcccaccaacggcgugggcuaccagcccuaccgggugguggugcugagcuucgagcugcugcacgccccagccaccguguguggccccaagaagagcaccaaccuggugaagaacaagugcgugaacuucaacuucaacggccuuaccggcaccggcgugcugaccgagagcaacaagaaauuccugcccuuucagcaguucggccgggacaucgccgacaccaccgacgcugugcgggauccccagacccuggagauccuggacaucaccccuugcagcuucggcggcgugagcgugaucaccccaggcaccaacaccagcaaccagguggccgugcuguaccagggcgugaacugcaccgaggugcccguggccauccacgccgaccagcugacacccaccuggcgggucuacagcaccggcagcaacguguuccagacccgggccgguugccugaucggcgccgagcacgugaacaacagcuacgagugcgacauccccaucggcgccggcaucugugccagcuaccagacccagaccaauucaccccggagggcaaggagcguggccagccagagcaucaucgccuacaccaugagccugggcgccgagaacagcguggccuacagcaacaacagcaucgccauccccaccaacuucaccaucagcgugaccaccgagauucugcccgugagcaugaccaagaccagcguggacugcaccauguacaucugcggcgacagcaccgagugcagcaaccugcugcugcaguacggcagcuucugcacccagcugaaccgggcccugaccggcaucgccguggagcaggacaagaacacccaggagguguucgcccaggugaagcagaucuacaagaccccucccaucaaggacuucggcggcuucaacuucagccagauccugcccgaccccagcaagcccagcaagcggagcuucaucgaggaccugcuguucaacaaggugacccuagccgacgccggcuucaucaagcaguacggcgacugccucggcgacauagccgcccgggaccugaucugcgcccagaaguucaacggccugaccgugcugccuccccugcugaccgacgagaugaucgcccaguacaccagcgcccuguuagccggaaccaucaccagcggcuggacuuucggcgcuggagccgcucugcagauccccuucgccaugcagauggccuaccgguucaacggcaucggcgugacccagaacgugcuguacgagaaccagaagcugaucgccaaccaguucaacagcgccaucggcaagauccaggacagccugagcagcaccgcuagcgcccugggcaagcugcaggacguggugaaccagaacgcccaggcccugaacacccuggugaagcagcugagcagcaacuucggcgccaucagcagcgugcugaacgacauccugagccggcuggacaaggucgaggccgaggugcagaucgaccggcugaucacuggccggcugcagagccugcagaccuacgugacccagcagcugauccgggccgccgagauucgggccagcgccaaccuggccgccaccaagaugagcgagugcgugcugggccagagcaagcggguggacuucugcggcaagggcuaccaccugaugagcuuuccccagagcgcaccccacggagugguguuccugcacgugaccuacgugcccgcccaggagaagaacuucaccaccgccccagccaucugccacgacggcaaggcccacuuuccccgggagggcguguucgugagcaacggcacccacugguucgugacccagcggaacuucuacgagccccagaucaucaccaccgacaacaccuucgugagcggcaacugcgacguggugaucggcaucgugaacaacaccguguacgauccccugcagcccgagcuggacagcuucaaggaggagcuggacaaguacuucaagaaucacaccagccccgacguggaccugggcgacaucagcggcaucaacgccagcguggugaacauccagaaggagaucgaucggcugaacgagguggccaagaaccugaacgagagccugaucgaccugcaggagcugggcaaguacgagcaguacaucaaguggcccugguacaucuggcugggcuucaucgccggccugaucgccaucgugauggugaccaucaugcugugcugcaugaccagcugcugcagcugccugaagggcuguugcagcugcggcagcugcugcaaguucgacgaggacgacagcgagcccgugcugaagggcgugaagcugcacuacaccuga

SEQ ID NO: 23012 - RNA, 3822 nt, Artificial Sequence
  SARS-CoV-2/Wuhan/WIV05/2019__EPI_ISL_402128 spike protein CDS gc (1-1273)(Y453F_D614G)
auguucguguuccuggugcugcugccccuggugagcagccagugcgugaaccugaccacccggacccagcugccaccagccuacaccaacagcuucacccggggcgucuacuaccccgacaagguguuccggagcagcguccugcacagcacccaggaccuguuccugcccuucuucagcaacgugaccugguuccacgccauccacgugagcggcaccaacggcaccaagcgguucgacaaccccgugcugcccuucaacgacggcguguacuucgccagcaccgagaagagcaacaucauccggggcuggaucuucggcaccacccuggacagcaagacccagagccugcugaucgugaauaacgccaccaacguggugaucaaggugugcgaguuccaguucugcaacgaccccuuccugggcguguacuaccacaagaacaacaagagcuggauggagagcgaguuccggguguacagcagcgccaacaacugcaccuucgaguacgugagccagcccuuccugauggaccuggagggcaagcagggcaacuucaagaaccugcgggaguucguguucaagaacaucgacggcuacuucaagaucuacagcaagcacaccccaaucaaccuggugcgggaucugccccagggcuucucagcccuggagccccugguggaccugcccaucggcaucaacaucacccgguuccagacccugcuggcccugcaccggagcuaccugaccccaggcgacagcagcagcggguggacagcaggcgcggcugcuuacuacgugggcuaccugcagccccggaccuuccugcugaaguacaacgagaacggcaccaucaccgacgccguggacugcgcccuggacccucugagcgagaccaagugcacccugaagagcuucaccguggagaagggcaucuaccagaccagcaacuuccgggugcagcccaccgagagcaucgugcgguuccccaacaucaccaaccugugccccuucggcgagguguucaacgccacccgguucgccagcguguacgccuggaaccggaagcggaucagcaacugcguggccgacuacagcgugcuguacaacagcgccagcuucagcaccuucaagugcuacggcgugagccccaccaagcugaacgaccugugcuucaccaacguguacgccgacagcuucgugauccguggcgacgaggugcggcagaucgcacccggccagacaggcaagaucgccgacuacaacuacaagcugcccgacgacuucaccggcugcgugaucgccuggaacagcaacaaccucgacagcaaggugggcggcaacuacaacuaccuguuccggcuguuccggaagagcaaccugaagcccuucgagcgggacaucagcaccgagaucuaccaagccggcuccaccccuugcaacggcguggagggcuucaacugcuacuucccucugcagagcuacggcuuccagcccaccaacggcgugggcuaccagcccuaccgggugguggugcugagcuucgagcugcugcacgccccagccaccguguguggccccaagaagagcaccaaccuggugaagaacaagugcgugaacuucaacuucaacggccuuaccggcaccggcgugcugaccgagagcaacaagaaauuccugcccuuucagcaguucggccgggacaucgccgacaccaccgacgcugugcgggauccccagacccuggagauccuggacaucaccccuugcagcuucggcggcgugagcgugaucaccccaggcaccaacaccagcaaccagguggccgugcuguaccagggcgugaacugcaccgaggugcccguggccauccacgccgaccagcugacacccaccuggcgggucuacagcaccggcagcaacguguuccagacccgggccgguugccugaucggcgccgagcacgugaacaacagcuacgagugcgacauccccaucggcgccggcaucugugccagcuaccagacccagaccaauucaccccggagggcaaggagcguggccagccagagcaucaucgccuacaccaugagccugggcgccgagaacagcguggccuacagcaacaacagcaucgccauccccaccaacuucaccaucagcgugaccaccgagauucugcccgugagcaugaccaagaccagcguggacugcaccauguacaucugcggcgacagcaccgagugcagcaaccugcugcugcaguacggcagcuucugcacccagcugaaccgggcccugaccggcaucgccguggagcaggacaagaacacccaggagguguucgcccaggugaagcagaucuacaagaccccucccaucaaggacuucggcggcuucaacuucagccagauccugcccgaccccagcaagcccagcaagcggagcuucaucgaggaccugcuguucaacaaggugacccuagccgacgccggcuucaucaagcaguacggcgacugccucggcgacauagccgcccgggaccugaucugcgcccagaaguucaacggccugaccgugcugccuccccugcugaccgacgagaugaucgcccaguacaccagcgcccuguuagccggaaccaucaccagcggcuggacuuucggcgcuggagccgcucugcagauccccuucgccaugcagauggccuaccgguucaacggcaucggcgugacccagaacgugcuguacgagaaccagaagcugaucgccaaccaguucaacagcgccaucggcaagauccaggacagccugagcagcaccgcuagcgcccugggcaagcugcaggacguggugaaccagaacgcccaggcccugaacacccuggugaagcagcugagcagcaacuucggcgccaucagcagcgugcugaacgacauccugagccggcuggacaaggucgaggccgaggugcagaucgaccggcugaucacuggccggcugcagagccugcagaccuacgugacccagcagcugauccgggccgccgagauucgggccagcgccaaccuggccgccaccaagaugagcgagugcgugcugggccagagcaagcggguggacuucugcggcaagggcuaccaccugaugagcuuuccccagagcgcaccccacggagugguguuccugcacgugaccuacgugcccgcccaggagaagaacuucaccaccgccccagccaucugccacgacggcaaggcccacuuuccccgggagggcguguucgugagcaacggcacccacugguucgugacccagcggaacuucuacgagccccagaucaucaccaccgacaacaccuucgugagcggcaacugcgacguggugaucggcaucgugaacaacaccguguacgauccccugcagcccgagcuggacagcuucaaggaggagcuggacaaguacuucaagaaucacaccagccccgacguggaccugggcgacaucagcggcaucaacgccagcguggugaacauccagaaggagaucgaucggcugaacgagguggccaagaaccugaacgagagccugaucgaccugcaggagcugggcaaguacgagcaguacaucaaguggcccugguacaucuggcugggcuucaucgccggccugaucgccaucgugauggugaccaucaugcugugcugcaugaccagcugcugcagcugccugaagggcuguugcagcugcggcagcugcugcaaguucgacgaggacgacagcgagcccgugcugaagggcgugaagcugcacuacaccuga

SEQ ID NO: 23013 - RNA, 3822 nt, Artificial Sequence
  SARS-CoV-2/Wuhan/WIV05/2019__EPI_ISL_402128 spike protein CDS gc (1-1273)(D614G_I692V)
auguucguguuccuggugcugcugccccuggugagcagccagugcgugaaccugaccacccggacccagcugccaccagccuacaccaacagcuucacccggggcgucuacuaccccgacaagguguuccggagcagcguccugcacagcacccaggaccuguuccugcccuucuucagcaacgugaccugguuccacgccauccacgugagcggcaccaacggcaccaagcgguucgacaaccccgugcugcccuucaacgacggcguguacuucgccagcaccgagaagagcaacaucauccggggcuggaucuucggcaccacccuggacagcaagacccagagccugcugaucgugaauaacgccaccaacguggugaucaaggugugcgaguuccaguucugcaacgaccccuuccugggcguguacuaccacaagaacaacaagagcuggauggagagcgaguuccggguguacagcagcgccaacaacugcaccuucgaguacgugagccagcccuuccugauggaccuggagggcaagcagggcaacuucaagaaccugcgggaguucguguucaagaacaucgacggcuacuucaagaucuacagcaagcacaccccaaucaaccuggugcgggaucugccccagggcuucucagcccuggagccccugguggaccugcccaucggcaucaacaucacccgguuccagacccugcuggcccugcaccggagcuaccugaccccaggcgacagcagcagcggguggacagcaggcgcggcugcuuacuacgugggcuaccugcagccccggaccuuccugcugaaguacaacgagaacggcaccaucaccgacgccguggacugcgcccuggacccucugagcgagaccaagugcacccugaagagcuucaccguggagaagggcaucuaccagaccagcaacuuccgggugcagcccaccgagagcaucgugcgguuccccaacaucaccaaccugugccccuucggcgagguguucaacgccacccgguucgccagcguguacgccuggaaccggaagcggaucagcaacugcguggccgacuacagcgugcuguacaacagcgccagcuucagcaccuucaagugcuacggcgugagccccaccaagcugaacgaccugugcuucaccaacguguacgccgacagcuucgugauccguggcgacgaggugcggcagaucgcacccggccagacaggcaagaucgccgacuacaacuacaagcugcccgacgacuucaccggcugcgugaucgccuggaacagcaacaaccucgacagcaaggugggcggcaacuacaacuaccuguaccggcuguuccggaagagcaaccugaagcccuucgagcgggacaucagcaccgagaucuaccaagccggcuccaccccuugcaacggcguggagggcuucaacugcuacuucccucugcagagcuacggcuuccagcccaccaacggcgugggcuaccagcccuaccgggugguggugcugagcuucgagcugcugcacgccccagccaccguguguggccccaagaagagcaccaaccuggugaagaacaagugcgugaacuucaacuucaacggccuuaccggcaccggcgugcugaccgagagcaacaagaaauuccugcccuuucagcaguucggccgggacaucgccgacaccaccgacgcugugcgggauccccagacccuggagauccuggacaucaccccuugcagcuucggcggcgugagcgugaucaccccaggcaccaacaccagcaaccagguggccgugcuguaccagggcgugaacugcaccgaggugcccguggccauccacgccgaccagcugacacccaccuggcgggucuacagcaccggcagcaacguguuccagacccgggccgguugccugaucggcgccgagcacgugaacaacagcuacgagugcgacauccccaucggcgccggcaucugugccagcuaccagacccagaccaauucaccccggagggcaaggagcguggccagccagagcgugaucgccuacaccaugagccugggcgccgagaacagcguggccuacagcaacaacagcaucgccauccccaccaacuucaccaucagcgugaccaccgagauucugcccgugagcaugaccaagaccagcguggacugcaccauguacaucugcggcgacagcaccgagugcagcaaccugcugcugcaguacggcagcuucugcacccagcugaaccgggcccugaccggcaucgccguggagcaggacaagaacacccaggagguguucgcccaggugaagcagaucuacaagaccccucccaucaaggacuucggcggcuucaacuucagccagauccugcccgaccccagcaagcccagcaagcggagcuucaucgaggaccugcuguucaacaaggugacccuagccgacgccggcuucaucaagcaguacggcgacugccucggcgacauagccgcccgggaccugaucugcgcccagaaguucaacggccugaccgugcugccuccccugcugaccgacgagaugaucgcccaguacaccagcgcccuguuagccggaaccaucaccagcggcuggacuuucggcgcuggagccgcucugcagauccccuucgccaugcagauggccuaccgguucaacggcaucggcgugacccagaacgugcuguacgagaaccagaagcugaucgccaaccaguucaacagcgccaucggcaagauccaggacagccugagcagcaccgcuagcgcccugggcaagcugcaggacguggugaaccagaacgcccaggcccugaacacccuggugaagcagcugagcagcaacuucggcgccaucagcagcgugcugaacgacauccugagccggcuggacaaggucgaggccgaggugcagaucgaccggcugaucacuggccggcugcagagccugcagaccuacgugacccagcagcugauccgggccgccgagauucgggccagcgccaaccuggccgccaccaagaugagcgagugcgugcugggccagagcaagcggguggacuucugcggcaagggcuaccaccugaugagcuuuccccagagcgcaccccacggagugguguuccugcacgugaccuacgugcccgcccaggagaagaacuucaccaccgccccagccaucugccacgacggcaaggcccacuuuccccgggagggcguguucgugagcaacggcacccacugguucgugacccagcggaacuucuacgagccccagaucaucaccaccgacaacaccuucgugagcggcaacugcgacguggugaucggcaucgugaacaacaccguguacgauccccugcagcccgagcuggacagcuucaaggaggagcuggacaaguacuucaagaaucacaccagccccgacguggaccugggcgacaucagcggcaucaacgccagcguggugaacauccagaaggagaucgaucggcugaacgagguggccaagaaccugaacgagagccugaucgaccugcaggagcugggcaaguacgagcaguacaucaaguggcccugguacaucuggcugggcuucaucgccggccugaucgccaucgugauggugaccaucaugcugugcugcaugaccagcugcugcagcugccugaagggcuguugcagcugcggcagcugcugcaaguucgacgaggacgacagcgagcccgugcugaagggcgugaagcugcacuacaccuga

SEQ ID NO: 23014 - RNA, 3822 nt, Artificial Sequence
  SARS-CoV-2/Wuhan/WIV05/2019__EPI_ISL_402128 spike protein CDS gc (1-1273)(D614G_M1229I)
auguucguguuccuggugcugcugccccuggugagcagccagugcgugaaccugaccacccggacccagcugccaccagccuacaccaacagcuucacccggggcgucuacuaccccgacaagguguuccggagcagcguccugcacagcacccaggaccuguuccugcccuucuucagcaacgugaccugguuccacgccauccacgugagcggcaccaacggcaccaagcgguucgacaaccccgugcugcccuucaacgacggcguguacuucgccagcaccgagaagagcaacaucauccggggcuggaucuucggcaccacccuggacagcaagacccagagccugcugaucgugaauaacgccaccaacguggugaucaaggugugcgaguuccaguucugcaacgaccccuuccugggcguguacuaccacaagaacaacaagagcuggauggagagcgaguuccggguguacagcagcgccaacaacugcaccuucgaguacgugagccagcccuuccugauggaccuggagggcaagcagggcaacuucaagaaccugcgggaguucguguucaagaacaucgacggcuacuucaagaucuacagcaagcacaccccaaucaaccuggugcgggaucugccccagggcuucucagcccuggagccccugguggaccugcccaucggcaucaacaucacccgguuccagacccugcuggcccugcaccggagcuaccugaccccaggcgacagcagcagcggguggacagcaggcgcggcugcuuacuacgugggcuaccugcagccccggaccuuccugcugaaguacaacgagaacggcaccaucaccgacgccguggacugcgcccuggacccucugagcgagaccaagugcacccugaagagcuucaccguggagaagggcaucuaccagaccagcaacuuccgggugcagcccaccgagagcaucgugcgguuccccaacaucaccaaccugugccccuucggcgagguguucaacgccacccgguucgccagcguguacgccuggaaccggaagcggaucagcaacugcguggccgacuacagcgugcuguacaacagcgccagcuucagcaccuucaagugcuacggcgugagccccaccaagcugaacgaccugugcuucaccaacguguacgccgacagcuucgugauccguggcgacgaggugcggcagaucgcacccggccagacaggcaagaucgccgacuacaacuacaagcugcccgacgacuucaccggcugcgugaucgccuggaacagcaacaaccucgacagcaaggugggcggcaacuacaacuaccuguaccggcuguuccggaagagcaaccugaagcccuucgagcgggacaucagcaccgagaucuaccaagccggcuccaccccuugcaacggcguggagggcuucaacugcuacuucccucugcagagcuacggcuuccagcccaccaacggcgugggcuaccagcccuaccgggugguggugcugagcuucgagcugcugcacgccccagccaccguguguggccccaagaagagcaccaaccuggugaagaacaagugcgugaacuucaacuucaacggccuuaccggcaccggcgugcugaccgagagcaacaagaaauuccugcccuuucagcaguucggccgggacaucgccgacaccaccgacgcugugcgggauccccagacccuggagauccuggacaucaccccuugcagcuucggcggcgugagcgugaucaccccaggcaccaacaccagcaaccagguggccgugcuguaccagggcgugaacugcaccgaggugcccguggccauccacgccgaccagcugacacccaccuggcgggucuacagcaccggcagcaacguguuccagacccgggccgguugccugaucggcgccgagcacgugaacaacagcuacgagugcgacauccccaucggcgccggcaucugugccagcuaccagacccagaccaauucaccccggagggcaaggagcguggccagccagagcaucaucgccuacaccaugagccugggcgccgagaacagcguggccuacagcaacaacagcaucgccauccccaccaacuucaccaucagcgugaccaccgagauucugcccgugagcaugaccaagaccagcguggacugcaccauguacaucugcggcgacagcaccgagugcagcaaccugcugcugcaguacggcagcuucugcacccagcugaaccgggcccugaccggcaucgccguggagcaggacaagaacacccaggagguguucgcccaggugaagcagaucuacaagaccccucccaucaaggacuucggcggcuucaacuucagccagauccugcccgaccccagcaagcccagcaagcggagcuucaucgaggaccugcuguucaacaaggugacccuagccgacgccggcuucaucaagcaguacggcgacugccucggcgacauagccgcccgggaccugaucugcgcccagaaguucaacggccugaccgugcugccuccccugcugaccgacgagaugaucgcccaguacaccagcgcccuguuagccggaaccaucaccagcggcuggacuuucggcgcuggagccgcucugcagauccccuucgccaugcagauggccuaccgguucaacggcaucggcgugacccagaacgugcuguacgagaaccagaagcugaucgccaaccaguucaacagcgccaucggcaagauccaggacagccugagcagcaccgcuagcgcccugggcaagcugcaggacguggugaaccagaacgcccaggcccugaacacccuggugaagcagcugagcagcaacuucggcgccaucagcagcgugcugaacgacauccugagccggcuggacaaggucgaggccgaggugcagaucgaccggcugaucacuggccggcugcagagccugcagaccuacgugacccagcagcugauccgggccgccgagauucgggccagcgccaaccuggccgccaccaagaugagcgagugcgugcugggccagagcaagcggguggacuucugcggcaagggcuaccaccugaugagcuuuccccagagcgcaccccacggagugguguuccugcacgugaccuacgugcccgcccaggagaagaacuucaccaccgccccagccaucugccacgacggcaaggcccacuuuccccgggagggcguguucgugagcaacggcacccacugguucgugacccagcggaacuucuacgagccccagaucaucaccaccgacaacaccuucgugagcggcaacugcgacguggugaucggcaucgugaacaacaccguguacgauccccugcagcccgagcuggacagcuucaaggaggagcuggacaaguacuucaagaaucacaccagccccgacguggaccugggcgacaucagcggcaucaacgccagcguggugaacauccagaaggagaucgaucggcugaacgagguggccaagaaccugaacgagagccugaucgaccugcaggagcugggcaaguacgagcaguacaucaaguggcccugguacaucuggcugggcuucaucgccggccugaucgccaucgugaucgugaccaucaugcugugcugcaugaccagcugcugcagcugccugaagggcuguugcagcugcggcagcugcugcaaguucgacgaggacgacagcgagcccgugcugaagggcgugaagcugcacuacaccuga

SEQ ID NO: 23015 - RNA, 3816 nt, Artificial Sequence
  SARS-CoV-2/Wuhan/WIV05/2019__EPI_ISL_402128 spike protein CDS gc (1-1273)(H69del_V70del_A222V_Y453F_S477N_D614G_I692V)
auguucguguuccuggugcugcugccccuggugagcagccagugcgugaaccugaccacccggacccagcugccaccagccuacaccaacagcuucacccggggcgucuacuaccccgacaagguguuccggagcagcguccugcacagcacccaggaccuguuccugcccuucuucagcaacgugaccugguuccacgccaucagcggcaccaacggcaccaagcgguucgacaaccccgugcugcccuucaacgacggcguguacuucgccagcaccgagaagagcaacaucauccggggcuggaucuucggcaccacccuggacagcaagacccagagccugcugaucgugaauaacgccaccaacguggugaucaaggugugcgaguuccaguucugcaacgaccccuuccugggcguguacuaccacaagaacaacaagagcuggauggagagcgaguuccggguguacagcagcgccaacaacugcaccuucgaguacgugagccagcccuuccugauggaccuggagggcaagcagggcaacuucaagaaccugcgggaguucguguucaagaacaucgacggcuacuucaagaucuacagcaagcacaccccaaucaaccuggugcgggaucugccccagggcuucucagugcuggagccccugguggaccugcccaucggcaucaacaucacccgguuccagacccugcuggcccugcaccggagcuaccugaccccaggcgacagcagcagcggguggacagcaggcgcggcugcuuacuacgugggcuaccugcagccccggaccuuccugcugaaguacaacgagaacggcaccaucaccgacgccguggacugcgcccuggacccucugagcgagaccaagugcacccugaagagcuucaccguggagaagggcaucuaccagaccagcaacuuccgggugcagcccaccgagagcaucgugcgguuccccaacaucaccaaccugugccccuucggcgagguguucaacgccacccgguucgccagcguguacgccuggaaccggaagcggaucagcaacugcguggccgacuacagcgugcuguacaacagcgccagcuucagcaccuucaagugcuacggcgugagccccaccaagcugaacgaccugugcuucaccaacguguacgccgacagcuucgugauccguggcgacgaggugcggcagaucgcacccggccagacaggcaagaucgccgacuacaacuacaagcugcccgacgacuucaccggcugcgugaucgccuggaacagcaacaaccucgacagcaaggugggcggcaacuacaacuaccuguuccggcuguuccggaagagcaaccugaagcccuucgagcgggacaucagcaccgagaucuaccaagccggcaacaccccuugcaacggcguggagggcuucaacugcuacuucccucugcagagcuacggcuuccagcccaccaacggcgugggcuaccagcccuaccgggugguggugcugagcuucgagcugcugcacgccccagccaccguguguggccccaagaagagcaccaaccuggugaagaacaagugcgugaacuucaacuucaacggccuuaccggcaccggcgugcugaccgagagcaacaagaaauuccugcccuuucagcaguucggccgggacaucgccgacaccaccgacgcugugcgggauccccagacccuggagauccuggacaucaccccuugcagcuucggcggcgugagcgugaucaccccaggcaccaacaccagcaaccagguggccgugcuguaccagggcgugaacugcaccgaggugcccguggccauccacgccgaccagcugacacccaccuggcgggucuacagcaccggcagcaacguguuccagacccgggccgguugccugaucggcgccgagcacgugaacaacagcuacgagugcgacauccccaucggcgccggcaucugugccagcuaccagacccagaccaauucaccccggagggcaaggagcguggccagccagagcgugaucgccuacaccaugagccugggcgccgagaacagcguggccuacagcaacaacagcaucgccauccccaccaacuucaccaucagcgugaccaccgagauucugcccgugagcaugaccaagaccagcguggacugcaccauguacaucugcggcgacagcaccgagugcagcaaccugcugcugcaguacggcagcuucugcacccagcugaaccgggcccugaccggcaucgccguggagcaggacaagaacacccaggagguguucgcccaggugaagcagaucuacaagaccccucccaucaaggacuucggcggcuucaacuucagccagauccugcccgaccccagcaagcccagcaagcggagcuucaucgaggaccugcuguucaacaaggugacccuagccgacgccggcuucaucaagcaguacggcgacugccucggcgacauagccgcccgggaccugaucugcgcccagaaguucaacggccugaccgugcugccuccccugcugaccgacgagaugaucgcccaguacaccagcgcccuguuagccggaaccaucaccagcggcuggacuuucggcgcuggagccgcucugcagauccccuucgccaugcagauggccuaccgguucaacggcaucggcgugacccagaacgugcuguacgagaaccagaagcugaucgccaaccaguucaacagcgccaucggcaagauccaggacagccugagcagcaccgcuagcgcccugggcaagcugcaggacguggugaaccagaacgcccaggcccugaacacccuggugaagcagcugagcagcaacuucggcgccaucagcagcgugcugaacgacauccugagccggcuggacaaggucgaggccgaggugcagaucgaccggcugaucacuggccggcugcagagccugcagaccuacgugacccagcagcugauccgggccgccgagauucgggccagcgccaaccuggccgccaccaagaugagcgagugcgugcugggccagagcaagcggguggacuucugcggcaagggcuaccaccugaugagcuuuccccagagcgcaccccacggagugguguuccugcacgugaccuacgugcccgcccaggagaagaacuucaccaccgccccagccaucugccacgacggcaaggcccacuuuccccgggagggcguguucgugagcaacggcacccacugguucgugacccagcggaacuucuacgagccccagaucaucaccaccgacaacaccuucgugagcggcaacugcgacguggugaucggcaucgugaacaacaccguguacgauccccugcagcccgagcuggacagcuucaaggaggagcuggacaaguacuucaagaaucacaccagccccgacguggaccugggcgacaucagcggcaucaacgccagcguggugaacauccagaaggagaucgaucggcugaacgagguggccaagaaccugaacgagagccugaucgaccugcaggagcugggcaaguacgagcaguacaucaaguggcccugguacaucuggcugggcuucaucgccggccugaucgccaucgugauggugaccaucaugcugugcugcaugaccagcugcugcagcugccugaagggcuguugcagcugcggcagcugcugcaaguucgacgaggacgacagcgagcccgugcugaagggcgugaagcugcacuacaccuga

SEQ ID NO: 23016 - RNA, 3816 nt, Artificial Sequence
  SARS-CoV-2/Wuhan/WIV05/2019__EPI_ISL_402128 spike protein CDS gc (1-1273)(H69del_V70del_Y453F_D614G_I692V_M1229I)
auguucguguuccuggugcugcugccccuggugagcagccagugcgugaaccugaccacccggacccagcugccaccagccuacaccaacagcuucacccggggcgucuacuaccccgacaagguguuccggagcagcguccugcacagcacccaggaccuguuccugcccuucuucagcaacgugaccugguuccacgccaucagcggcaccaacggcaccaagcgguucgacaaccccgugcugcccuucaacgacggcguguacuucgccagcaccgagaagagcaacaucauccggggcuggaucuucggcaccacccuggacagcaagacccagagccugcugaucgugaauaacgccaccaacguggugaucaaggugugcgaguuccaguucugcaacgaccccuuccugggcguguacuaccacaagaacaacaagagcuggauggagagcgaguuccggguguacagcagcgccaacaacugcaccuucgaguacgugagccagcccuuccugauggaccuggagggcaagcagggcaacuucaagaaccugcgggaguucguguucaagaacaucgacggcuacuucaagaucuacagcaagcacaccccaaucaaccuggugcgggaucugccccagggcuucucagcccuggagccccugguggaccugcccaucggcaucaacaucacccgguuccagacccugcuggcccugcaccggagcuaccugaccccaggcgacagcagcagcggguggacagcaggcgcggcugcuuacuacgugggcuaccugcagccccggaccuuccugcugaaguacaacgagaacggcaccaucaccgacgccguggacugcgcccuggacccucugagcgagaccaagugcacccugaagagcuucaccguggagaagggcaucuaccagaccagcaacuuccgggugcagcccaccgagagcaucgugcgguuccccaacaucaccaaccugugccccuucggcgagguguucaacgccacccgguucgccagcguguacgccuggaaccggaagcggaucagcaacugcguggccgacuacagcgugcuguacaacagcgccagcuucagcaccuucaagugcuacggcgugagccccaccaagcugaacgaccugugcuucaccaacguguacgccgacagcuucgugauccguggcgacgaggugcggcagaucgcacccggccagacaggcaagaucgccgacuacaacuacaagcugcccgacgacuucaccggcugcgugaucgccuggaacagcaacaaccucgacagcaaggugggcggcaacuacaacuaccuguuccggcuguuccggaagagcaaccugaagcccuucgagcgggacaucagcaccgagaucuaccaagccggcuccaccccuugcaacggcguggagggcuucaacugcuacuucccucugcagagcuacggcuuccagcccaccaacggcgugggcuaccagcccuaccgggugguggugcugagcuucgagcugcugcacgccccagccaccguguguggccccaagaagagcaccaaccuggugaagaacaagugcgugaacuucaacuucaacggccuuaccggcaccggcgugcugaccgagagcaacaagaaauuccugcccuuucagcaguucggccgggacaucgccgacaccaccgacgcugugcgggauccccagacccuggagauccuggacaucaccccuugcagcuucggcggcgugagcgugaucaccccaggcaccaacaccagcaaccagguggccgugcuguaccagggcgugaacugcaccgaggugcccguggccauccacgccgaccagcugacacccaccuggcgggucuacagcaccggcagcaacguguuccagacccgggccgguugccugaucggcgccgagcacgugaacaacagcuacgagugcgacauccccaucggcgccggcaucugugccagcuaccagacccagaccaauucaccccggagggcaaggagcguggccagccagagcgugaucgccuacaccaugagccugggcgccgagaacagcguggccuacagcaacaacagcaucgccauccccaccaacuucaccaucagcgugaccaccgagauucugcccgugagcaugaccaagaccagcguggacugcaccauguacaucugcggcgacagcaccgagugcagcaaccugcugcugcaguacggcagcuucugcacccagcugaaccgggcccugaccggcaucgccguggagcaggacaagaacacccaggagguguucgcccaggugaagcagaucuacaagaccccucccaucaaggacuucggcggcuucaacuucagccagauccugcccgaccccagcaagcccagcaagcggagcuucaucgaggaccugcuguucaacaaggugacccuagccgacgccggcuucaucaagcaguacggcgacugccucggcgacauagccgcccgggaccugaucugcgcccagaaguucaacggccugaccgugcugccuccccugcugaccgacgagaugaucgcccaguacaccagcgcccuguuagccggaaccaucaccagcggcuggacuuucggcgcuggagccgcucugcagauccccuucgccaugcagauggccuaccgguucaacggcaucggcgugacccagaacgugcuguacgagaaccagaagcugaucgccaaccaguucaacagcgccaucggcaagauccaggacagccugagcagcaccgcuagcgcccugggcaagcugcaggacguggugaaccagaacgcccaggcccugaacacccuggugaagcagcugagcagcaacuucggcgccaucagcagcgugcugaacgacauccugagccggcuggacaaggucgaggccgaggugcagaucgaccggcugaucacuggccggcugcagagccugcagaccuacgugacccagcagcugauccgggccgccgagauucgggccagcgccaaccuggccgccaccaagaugagcgagugcgugcugggccagagcaagcggguggacuucugcggcaagggcuaccaccugaugagcuuuccccagagcgcaccccacggagugguguuccugcacgugaccuacgugcccgcccaggagaagaacuucaccaccgccccagccaucugccacgacggcaaggcccacuuuccccgggagggcguguucgugagcaacggcacccacugguucgugacccagcggaacuucuacgagccccagaucaucaccaccgacaacaccuucgugagcggcaacugcgacguggugaucggcaucgugaacaacaccguguacgauccccugcagcccgagcuggacagcuucaaggaggagcuggacaaguacuucaagaaucacaccagccccgacguggaccugggcgacaucagcggcaucaacgccagcguggugaacauccagaaggagaucgaucggcugaacgagguggccaagaaccugaacgagagccugaucgaccugcaggagcugggcaaguacgagcaguacaucaaguggcccugguacaucuggcugggcuucaucgccggccugaucgccaucgugaucgugaccaucaugcugugcugcaugaccagcugcugcagcugccugaagggcuguugcagcugcggcagcugcugcaaguucgacgaggacgacagcgagcccgugcugaagggcgugaagcugcacuacaccuga

SEQ ID NO: 23017 - RNA, 3813 nt, Artificial Sequence
  SARS-CoV-2/Wuhan/WIV05/2019__EPI_ISL_402128 spike protein CDS gc (1-1273)(H69del_V70del_Y144del_N501Y_A570D_D614G_P681H_T716I_S982 A_D1118H)
auguucguguuccuggugcugcugccccuggugagcagccagugcgugaaccugaccacccggacccagcugccaccagccuacaccaacagcuucacccggggcgucuacuaccccgacaagguguuccggagcagcguccugcacagcacccaggaccuguuccugcccuucuucagcaacgugaccugguuccacgccaucagcggcaccaacggcaccaagcgguucgacaaccccgugcugcccuucaacgacggcguguacuucgccagcaccgagaagagcaacaucauccggggcuggaucuucggcaccacccuggacagcaagacccagagccugcugaucgugaauaacgccaccaacguggugaucaaggugugcgaguuccaguucugcaacgaccccuuccugggcguguaccacaagaacaacaagagcuggauggagagcgaguuccggguguacagcagcgccaacaacugcaccuucgaguacgugagccagcccuuccugauggaccuggagggcaagcagggcaacuucaagaaccugcgggaguucguguucaagaacaucgacggcuacuucaagaucuacagcaagcacaccccaaucaaccuggugcgggaucugccccagggcuucucagcccuggagccccugguggaccugcccaucggcaucaacaucacccgguuccagacccugcuggcccugcaccggagcuaccugaccccaggcgacagcagcagcggguggacagcaggcgcggcugcuuacuacgugggcuaccugcagccccggaccuuccugcugaaguacaacgagaacggcaccaucaccgacgccguggacugcgcccuggacccucugagcgagaccaagugcacccugaagagcuucaccguggagaagggcaucuaccagaccagcaacuuccgggugcagcccaccgagagcaucgugcgguuccccaacaucaccaaccugugccccuucggcgagguguucaacgccacccgguucgccagcguguacgccuggaaccggaagcggaucagcaacugcguggccgacuacagcgugcuguacaacagcgccagcuucagcaccuucaagugcuacggcgugagccccaccaagcugaacgaccugugcuucaccaacguguacgccgacagcuucgugauccguggcgacgaggugcggcagaucgcacccggccagacaggcaagaucgccgacuacaacuacaagcugcccgacgacuucaccggcugcgugaucgccuggaacagcaacaaccucgacagcaaggugggcggcaacuacaacuaccuguaccggcuguuccggaagagcaaccugaagcccuucgagcgggacaucagcaccgagaucuaccaagccggcuccaccccuugcaacggcguggagggcuucaacugcuacuucccucugcagagcuacggcuuccagcccaccuacggcgugggcuaccagcccuaccgggugguggugcugagcuucgagcugcugcacgccccagccaccguguguggccccaagaagagcaccaaccuggugaagaacaagugcgugaacuucaacuucaacggccuuaccggcaccggcgugcugaccgagagcaacaagaaauuccugcccuuucagcaguucggccgggacaucgacgacaccaccgacgcugugcgggauccccagacccuggagauccuggacaucaccccuugcagcuucggcggcgugagcgugaucaccccaggcaccaacaccagcaaccagguggccgugcuguaccagggcgugaacugcaccgaggugcccguggccauccacgccgaccagcugacacccaccuggcgggucuacagcaccggcagcaacguguuccagacccgggccgguugccugaucggcgccgagcacgugaacaacagcuacgagugcgacauccccaucggcgccggcaucugugccagcuaccagacccagaccaauucacaccggagggcaaggagcguggccagccagagcaucaucgccuacaccaugagccugggcgccgagaacagcguggccuacagcaacaacagcaucgccauccccaucaacuucaccaucagcgugaccaccgagauucugcccgugagcaugaccaagaccagcguggacugcaccauguacaucugcggcgacagcaccgagugcagcaaccugcugcugcaguacggcagcuucugcacccagcugaaccgggcccugaccggcaucgccguggagcaggacaagaacacccaggagguguucgcccaggugaagcagaucuacaagaccccucccaucaaggacuucggcggcuucaacuucagccagauccugcccgaccccagcaagcccagcaagcggagcuucaucgaggaccugcuguucaacaaggugacccuagccgacgccggcuucaucaagcaguacggcgacugccucggcgacauagccgcccgggaccugaucugcgcccagaaguucaacggccugaccgugcugccuccccugcugaccgacgagaugaucgcccaguacaccagcgcccuguuagccggaaccaucaccagcggcuggacuuucggcgcuggagccgcucugcagauccccuucgccaugcagauggccuaccgguucaacggcaucggcgugacccagaacgugcuguacgagaaccagaagcugaucgccaaccaguucaacagcgccaucggcaagauccaggacagccugagcagcaccgcuagcgcccugggcaagcugcaggacguggugaaccagaacgcccaggcccugaacacccuggugaagcagcugagcagcaacuucggcgccaucagcagcgugcugaacgacauccuggcccggcuggacaaggucgaggccgaggugcagaucgaccggcugaucacuggccggcugcagagccugcagaccuacgugacccagcagcugauccgggccgccgagauucgggccagcgccaaccuggccgccaccaagaugagcgagugcgugcugggccagagcaagcggguggacuucugcggcaagggcuaccaccugaugagcuuuccccagagcgcaccccacggagugguguuccugcacgugaccuacgugcccgcccaggagaagaacuucaccaccgccccagccaucugccacgacggcaaggcccacuuuccccgggagggcguguucgugagcaacggcacccacugguucgugacccagcggaacuucuacgagccccagaucaucaccacccacaacaccuucgugagcggcaacugcgacguggugaucggcaucgugaacaacaccguguacgauccccugcagcccgagcuggacagcuucaaggaggagcuggacaaguacuucaagaaucacaccagccccgacguggaccugggcgacaucagcggcaucaacgccagcguggugaacauccagaaggagaucgaucggcugaacgagguggccaagaaccugaacgagagccugaucgaccugcaggagcugggcaaguacgagcaguacaucaaguggcccugguacaucuggcugggcuucaucgccggccugaucgccaucgugauggugaccaucaugcugugcugcaugaccagcugcugcagcugccugaagggcuguugcagcugcggcagcugcugcaaguucgacgaggacgacagcgagcccgugcugaagggcgugaagcugcacuacaccuga

SEQ ID NO: 23018 - RNA, 3822 nt, Artificial Sequence
  SARS-CoV-2/Wuhan/WIV05/2019__EPI_ISL_402128 spike protein CDS gc (1-1273)(K417N_E484K_N501Y_D614G)
auguucguguuccuggugcugcugccccuggugagcagccagugcgugaaccugaccacccggacccagcugccaccagccuacaccaacagcuucacccggggcgucuacuaccccgacaagguguuccggagcagcguccugcacagcacccaggaccuguuccugcccuucuucagcaacgugaccugguuccacgccauccacgugagcggcaccaacggcaccaagcgguucgacaaccccgugcugcccuucaacgacggcguguacuucgccagcaccgagaagagcaacaucauccggggcuggaucuucggcaccacccuggacagcaagacccagagccugcugaucgugaauaacgccaccaacguggugaucaaggugugcgaguuccaguucugcaacgaccccuuccugggcguguacuaccacaagaacaacaagagcuggauggagagcgaguuccggguguacagcagcgccaacaacugcaccuucgaguacgugagccagcccuuccugauggaccuggagggcaagcagggcaacuucaagaaccugcgggaguucguguucaagaacaucgacggcuacuucaagaucuacagcaagcacaccccaaucaaccuggugcgggaucugccccagggcuucucagcccuggagccccugguggaccugcccaucggcaucaacaucacccgguuccagacccugcuggcccugcaccggagcuaccugaccccaggcgacagcagcagcggguggacagcaggcgcggcugcuuacuacgugggcuaccugcagccccggaccuuccugcugaaguacaacgagaacggcaccaucaccgacgccguggacugcgcccuggacccucugagcgagaccaagugcacccugaagagcuucaccguggagaagggcaucuaccagaccagcaacuuccgggugcagcccaccgagagcaucgugcgguuccccaacaucaccaaccugugccccuucggcgagguguucaacgccacccgguucgccagcguguacgccuggaaccggaagcggaucagcaacugcguggccgacuacagcgugcuguacaacagcgccagcuucagcaccuucaagugcuacggcgugagccccaccaagcugaacgaccugugcuucaccaacguguacgccgacagcuucgugauccguggcgacgaggugcggcagaucgcacccggccagacaggcaacaucgccgacuacaacuacaagcugcccgacgacuucaccggcugcgugaucgccuggaacagcaacaaccucgacagcaaggugggcggcaacuacaacuaccuguaccggcuguuccggaagagcaaccugaagcccuucgagcgggacaucagcaccgagaucuaccaagccggcuccaccccuugcaacggcgugaagggcuucaacugcuacuucccucugcagagcuacggcuuccagcccaccuacggcgugggcuaccagcccuaccgggugguggugcugagcuucgagcugcugcacgccccagccaccguguguggccccaagaagagcaccaaccuggugaagaacaagugcgugaacuucaacuucaacggccuuaccggcaccggcgugcugaccgagagcaacaagaaauuccugcccuuucagcaguucggccgggacaucgccgacaccaccgacgcugugcgggauccccagacccuggagauccuggacaucaccccuugcagcuucggcggcgugagcgugaucaccccaggcaccaacaccagcaaccagguggccgugcuguaccagggcgugaacugcaccgaggugcccguggccauccacgccgaccagcugacacccaccuggcgggucuacagcaccggcagcaacguguuccagacccgggccgguugccugaucggcgccgagcacgugaacaacagcuacgagugcgacauccccaucggcgccggcaucugugccagcuaccagacccagaccaauucaccccggagggcaaggagcguggccagccagagcaucaucgccuacaccaugagccugggcgccgagaacagcguggccuacagcaacaacagcaucgccauccccaccaacuucaccaucagcgugaccaccgagauucugcccgugagcaugaccaagaccagcguggacugcaccauguacaucugcggcgacagcaccgagugcagcaaccugcugcugcaguacggcagcuucugcacccagcugaaccgggcccugaccggcaucgccguggagcaggacaagaacacccaggagguguucgcccaggugaagcagaucuacaagaccccucccaucaaggacuucggcggcuucaacuucagccagauccugcccgaccccagcaagcccagcaagcggagcuucaucgaggaccugcuguucaacaaggugacccuagccgacgccggcuucaucaagcaguacggcgacugccucggcgacauagccgcccgggaccugaucugcgcccagaaguucaacggccugaccgugcugccuccccugcugaccgacgagaugaucgcccaguacaccagcgcccuguuagccggaaccaucaccagcggcuggacuuucggcgcuggagccgcucugcagauccccuucgccaugcagauggccuaccgguucaacggcaucggcgugacccagaacgugcuguacgagaaccagaagcugaucgccaaccaguucaacagcgccaucggcaagauccaggacagccugagcagcaccgcuagcgcccugggcaagcugcaggacguggugaaccagaacgcccaggcccugaacacccuggugaagcagcugagcagcaacuucggcgccaucagcagcgugcugaacgacauccugagccggcuggacaaggucgaggccgaggugcagaucgaccggcugaucacuggccggcugcagagccugcagaccuacgugacccagcagcugauccgggccgccgagauucgggccagcgccaaccuggccgccaccaagaugagcgagugcgugcugggccagagcaagcggguggacuucugcggcaagggcuaccaccugaugagcuuuccccagagcgcaccccacggagugguguuccugcacgugaccuacgugcccgcccaggagaagaacuucaccaccgccccagccaucugccacgacggcaaggcccacuuuccccgggagggcguguucgugagcaacggcacccacugguucgugacccagcggaacuucuacgagccccagaucaucaccaccgacaacaccuucgugagcggcaacugcgacguggugaucggcaucgugaacaacaccguguacgauccccugcagcccgagcuggacagcuucaaggaggagcuggacaaguacuucaagaaucacaccagccccgacguggaccugggcgacaucagcggcaucaacgccagcguggugaacauccagaaggagaucgaucggcugaacgagguggccaagaaccugaacgagagccugaucgaccugcaggagcugggcaaguacgagcaguacaucaaguggcccugguacaucuggcugggcuucaucgccggccugaucgccaucgugauggugaccaucaugcugugcugcaugaccagcugcugcagcugccugaagggcuguugcagcugcggcagcugcugcaaguucgacgaggacgacagcgagcccgugcugaagggcgugaagcugcacuacaccuga

SEQ ID NO: 23019 - RNA, 3813 nt, Artificial Sequence
  SARS-CoV-2/Wuhan/WIV05/2019__EPI_ISL_402128 spike protein CDS gc (1-1273)(L18F_D80A_D215G_L242del_A243del_L244del_R246I_K417N_E484 K_N501Y_D614G_A701V)
auguucguguuccuggugcugcugccccuggugagcagccagugcgugaacuucaccacccggacccagcugccaccagccuacaccaacagcuucacccggggcgucuacuaccccgacaagguguuccggagcagcguccugcacagcacccaggaccuguuccugcccuucuucagcaacgugaccugguuccacgccauccacgugagcggcaccaacggcaccaagcgguucgccaaccccgugcugcccuucaacgacggcguguacuucgccagcaccgagaagagcaacaucauccggggcuggaucuucggcaccacccuggacagcaagacccagagccugcugaucgugaauaacgccaccaacguggugaucaaggugugcgaguuccaguucugcaacgaccccuuccugggcguguacuaccacaagaacaacaagagcuggauggagagcgaguuccggguguacagcagcgccaacaacugcaccuucgaguacgugagccagcccuuccugauggaccuggagggcaagcagggcaacuucaagaaccugcgggaguucguguucaagaacaucgacggcuacuucaagaucuacagcaagcacaccccaaucaaccuggugcggggccugccccagggcuucucagcccuggagccccugguggaccugcccaucggcaucaacaucacccgguuccagacccugcacaucagcuaccugaccccaggcgacagcagcagcggguggacagcaggcgcggcugcuuacuacgugggcuaccugcagccccggaccuuccugcugaaguacaacgagaacggcaccaucaccgacgccguggacugcgcccuggacccucugagcgagaccaagugcacccugaagagcuucaccguggagaagggcaucuaccagaccagcaacuuccgggugcagcccaccgagagcaucgugcgguuccccaacaucaccaaccugugccccuucggcgagguguucaacgccacccgguucgccagcguguacgccuggaaccggaagcggaucagcaacugcguggccgacuacagcgugcuguacaacagcgccagcuucagcaccuucaagugcuacggcgugagccccaccaagcugaacgaccugugcuucaccaacguguacgccgacagcuucgugauccguggcgacgaggugcggcagaucgcacccggccagacaggcaacaucgccgacuacaacuacaagcugcccgacgacuucaccggcugcgugaucgccuggaacagcaacaaccucgacagcaaggugggcggcaacuacaacuaccuguaccggcuguuccggaagagcaaccugaagcccuucgagcgggacaucagcaccgagaucuaccaagccggcuccaccccuugcaacggcgugaagggcuucaacugcuacuucccucugcagagcuacggcuuccagcccaccuacggcgugggcuaccagcccuaccgggugguggugcugagcuucgagcugcugcacgccccagccaccguguguggccccaagaagagcaccaaccuggugaagaacaagugcgugaacuucaacuucaacggccuuaccggcaccggcgugcugaccgagagcaacaagaaauuccugcccuuucagcaguucggccgggacaucgccgacaccaccgacgcugugcgggauccccagacccuggagauccuggacaucaccccuugcagcuucggcggcgugagcgugaucaccccaggcaccaacaccagcaaccagguggccgugcuguaccagggcgugaacugcaccgaggugcccguggccauccacgccgaccagcugacacccaccuggcgggucuacagcaccggcagcaacguguuccagacccgggccgguugccugaucggcgccgagcacgugaacaacagcuacgagugcgacauccccaucggcgccggcaucugugccagcuaccagacccagaccaauucaccccggagggcaaggagcguggccagccagagcaucaucgccuacaccaugagccugggcguggagaacagcguggccuacagcaacaacagcaucgccauccccaccaacuucaccaucagcgugaccaccgagauucugcccgugagcaugaccaagaccagcguggacugcaccauguacaucugcggcgacagcaccgagugcagcaaccugcugcugcaguacggcagcuucugcacccagcugaaccgggcccugaccggcaucgccguggagcaggacaagaacacccaggagguguucgcccaggugaagcagaucuacaagaccccucccaucaaggacuucggcggcuucaacuucagccagauccugcccgaccccagcaagcccagcaagcggagcuucaucgaggaccugcuguucaacaaggugacccuagccgacgccggcuucaucaagcaguacggcgacugccucggcgacauagccgcccgggaccugaucugcgcccagaaguucaacggccugaccgugcugccuccccugcugaccgacgagaugaucgcccaguacaccagcgcccuguuagccggaaccaucaccagcggcuggacuuucggcgcuggagccgcucugcagauccccuucgccaugcagauggccuaccgguucaacggcaucggcgugacccagaacgugcuguacgagaaccagaagcugaucgccaaccaguucaacagcgccaucggcaagauccaggacagccugagcagcaccgcuagcgcccugggcaagcugcaggacguggugaaccagaacgcccaggcccugaacacccuggugaagcagcugagcagcaacuucggcgccaucagcagcgugcugaacgacauccugagccggcuggacaaggucgaggccgaggugcagaucgaccggcugaucacuggccggcugcagagccugcagaccuacgugacccagcagcugauccgggccgccgagauucgggccagcgccaaccuggccgccaccaagaugagcgagugcgugcugggccagagcaagcggguggacuucugcggcaagggcuaccaccugaugagcuuuccccagagcgcaccccacggagugguguuccugcacgugaccuacgugcccgcccaggagaagaacuucaccaccgccccagccaucugccacgacggcaaggcccacuuuccccgggagggcguguucgugagcaacggcacccacugguucgugacccagcggaacuucuacgagccccagaucaucaccaccgacaacaccuucgugagcggcaacugcgacguggugaucggcaucgugaacaacaccguguacgauccccugcagcccgagcuggacagcuucaaggaggagcuggacaaguacuucaagaaucacaccagccccgacguggaccugggcgacaucagcggcaucaacgccagcguggugaacauccagaaggagaucgaucggcugaacgagguggccaagaaccugaacgagagccugaucgaccugcaggagcugggcaaguacgagcaguacaucaaguggcccugguacaucuggcugggcuucaucgccggccugaucgccaucgugauggugaccaucaugcugugcugcaugaccagcugcugcagcugccugaagggcuguugcagcugcggcagcugcugcaaguucgacgaggacgacagcgagcccgugcugaagggcgugaagcugcacuacaccuga

SEQ ID NO: 23020 - RNA, 3822 nt, Artificial Sequence
  SARS-CoV-2/Wuhan/WIV05/2019__EPI_ISL_402128 spike protein CDS gc (1-1273)(E484K_D614G)
auguucguguuccuggugcugcugccccuggugagcagccagugcgugaaccugaccacccggacccagcugccaccagccuacaccaacagcuucacccggggcgucuacuaccccgacaagguguuccggagcagcguccugcacagcacccaggaccuguuccugcccuucuucagcaacgugaccugguuccacgccauccacgugagcggcaccaacggcaccaagcgguucgacaaccccgugcugcccuucaacgacggcguguacuucgccagcaccgagaagagcaacaucauccggggcuggaucuucggcaccacccuggacagcaagacccagagccugcugaucgugaauaacgccaccaacguggugaucaaggugugcgaguuccaguucugcaacgaccccuuccugggcguguacuaccacaagaacaacaagagcuggauggagagcgaguuccggguguacagcagcgccaacaacugcaccuucgaguacgugagccagcccuuccugauggaccuggagggcaagcagggcaacuucaagaaccugcgggaguucguguucaagaacaucgacggcuacuucaagaucuacagcaagcacaccccaaucaaccuggugcgggaucugccccagggcuucucagcccuggagccccugguggaccugcccaucggcaucaacaucacccgguuccagacccugcuggcccugcaccggagcuaccugaccccaggcgacagcagcagcggguggacagcaggcgcggcugcuuacuacgugggcuaccugcagccccggaccuuccugcugaaguacaacgagaacggcaccaucaccgacgccguggacugcgcccuggacccucugagcgagaccaagugcacccugaagagcuucaccguggagaagggcaucuaccagaccagcaacuuccgggugcagcccaccgagagcaucgugcgguuccccaacaucaccaaccugugccccuucggcgagguguucaacgccacccgguucgccagcguguacgccuggaaccggaagcggaucagcaacugcguggccgacuacagcgugcuguacaacagcgccagcuucagcaccuucaagugcuacggcgugagccccaccaagcugaacgaccugugcuucaccaacguguacgccgacagcuucgugauccguggcgacgaggugcggcagaucgcacccggccagacaggcaagaucgccgacuacaacuacaagcugcccgacgacuucaccggcugcgugaucgccuggaacagcaacaaccucgacagcaaggugggcggcaacuacaacuaccuguaccggcuguuccggaagagcaaccugaagcccuucgagcgggacaucagcaccgagaucuaccaagccggcuccaccccuugcaacggcgugaagggcuucaacugcuacuucccucugcagagcuacggcuuccagcccaccaacggcgugggcuaccagcccuaccgggugguggugcugagcuucgagcugcugcacgccccagccaccguguguggccccaagaagagcaccaaccuggugaagaacaagugcgugaacuucaacuucaacggccuuaccggcaccggcgugcugaccgagagcaacaagaaauuccugcccuuucagcaguucggccgggacaucgccgacaccaccgacgcugugcgggauccccagacccuggagauccuggacaucaccccuugcagcuucggcggcgugagcgugaucaccccaggcaccaacaccagcaaccagguggccgugcuguaccagggcgugaacugcaccgaggugcccguggccauccacgccgaccagcugacacccaccuggcgggucuacagcaccggcagcaacguguuccagacccgggccgguugccugaucggcgccgagcacgugaacaacagcuacgagugcgacauccccaucggcgccggcaucugugccagcuaccagacccagaccaauucaccccggagggcaaggagcguggccagccagagcaucaucgccuacaccaugagccugggcgccgagaacagcguggccuacagcaacaacagcaucgccauccccaccaacuucaccaucagcgugaccaccgagauucugcccgugagcaugaccaagaccagcguggacugcaccauguacaucugcggcgacagcaccgagugcagcaaccugcugcugcaguacggcagcuucugcacccagcugaaccgggcccugaccggcaucgccguggagcaggacaagaacacccaggagguguucgcccaggugaagcagaucuacaagaccccucccaucaaggacuucggcggcuucaacuucagccagauccugcccgaccccagcaagcccagcaagcggagcuucaucgaggaccugcuguucaacaaggugacccuagccgacgccggcuucaucaagcaguacggcgacugccucggcgacauagccgcccgggaccugaucugcgcccagaaguucaacggccugaccgugcugccuccccugcugaccgacgagaugaucgcccaguacaccagcgcccuguuagccggaaccaucaccagcggcuggacuuucggcgcuggagccgcucugcagauccccuucgccaugcagauggccuaccgguucaacggcaucggcgugacccagaacgugcuguacgagaaccagaagcugaucgccaaccaguucaacagcgccaucggcaagauccaggacagccugagcagcaccgcuagcgcccugggcaagcugcaggacguggugaaccagaacgcccaggcccugaacacccuggugaagcagcugagcagcaacuucggcgccaucagcagcgugcugaacgacauccugagccggcuggacaaggucgaggccgaggugcagaucgaccggcugaucacuggccggcugcagagccugcagaccuacgugacccagcagcugauccgggccgccgagauucgggccagcgccaaccuggccgccaccaagaugagcgagugcgugcugggccagagcaagcggguggacuucugcggcaagggcuaccaccugaugagcuuuccccagagcgcaccccacggagugguguuccugcacgugaccuacgugcccgcccaggagaagaacuucaccaccgccccagccaucugccacgacggcaaggcccacuuuccccgggagggcguguucgugagcaacggcacccacugguucgugacccagcggaacuucuacgagccccagaucaucaccaccgacaacaccuucgugagcggcaacugcgacguggugaucggcaucgugaacaacaccguguacgauccccugcagcccgagcuggacagcuucaaggaggagcuggacaaguacuucaagaaucacaccagccccgacguggaccugggcgacaucagcggcaucaacgccagcguggugaacauccagaaggagaucgaucggcugaacgagguggccaagaaccugaacgagagccugaucgaccugcaggagcugggcaaguacgagcaguacaucaaguggcccugguacaucuggcugggcuucaucgccggccugaucgccaucgugauggugaccaucaugcugugcugcaugaccagcugcugcagcugccugaagggcuguugcagcugcggcagcugcugcaaguucgacgaggacgacagcgagcccgugcugaagggcgugaagcugcacuacaccuga

SEQ ID NO: 23021 - RNA, 3822 nt, Artificial Sequence
  SARS-CoV-2/Wuhan/WIV05/2019__EPI_ISL_402128 spike protein CDS gc (1-1273)(L18F_T20N_P26S_D138Y_R190S_K417T_E484K_N501Y_D614G_H655Y _T1027I)
auguucguguuccuggugcugcugccccuggugagcagccagugcgugaacuucaccaaccggacccagcugccaagcgccuacaccaacagcuucacccggggcgucuacuaccccgacaagguguuccggagcagcguccugcacagcacccaggaccuguuccugcccuucuucagcaacgugaccugguuccacgccauccacgugagcggcaccaacggcaccaagcgguucgacaaccccgugcugcccuucaacgacggcguguacuucgccagcaccgagaagagcaacaucauccggggcuggaucuucggcaccacccuggacagcaagacccagagccugcugaucgugaauaacgccaccaacguggugaucaaggugugcgaguuccaguucugcaacuaccccuuccugggcguguacuaccacaagaacaacaagagcuggauggagagcgaguuccggguguacagcagcgccaacaacugcaccuucgaguacgugagccagcccuuccugauggaccuggagggcaagcagggcaacuucaagaaccugagcgaguucguguucaagaacaucgacggcuacuucaagaucuacagcaagcacaccccaaucaaccuggugcgggaucugccccagggcuucucagcccuggagccccugguggaccugcccaucggcaucaacaucacccgguuccagacccugcuggcccugcaccggagcuaccugaccccaggcgacagcagcagcggguggacagcaggcgcggcugcuuacuacgugggcuaccugcagccccggaccuuccugcugaaguacaacgagaacggcaccaucaccgacgccguggacugcgcccuggacccucugagcgagaccaagugcacccugaagagcuucaccguggagaagggcaucuaccagaccagcaacuuccgggugcagcccaccgagagcaucgugcgguuccccaacaucaccaaccugugccccuucggcgagguguucaacgccacccgguucgccagcguguacgccuggaaccggaagcggaucagcaacugcguggccgacuacagcgugcuguacaacagcgccagcuucagcaccuucaagugcuacggcgugagccccaccaagcugaacgaccugugcuucaccaacguguacgccgacagcuucgugauccguggcgacgaggugcggcagaucgcacccggccagacaggcaccaucgccgacuacaacuacaagcugcccgacgacuucaccggcugcgugaucgccuggaacagcaacaaccucgacagcaaggugggcggcaacuacaacuaccuguaccggcuguuccggaagagcaaccugaagcccuucgagcgggacaucagcaccgagaucuaccaagccggcuccaccccuugcaacggcgugaagggcuucaacugcuacuucccucugcagagcuacggcuuccagcccaccuacggcgugggcuaccagcccuaccgggugguggugcugagcuucgagcugcugcacgccccagccaccguguguggccccaagaagagcaccaaccuggugaagaacaagugcgugaacuucaacuucaacggccuuaccggcaccggcgugcugaccgagagcaacaagaaauuccugcccuuucagcaguucggccgggacaucgccgacaccaccgacgcugugcgggauccccagacccuggagauccuggacaucaccccuugcagcuucggcggcgugagcgugaucaccccaggcaccaacaccagcaaccagguggccgugcuguaccagggcgugaacugcaccgaggugcccguggccauccacgccgaccagcugacacccaccuggcgggucuacagcaccggcagcaacguguuccagacccgggccgguugccugaucggcgccgaguacgugaacaacagcuacgagugcgacauccccaucggcgccggcaucugugccagcuaccagacccagaccaauucaccccggagggcaaggagcguggccagccagagcaucaucgccuacaccaugagccugggcgccgagaacagcguggccuacagcaacaacagcaucgccauccccaccaacuucaccaucagcgugaccaccgagauucugcccgugagcaugaccaagaccagcguggacugcaccauguacaucugcggcgacagcaccgagugcagcaaccugcugcugcaguacggcagcuucugcacccagcugaaccgggcccugaccggcaucgccguggagcaggacaagaacacccaggagguguucgcccaggugaagcagaucuacaagaccccucccaucaaggacuucggcggcuucaacuucagccagauccugcccgaccccagcaagcccagcaagcggagcuucaucgaggaccugcuguucaacaaggugacccuagccgacgccggcuucaucaagcaguacggcgacugccucggcgacauagccgcccgggaccugaucugcgcccagaaguucaacggccugaccgugcugccuccccugcugaccgacgagaugaucgcccaguacaccagcgcccuguuagccggaaccaucaccagcggcuggacuuucggcgcuggagccgcucugcagauccccuucgccaugcagauggccuaccgguucaacggcaucggcgugacccagaacgugcuguacgagaaccagaagcugaucgccaaccaguucaacagcgccaucggcaagauccaggacagccugagcagcaccgcuagcgcccugggcaagcugcaggacguggugaaccagaacgcccaggcccugaacacccuggugaagcagcugagcagcaacuucggcgccaucagcagcgugcugaacgacauccugagccggcuggacaaggucgaggccgaggugcagaucgaccggcugaucacuggccggcugcagagccugcagaccuacgugacccagcagcugauccgggccgccgagauucgggccagcgccaaccuggccgccaucaagaugagcgagugcgugcugggccagagcaagcggguggacuucugcggcaagggcuaccaccugaugagcuuuccccagagcgcaccccacggagugguguuccugcacgugaccuacgugcccgcccaggagaagaacuucaccaccgccccagccaucugccacgacggcaaggcccacuuuccccgggagggcguguucgugagcaacggcacccacugguucgugacccagcggaacuucuacgagccccagaucaucaccaccgacaacaccuucgugagcggcaacugcgacguggugaucggcaucgugaacaacaccguguacgauccccugcagcccgagcuggacagcuucaaggaggagcuggacaaguacuucaagaaucacaccagccccgacguggaccugggcgacaucagcggcaucaacgccagcguggugaacauccagaaggagaucgaucggcugaacgagguggccaagaaccugaacgagagccugaucgaccugcaggagcugggcaaguacgagcaguacaucaaguggcccugguacaucuggcugggcuucaucgccggccugaucgccaucgugauggugaccaucaugcugugcugcaugaccagcugcugcagcugccugaagggcuguugcagcugcggcagcugcugcaaguucgacgaggacgacagcgagcccgugcugaagggcgugaagcugcacuacaccuga

SEQ ID NO: 23022 - RNA, 3822 nt, Artificial Sequence
  SARS-CoV-2/Wuhan/WIV05/2019__EPI_ISL_402128 spike protein CDS gc (1-1273)(S13I_W152C_L452R_D614G)
auguucguguuccuggugcugcugccccuggugagcauccagugcgugaaccugaccacccggacccagcugccaccagccuacaccaacagcuucacccggggcgucuacuaccccgacaagguguuccggagcagcguccugcacagcacccaggaccuguuccugcccuucuucagcaacgugaccugguuccacgccauccacgugagcggcaccaacggcaccaagcgguucgacaaccccgugcugcccuucaacgacggcguguacuucgccagcaccgagaagagcaacaucauccggggcuggaucuucggcaccacccuggacagcaagacccagagccugcugaucgugaauaacgccaccaacguggugaucaaggugugcgaguuccaguucugcaacgaccccuuccugggcguguacuaccacaagaacaacaagagcugcauggagagcgaguuccggguguacagcagcgccaacaacugcaccuucgaguacgugagccagcccuuccugauggaccuggagggcaagcagggcaacuucaagaaccugcgggaguucguguucaagaacaucgacggcuacuucaagaucuacagcaagcacaccccaaucaaccuggugcgggaucugccccagggcuucucagcccuggagccccugguggaccugcccaucggcaucaacaucacccgguuccagacccugcuggcccugcaccggagcuaccugaccccaggcgacagcagcagcggguggacagcaggcgcggcugcuuacuacgugggcuaccugcagccccggaccuuccugcugaaguacaacgagaacggcaccaucaccgacgccguggacugcgcccuggacccucugagcgagaccaagugcacccugaagagcuucaccguggagaagggcaucuaccagaccagcaacuuccgggugcagcccaccgagagcaucgugcgguuccccaacaucaccaaccugugccccuucggcgagguguucaacgccacccgguucgccagcguguacgccuggaaccggaagcggaucagcaacugcguggccgacuacagcgugcuguacaacagcgccagcuucagcaccuucaagugcuacggcgugagccccaccaagcugaacgaccugugcuucaccaacguguacgccgacagcuucgugauccguggcgacgaggugcggcagaucgcacccggccagacaggcaagaucgccgacuacaacuacaagcugcccgacgacuucaccggcugcgugaucgccuggaacagcaacaaccucgacagcaaggugggcggcaacuacaacuaccgcuaccggcuguuccggaagagcaaccugaagcccuucgagcgggacaucagcaccgagaucuaccaagccggcuccaccccuugcaacggcguggagggcuucaacugcuacuucccucugcagagcuacggcuuccagcccaccaacggcgugggcuaccagcccuaccgggugguggugcugagcuucgagcugcugcacgccccagccaccguguguggccccaagaagagcaccaaccuggugaagaacaagugcgugaacuucaacuucaacggccuuaccggcaccggcgugcugaccgagagcaacaagaaauuccugcccuuucagcaguucggccgggacaucgccgacaccaccgacgcugugcgggauccccagacccuggagauccuggacaucaccccuugcagcuucggcggcgugagcgugaucaccccaggcaccaacaccagcaaccagguggccgugcuguaccagggcgugaacugcaccgaggugcccguggccauccacgccgaccagcugacacccaccuggcgggucuacagcaccggcagcaacguguuccagacccgggccgguugccugaucggcgccgagcacgugaacaacagcuacgagugcgacauccccaucggcgccggcaucugugccagcuaccagacccagaccaauucaccccggagggcaaggagcguggccagccagagcaucaucgccuacaccaugagccugggcgccgagaacagcguggccuacagcaacaacagcaucgccauccccaccaacuucaccaucagcgugaccaccgagauucugcccgugagcaugaccaagaccagcguggacugcaccauguacaucugcggcgacagcaccgagugcagcaaccugcugcugcaguacggcagcuucugcacccagcugaaccgggcccugaccggcaucgccguggagcaggacaagaacacccaggagguguucgcccaggugaagcagaucuacaagaccccucccaucaaggacuucggcggcuucaacuucagccagauccugcccgaccccagcaagcccagcaagcggagcuucaucgaggaccugcuguucaacaaggugacccuagccgacgccggcuucaucaagcaguacggcgacugccucggcgacauagccgcccgggaccugaucugcgcccagaaguucaacggccugaccgugcugccuccccugcugaccgacgagaugaucgcccaguacaccagcgcccuguuagccggaaccaucaccagcggcuggacuuucggcgcuggagccgcucugcagauccccuucgccaugcagauggccuaccgguucaacggcaucggcgugacccagaacgugcuguacgagaaccagaagcugaucgccaaccaguucaacagcgccaucggcaagauccaggacagccugagcagcaccgcuagcgcccugggcaagcugcaggacguggugaaccagaacgcccaggcccugaacacccuggugaagcagcugagcagcaacuucggcgccaucagcagcgugcugaacgacauccugagccggcuggacaaggucgaggccgaggugcagaucgaccggcugaucacuggccggcugcagagccugcagaccuacgugacccagcagcugauccgggccgccgagauucgggccagcgccaaccuggccgccaccaagaugagcgagugcgugcugggccagagcaagcggguggacuucugcggcaagggcuaccaccugaugagcuuuccccagagcgcaccccacggagugguguuccugcacgugaccuacgugcccgcccaggagaagaacuucaccaccgccccagccaucugccacgacggcaaggcccacuuuccccgggagggcguguucgugagcaacggcacccacugguucgugacccagcggaacuucuacgagccccagaucaucaccaccgacaacaccuucgugagcggcaacugcgacguggugaucggcaucgugaacaacaccguguacgauccccugcagcccgagcuggacagcuucaaggaggagcuggacaaguacuucaagaaucacaccagccccgacguggaccugggcgacaucagcggcaucaacgccagcguggugaacauccagaaggagaucgaucggcugaacgagguggccaagaaccugaacgagagccugaucgaccugcaggagcugggcaaguacgagcaguacaucaaguggcccugguacaucuggcugggcuucaucgccggccugaucgccaucgugauggugaccaucaugcugugcugcaugaccagcugcugcagcugccugaagggcuguugcagcugcggcagcugcugcaaguucgacgaggacgacagcgagcccgugcugaagggcgugaagcugcacuacaccuga

SEQ ID NO: 23023 - RNA, 3822 nt, Artificial Sequence
  SARS-CoV-2/Wuhan/WIV05/2019__EPI_ISL_402128 spike protein CDS gc (1-1273)
auguucguguuccuggugcugcugccccuggugagcagccagugcgugaaccugaccacccggacccagcugcccccugccuacaccaacagcuucacccggggcguguacuaccccgacaagguguuccggagcagcgugcugcacagcacccaggaccuguuccugcccuucuucagcaacgugaccugguuccacgccauccacgugagcggcaccaacggcaccaagcgguucgacaacccagugcugcccuucaacgacggcguguacuucgccagcaccgagaagucaaacaucauccggggcuggaucuucggcaccacccuggacagcaagacacagagccugcugaucgugaacaacgccaccaacguggugaucaaggugugcgaguuucaguucugcaacgaccccuuccugggcguguacuaccacaagaacaacaagagcuggauggagagcgaguuccgggucuacagcagcgcuaacaauugcaccuucgaguacgugagccagcccuuccugauggaccucgagggcaagcagggcaacuucaagaaccugcgggaguucguguucaagaacaucgauggcuacuucaagaucuacagcaagcacacccccaucaaccuggugcgggaccugccccagggauucagcgcccuggagccucugguggaccugcccaucggcaucaacaucaccagguuccagacccugcuggcccugcaccggagcuaccugacccccggcgacagcagcagcggcuggaccgccggcgccgccgcauacuacgugggcuaccugcagccacggaccuuccugcugaaguacaacgagaacggcaccaucaccgacgccguggacugcgcccuggacccccugagcgagaccaagugcacccuaaagagcuucaccguggagaagggcaucuaccagaccagcaacuuccgggugcagcccacugagagcaucgugcgguuccccaacauuaccaaccugugucccuucggcgagguguucaacgccacccgguucgccagcguguacgccuggaaccggaagcggaucagcaacugcguggccgacuacagcgugcuguacaacagcgccagcuucagcaccuucaagugcuacggcgugagcccuaccaagcugaacgaccugugcuucaccaacguguacgcugacagcuucgugauccggggcgacgaggugcggcagaucgcccccggccagaccggcaagaucgccgacuacaacuacaagcugcccgacgacuucaccggcugcgugaucgccuggaacagcaacaaccuggacagcaaggugggcggcaacuacaacuaccuguaccggcuguuccguaagagcaaccugaagccauucgagcgggacaucagcaccgagaucuaccaggccggcagcacccccugcaacgguguggagggcuuuaacugcuacuucccccugcagagcuacggcuuccagcccaccaacggcgugggcuaccagcccuaccgggugguggugcugagcuucgagcugcugcacgcccccgccaccgugugcggcccuaaaaagagcaccaaccuggugaagaacaagugcgugaacuucaauuucaacggccugaccggcaccggcgugcugaccgagagcaacaagaaguuccugcccuuccagcaguucggccgggauaucgccgacaccaccgacgcagugcgggacccccagacccuggagauccuggacaucaccccaugcagcuucggcggcgugagcgucaucacccccggcacaaacaccagcaaccagguggccgugcuguaccaggacgugaacugcaccgaggugcccguggccauccacgccgaccagcugacccccaccuggcggguguacagcaccggaagcaacguguuccagacccgggccggcugccugaucggcgccgagcacgugaacaacuccuacgagugcgacauccccaucggcgcuggcaucugcgccagcuaccagacccagaccaacagcccccggcgggcccggagcguggccagccagagcaucaucgccuacaccaugagcuuaggcgccgagaacagcguggccuacagcaacaacagcaucgcgaucccuaccaacuucaccaucagcgugaccaccgagauacugcccgugagcaugaccaagaccagcguggacuguaccauguacaucugcggcgacagcaccgagugcagcaaccugcugcugcaguacggcagcuucugcacccagcugaaccgggcccugaccggcaucgccguggagcaggacaagaacacccaagagguguucgcccaggugaagcagaucuacaagacucccccaaucaaggacuucggcggcuucaacuucagccagauccugcccgaccccagcaagcccagcaagcggagcuucaucgaggaccugcuguucaacaaggugacccuggccgacgccggcuucaucaagcaguacggcgauugccugggcgacaucgccgcucgggaccugaucugcgcccagaaguucaacgggcugaccgugcugcccccucugcugaccgacgagaugaucgcccaguacaccagcgcccugcuugccggcaccaucaccagcggcuggaccuucggcgccggcgcagcccugcagauccccuucgccaugcagauggccuaccgguucaacggcaucggcgugacccagaacgugcuguacgagaaccagaagcugaucgccaaccaguucaacagcgccaucggcaagauccaggacagccugagcagcaccgccagcgcccugggcaagcugcaggacguggugaaccagaacgcucaggcccugaacacccuggugaagcagcugagcagcaacuucggcgccaucagcucagugcugaaugacauccugagcaggcuggacaagguggaggccgaggugcagaucgaccggcugaucaccggccggcugcagagccugcagaccuacgugacccagcagcugauccgggccgccgagauccgggccagcgccaaccuggcagccaccaagaugagcgagugcgugcugggccagagcaagcggguggacuuuugcggcaagggcuaccaccugaugagcuucccccagagcgccccacacggcgugguguuccuccacgucacauacgugcccgcccaggagaagaacuucaccaccgcccccgccauuugccacgacggcaaggcucacuucccccgggagggcguguucgugagcaacggaacccacugguucgugacccagcggaacuucuacgagccccagaucaucaccaccgacaacaccuucgugagcggcaacugcgacguggugaucggcaucgugaacaacaccguguacgacccccugcagccugagcuggacagcuucaaggaggagcuggacaaguacuucaagaaccacaccagccccgauguggaccugggcgacaucagcggcaucaacgccagcguggugaacauccagaaggagaucgaccggcugaacgagguggccaagaaccugaacgagagccugaucgaccugcaggagcugggcaaguacgagcaguacaucaaguggcccugguacaucuggcugggcuucaucgccggccugaucgccaucgugauggugaccaucaugcugugcugcaugaccagcugcuguagcugccugaagggcugcugcagcugcggcagcugcugcaaguucgacgaggacgacagcgagccagugcugaagggcgugaagcugcacuacaccuga

SEQ ID NO: 23024 - RNA, 3822 nt, Artificial Sequence
  SARS-CoV-2/Wuhan/WIV05/2019__EPI_ISL_402128 spike protein CDS gc (1-1273)(D614G)
auguucguguuccuggugcugcugccccuggugagcagccagugcgugaaccugaccacccggacccagcugcccccugccuacaccaacagcuucacccggggcguguacuaccccgacaagguguuccggagcagcgugcugcacagcacccaggaccuguuccugcccuucuucagcaacgugaccugguuccacgccauccacgugagcggcaccaacggcaccaagcgguucgacaacccagugcugcccuucaacgacggcguguacuucgccagcaccgagaagucaaacaucauccggggcuggaucuucggcaccacccuggacagcaagacacagagccugcugaucgugaacaacgccaccaacguggugaucaaggugugcgaguuucaguucugcaacgaccccuuccugggcguguacuaccacaagaacaacaagagcuggauggagagcgaguuccgggucuacagcagcgcuaacaauugcaccuucgaguacgugagccagcccuuccugauggaccucgagggcaagcagggcaacuucaagaaccugcgggaguucguguucaagaacaucgauggcuacuucaagaucuacagcaagcacacccccaucaaccuggugcgggaccugccccagggauucagcgcccuggagccucugguggaccugcccaucggcaucaacaucaccagguuccagacccugcuggcccugcaccggagcuaccugacccccggcgacagcagcagcggcuggaccgccggcgccgccgcauacuacgugggcuaccugcagccacggaccuuccugcugaaguacaacgagaacggcaccaucaccgacgccguggacugcgcccuggacccccugagcgagaccaagugcacccuaaagagcuucaccguggagaagggcaucuaccagaccagcaacuuccgggugcagcccacugagagcaucgugcgguuccccaacauuaccaaccugugucccuucggcgagguguucaacgccacccgguucgccagcguguacgccuggaaccggaagcggaucagcaacugcguggccgacuacagcgugcuguacaacagcgccagcuucagcaccuucaagugcuacggcgugagcccuaccaagcugaacgaccugugcuucaccaacguguacgcugacagcuucgugauccggggcgacgaggugcggcagaucgcccccggccagaccggcaagaucgccgacuacaacuacaagcugcccgacgacuucaccggcugcgugaucgccuggaacagcaacaaccuggacagcaaggugggcggcaacuacaacuaccuguaccggcuguuccguaagagcaaccugaagccauucgagcgggacaucagcaccgagaucuaccaggccggcagcacccccugcaacgguguggagggcuuuaacugcuacuucccccugcagagcuacggcuuccagcccaccaacggcgugggcuaccagcccuaccgggugguggugcugagcuucgagcugcugcacgcccccgccaccgugugcggcccuaaaaagagcaccaaccuggugaagaacaagugcgugaacuucaauuucaacggccugaccggcaccggcgugcugaccgagagcaacaagaaguuccugcccuuccagcaguucggccgggauaucgccgacaccaccgacgcagugcgggacccccagacccuggagauccuggacaucaccccaugcagcuucggcggcgugagcgucaucacccccggcacaaacaccagcaaccagguggccgugcuguaccagggagugaacugcaccgaggugcccguggccauccacgccgaccagcugacccccaccuggcggguguacagcaccggcagcaacguguuccagacccgggccggcugccugaucggcgccgagcacgugaacaacuccuacgagugcgacauccccaucggcgcuggcaucugcgccagcuaccagacccagaccaacagcccccggcgggcccggagcguggccagccagagcaucaucgccuacaccaugagcuuaggcgccgagaacagcguggccuacagcaacaacagcaucgcgaucccuaccaacuucaccaucagcgugaccaccgagauacugcccgugagcaugaccaagaccagcguggacuguaccauguacaucugcggcgacagcaccgagugcagcaaccugcugcugcaguacggcagcuucugcacccagcugaaccgggcccugaccggcaucgccguggagcaggacaagaacacccaagagguguucgcccaggugaagcagaucuacaagacucccccaaucaaggacuucggcggcuucaacuucagccagauccugcccgaccccagcaagcccagcaagcggagcuucaucgaggaccugcuguucaacaaggugacccuggccgacgccggcuucaucaagcaguacggcgacugccugggggauaucgccgcucgggaccugaucugcgcccagaaguucaacggccugaccgugcugcccccucugcugaccgacgagaugaucgcccaguacaccagcgcccugcuugccggcaccaucaccagcggcuggaccuucggcgccggcgcagcccugcagauccccuucgccaugcagauggccuaccgguucaacggcaucggcgugacccagaacgugcuguacgagaaccagaagcugaucgccaaccaguucaacagcgccaucggcaagauccaggacagccugagcagcaccgccagcgcccugggcaagcugcaggacguggugaaccagaacgcucaggcccugaacacccuggugaagcagcugagcagcaacuucggcgccaucagcucagugcugaaugacauccugagcaggcuggacaagguggaggccgaggugcagaucgaccggcugaucaccggccggcugcagagccugcagaccuacgugacccagcagcugauccgggccgccgagauccgggccagcgccaaccuggcagccaccaagaugagcgagugcgugcugggccagagcaagcggguggacuuuugcggcaagggcuaccaccugaugagcuucccccagagcgccccacacggcgugguguuccuccacgucacauacgugcccgcccaggagaagaacuucaccaccgcccccgccauuugccacgacggcaaggcucacuucccccgggagggaguguucgugagcaacggcacccacugguucgugacccagcggaacuucuacgagccccagaucaucaccaccgacaacaccuucgugagcggcaacugcgacguggugaucggcaucgugaacaacaccguguacgacccccugcagccugagcuggacagcuucaaggaggagcuggacaaguacuucaagaaccacaccagccccgacguggaucugggcgacaucagcggcaucaacgccagcguggugaacauccagaaggagaucgaccggcugaacgagguggccaagaaccugaacgagagccugaucgaccugcaggagcugggcaaguacgagcaguacaucaaguggcccugguacaucuggcugggcuucaucgccggccugaucgccaucgugauggugaccaucaugcugugcugcaugaccagcugcuguagcugccugaagggcugcugcagcugcggcagcugcugcaaguucgacgaggacgacagcgagccagugcugaagggcgugaagcugcacuacaccuga

SEQ ID NO: 23025 - RNA, 3822 nt, Artificial Sequence
  SARS-CoV-2/Wuhan/WIV05/2019__EPI_ISL_402128 spike protein CDS gc (1-1273)(A222V_D614G)
auguucguguuccuggugcugcugccccuggugagcagccagugcgugaaccugaccacccggacccagcugcccccugccuacaccaacagcuucacccggggcguguacuaccccgacaagguguuccggagcagcgugcugcacagcacccaggaccuguuccugcccuucuucagcaacgugaccugguuccacgccauccacgugagcggcaccaacggcaccaagcgguucgacaacccagugcugcccuucaacgacggcguguacuucgccagcaccgagaagucaaacaucauccggggcuggaucuucggcaccacccuggacagcaagacacagagccugcugaucgugaacaacgccaccaacguggugaucaaggugugcgaguuucaguucugcaacgaccccuuccugggcguguacuaccacaagaacaacaagagcuggauggagagcgaguuccgggucuacagcagcgcuaacaauugcaccuucgaguacgugagccagcccuuccugauggaccucgagggcaagcagggcaacuucaagaaccugcgggaguucguguucaagaacaucgauggcuacuucaagaucuacagcaagcacacccccaucaaccuggugcgggaccugccccagggauucagcgugcuggagccucugguggaccugcccaucggcaucaacaucaccagguuccagacccugcuggcccugcaccggagcuaccugacccccggcgacagcagcagcggcuggaccgccggcgccgccgccuacuacgugggcuaccugcagccacggaccuuccugcugaaguacaacgagaacggcaccaucaccgacgcaguggacugcgcccuggacccccugagcgagaccaagugcacccuaaagagcuucaccguggagaagggcaucuaccagaccagcaacuuccgggugcagcccacugagagcaucgugcgguuccccaacauuaccaaccugugucccuucggcgagguguucaacgccacccgguucgccagcguguacgccuggaaccggaagcggaucagcaacugcguggccgacuacagcgugcuguacaacagcgccagcuucagcaccuucaagugcuacggcgugagcccuaccaagcugaacgaccugugcuucaccaacguguacgccgacagcuucgugauccggggcgacgaggugcggcagaucgcucccggccagaccggcaagaucgccgacuacaacuacaagcugcccgacgacuucaccggcugcgugaucgccuggaacagcaacaaccuggacagcaaggugggcggcaacuacaacuaccuguaccggcuguuccguaagagcaaccugaagccauucgagcgggacaucagcaccgagaucuaccaggccggcagcacccccugcaacgguguggagggcuuuaacugcuacuucccccugcagagcuacggcuuccagcccaccaacggcgugggcuaccagcccuaccgggugguggugcugagcuucgagcugcugcacgcccccgccaccgugugcggcccuaaaaagagcaccaaccuggugaagaacaagugcgugaacuucaauuucaacggccugaccggcaccggcgugcugaccgagagcaacaagaaguuccugcccuuccagcaguucggccgggauaucgccgacaccaccgacgccgugcgggacccccagacccuggagauccuggacaucaccccaugcagcuucggcggcgucagcgugaucacccccggcacaaacaccagcaaccagguggcagugcuguaccagggagugaacugcaccgaggugcccguggccauccacgccgaccagcugacccccaccuggcggguguacagcaccggcagcaacguguuccagacccgggccggcugccugaucggcgccgagcacgugaacaacuccuacgagugcgacauccccaucggcgccggcaucugcgcuagcuaccagacccagaccaacagcccccggcgggcccggagcguggccagccagagcaucaucgccuacaccaugagcuuaggcgccgagaacagcguggccuacagcaacaacagcaucgccaucccuaccaacuucaccaucagcgugaccaccgagauacugcccgugagcaugaccaagaccagcguggacuguaccauguacaucugcggcgacagcaccgagugcagcaaccugcugcugcaguacggcagcuucugcacccagcugaaccgggcgcugaccggcaucgccguggagcaggacaagaacacccaagagguguucgcccaggugaagcagaucuacaagacucccccaaucaaggacuucggcggcuucaacuucagccagauccugcccgaccccagcaagcccagcaagcggagcuucaucgaggaccugcuguucaacaaggugacccuggccgacgccggcuucaucaagcaguacggcgacugccugggggauaucgccgcccgggaccugaucugcgcucagaaguucaacggccugaccgugcugcccccucugcugaccgacgagaugaucgcccaguacaccagcgcccugcuugccggcaccaucaccagcggcuggaccuucggcgccggcgccgcacugcagauccccuucgccaugcagauggccuaccgguucaacggcaucggcgugacccagaacgugcuguacgagaaccagaagcugaucgccaaccaguucaacagcgccaucggcaagauccaggacagccugagcagcaccgccagcgcccugggcaagcugcaggacguggugaaccagaacgcccaggcucugaacacccuggugaagcagcugagcagcaacuucggcgccaucagcucagugcugaaugacauccugagcaggcuggacaagguggaggccgaggugcagaucgaccggcugaucaccggccggcugcagagccugcagaccuacgugacccagcagcugauccgggccgccgagauccgggccagcgccaaccuggccgcaaccaagaugagcgagugcgugcugggccagagcaagcggguggacuuuugcggcaagggcuaccaccugaugagcuucccccagagcgccccacacggcguggucuuccuccacgugacauacgugcccgcccaggagaagaacuucaccaccgcccccgccauuugccacgacggcaaggcccacuucccccgggagggaguguucgugagcaacggcacccacugguucgugacccagcggaacuucuacgagccccagaucaucaccaccgacaacaccuucgugagcggcaacugcgacguggugaucggcaucgugaacaacaccguguacgacccccugcagccugagcuggacagcuucaaggaggagcuggacaaguacuucaagaaccacaccagccccgacguggaucugggcgacaucagcggcaucaacgcuagcguggugaacauccagaaggagaucgaccggcugaacgagguggccaagaaccugaacgagagccugaucgaccugcaggagcugggcaaguacgagcaguacaucaaguggcccugguacaucuggcugggcuucaucgccggccugaucgccaucgugauggugaccaucaugcugugcugcaugaccagcugcuguagcugccugaagggcugcugcagcugcggcagcugcugcaaguucgacgaggacgacagcgagccagugcugaagggcgugaagcugcacuacaccuga

SEQ ID NO: 23026 - RNA, 3822 nt, Artificial Sequence
  SARS-CoV-2/Wuhan/WIV05/2019__EPI_ISL_402128 spike protein CDS gc (1-1273)(N439K_D614G)
auguucguguuccuggugcugcugccccuggugagcagccagugcgugaaccugaccacccggacccagcugcccccugccuacaccaacagcuucacccggggcguguacuaccccgacaagguguuccggagcagcgugcugcacagcacccaggaccuguuccugcccuucuucagcaacgugaccugguuccacgccauccacgugagcggcaccaacggcaccaagcgguucgacaacccagugcugcccuucaacgacggcguguacuucgccagcaccgagaagucaaacaucauccggggcuggaucuucggcaccacccuggacagcaagacacagagccugcugaucgugaacaacgccaccaacguggugaucaaggugugcgaguuucaguucugcaacgaccccuuccugggcguguacuaccacaagaacaacaagagcuggauggagagcgaguuccgggucuacagcagcgcuaacaauugcaccuucgaguacgugagccagcccuuccugauggaccucgagggcaagcagggcaacuucaagaaccugcgggaguucguguucaagaacaucgauggcuacuucaagaucuacagcaagcacacccccaucaaccuggugcgggaccugccccagggauucagcgcccuggagccucugguggaccugcccaucggcaucaacaucaccagguuccagacccugcuggcccugcaccggagcuaccugacccccggcgacagcagcagcggcuggaccgccggcgccgccgcauacuacgugggcuaccugcagccacggaccuuccugcugaaguacaacgagaacggcaccaucaccgacgccguggacugcgcccuggacccccugagcgagaccaagugcacccuaaagagcuucaccguggagaagggcaucuaccagaccagcaacuuccgggugcagcccacugagagcaucgugcgguuccccaacauuaccaaccugugucccuucggcgagguguucaacgccacccgguucgccagcguguacgccuggaaccggaagcggaucagcaacugcguggccgacuacagcgugcuguacaacagcgccagcuucagcaccuucaagugcuacggcgugagcccuaccaagcugaacgaccugugcuucaccaacguguacgcugacagcuucgugauccggggcgacgaggugcggcagaucgcccccggccagaccggcaagaucgccgacuacaacuacaagcugcccgacgacuucaccggcugcgugaucgccuggaacagcaagaaccuggacagcaaggugggcggcaacuacaacuaccuguaccggcuguuccguaagagcaaccugaagccauucgagcgggacaucagcaccgagaucuaccaggccggcagcacccccugcaacgguguggagggcuuuaacugcuacuucccccugcagagcuacggcuuccagcccaccaacggcgugggcuaccagcccuaccgggugguggugcugagcuucgagcugcugcacgcccccgccaccgugugcggcccuaaaaagagcaccaaccuggugaagaacaagugcgugaacuucaacuucaauggccugaccggcaccggcgugcugaccgagagcaacaagaaguuccugcccuuccagcaguucggccgggauaucgccgacaccaccgacgcagugcgggacccccagacccuggagauccuggacaucaccccaugcagcuucggcggcgugagcgucaucacccccggcacaaacaccagcaaccagguggccgugcuguaccagggagugaacugcaccgaggugcccguggccauccacgccgaccagcugacccccaccuggcggguguacagcaccggcagcaacguguuccagacccgggccggcugccugaucggcgccgagcacgugaacaacuccuacgagugcgacauccccaucggcgcuggcaucugcgccagcuaccagacccagaccaacagcccccggcgggcccggagcguggccagccagagcaucaucgccuacaccaugagcuuaggcgccgagaacagcguggccuacagcaacaacagcaucgcgaucccuaccaacuucaccaucagcgugaccaccgagauacugcccgugagcaugaccaagaccagcguggacuguaccauguacaucugcggcgacagcaccgagugcagcaaccugcugcugcaguacggcagcuucugcacccagcugaaccgggcccugaccggcaucgccguggagcaggacaagaacacccaagagguguucgcccaggugaagcagaucuacaagacucccccaaucaaggacuucggcggcuucaacuucagccagauccugcccgaccccagcaagcccagcaagcggagcuucaucgaggaccugcuguucaacaaggugacccuggccgacgccggcuucaucaagcaguacggcgacugccugggggauaucgccgcucgggaccugaucugcgcccagaaguucaacggccugaccgugcugcccccucugcugaccgacgagaugaucgcccaguacaccagcgcccugcuugccggcaccaucaccagcggcuggaccuucggcgccggcgcagcccugcagauccccuucgccaugcagauggccuaccgguucaacggcaucggcgugacccagaacgugcuguacgagaaccagaagcugaucgccaaccaguucaacagcgccaucggcaagauccaggacagccugagcagcaccgccagcgcccugggcaagcugcaggacguggugaaccagaacgcucaggcccugaacacccuggugaagcagcugagcagcaacuucggcgccaucagcucagugcugaacgacauccugagcaggcuggacaagguggaggccgaggugcagaucgaccggcugaucaccggccggcugcagagccugcagaccuacgugacccagcagcugauccgggccgccgagauccgggccagcgccaaucuggcagccaccaagaugagcgagugcgugcugggccagagcaagcggguggacuuuugcggcaagggcuaccaccugaugagcuucccccagagcgccccacacggcgugguguuccuccacgucacauacgugcccgcccaggagaagaacuucaccaccgcccccgccauuugccacgacggcaaggcucacuucccccgggagggaguguucgugagcaacggcacccacugguucgugacccagcggaacuucuacgagccccagaucaucaccaccgacaacaccuucgugagcggcaacugcgacguggugaucggcaucgugaacaacaccguguacgacccccugcagccugagcuggacagcuucaaggaggagcuggacaaguacuucaagaaccacaccagccccgacguggaucugggcgacaucagcggcaucaacgccagcguggugaacauccagaaggagaucgaccggcugaacgagguggccaagaaccugaacgagagccugaucgaccugcaggagcugggcaaguacgagcaguacaucaaguggcccugguacaucuggcugggcuucaucgccggccugaucgccaucgugauggugaccaucaugcugugcugcaugaccagcugcuguagcugccugaagggcugcugcagcugcggcagcugcugcaaguucgacgaggacgacagcgagccagugcugaagggcgugaagcugcacuacaccuga

SEQ ID NO: 23027 - RNA, 3822 nt, Artificial Sequence
  SARS-CoV-2/Wuhan/WIV05/2019__EPI_ISL_402128 spike protein CDS gc (1-1273)(S477N_D614G)
auguucguguuccuggugcugcugccccuggugagcagccagugcgugaaccugaccacccggacccagcugcccccugccuacaccaacagcuucacccggggcguguacuaccccgacaagguguuccggagcagcgugcugcacagcacccaggaccuguuccugcccuucuucagcaacgugaccugguuccacgccauccacgugagcggcaccaacggcaccaagcgguucgacaacccagugcugcccuucaacgacggcguguacuucgccagcaccgagaagucaaacaucauccggggcuggaucuucggcaccacccuggacagcaagacacagagccugcugaucgugaacaacgccaccaacguggugaucaaggugugcgaguuucaguucugcaacgaccccuuccugggcguguacuaccacaagaacaacaagagcuggauggagagcgaguuccgggucuacagcagcgcuaacaauugcaccuucgaguacgugagccagcccuuccugauggaccucgagggcaagcagggcaacuucaagaaccugcgggaguucguguucaagaacaucgauggcuacuucaagaucuacagcaagcacacccccaucaaccuggugcgggaccugccccagggauucagcgcccuggagccucugguggaccugcccaucggcaucaacaucaccagguuccagacccugcuggcccugcaccggagcuaccugacccccggcgacagcagcagcggcuggaccgccggcgccgccgcauacuacgugggcuaccugcagccacggaccuuccugcugaaguacaacgagaacggcaccaucaccgacgccguggacugcgcccuggacccccugagcgagaccaagugcacccuaaagagcuucaccguggagaagggcaucuaccagaccagcaacuuccgggugcagcccacugagagcaucgugcgguuccccaacauuaccaaccugugucccuucggcgagguguucaacgccacccgguucgccagcguguacgccuggaaccggaagcggaucagcaacugcguggccgacuacagcgugcuguacaacagcgccagcuucagcaccuucaagugcuacggcgugagcccuaccaagcugaacgaccugugcuucaccaacguguacgcugacagcuucgugauccggggcgacgaggugcggcagaucgcccccggccagaccggcaagaucgccgacuacaacuacaagcugcccgacgacuucaccggcugcgugaucgccuggaacagcaacaaccuggacagcaaggugggcggcaacuacaacuaccuguaccggcuguuccguaagagcaaccugaagccauucgagcgggacaucagcaccgagaucuaccaggccggcaacacccccugcaacgguguggagggcuuuaacugcuacuucccccugcagagcuacggcuuccagcccaccaacggcgugggcuaccagcccuaccgggugguggugcugagcuucgagcugcugcacgcccccgccaccgugugcggcccuaaaaagagcaccaaccuggugaagaacaagugcgugaauuucaacuucaacggccugaccggcaccggcgugcugaccgagagcaacaagaaguuccugcccuuccagcaguucggccgggauaucgccgacaccaccgacgcagugcgggacccccagacccuggagauccuggacaucaccccaugcagcuucggcggcgugagcgucaucacccccggcacaaacaccagcaaccagguggccgugcuguaccagggagugaacugcaccgaggugcccguggccauccacgccgaccagcugacccccaccuggcggguguacagcaccggcagcaacguguuccagacccgggccggcugccugaucggcgccgagcacgugaacaacagcuacgagugcgacauccccaucggcgcuggcaucugcgccuccuaccagacccagaccaacagcccccggcgggcccggagcguggccagccagagcaucaucgccuacaccaugagcuuaggcgccgagaacagcguggccuacagcaacaacagcaucgcgaucccuaccaacuucaccaucagcgugaccaccgagauacugcccgugagcaugaccaagaccagcguggacuguaccauguacaucugcggcgacagcaccgagugcagcaaccugcugcugcaguacggcagcuucugcacccagcugaaccgggcccugaccggcaucgccguggagcaggacaagaacacccaagagguguucgcccaggugaagcagaucuacaagacucccccaaucaaggacuucggcggcuucaacuucagccagauccugcccgaccccagcaagcccagcaagcggagcuucaucgaggaccugcuguucaacaaggugacccuggccgacgccggcuucaucaagcaguacggcgacugccugggggauaucgccgcucgggaccugaucugcgcccagaaguucaacggccugaccgugcugcccccucugcugaccgacgagaugaucgcccaguacaccagcgcccugcuugccggcaccaucaccagcggcuggaccuucggcgccggcgcagcccugcagauccccuucgccaugcagauggccuaccgguucaacggcaucggcgugacccagaacgugcuguacgagaaccagaagcugaucgccaaccaguucaacagcgccaucggcaagauccaggacagccugagcagcaccgccagcgcccugggcaagcugcaggacguggugaaccagaacgcucaggcccugaacacccuggugaagcagcugagcagcaauuucggcgccaucagcagcgugcugaacgacauccugucaaggcuggacaagguggaggccgaggugcagaucgaccggcugaucaccggccggcugcagagccugcagaccuacgugacccagcagcugauccgggccgccgagauccgggccagcgccaaccuggcagccaccaagaugagcgagugcgugcugggccagagcaagcggguggacuuuugcggcaagggcuaccaccugaugagcuucccccagagcgccccacacggcgugguguuccuccacgucacauacgugcccgcccaggagaagaacuucaccaccgcccccgccauuugccacgacggcaaggcucacuucccccgggagggaguguucgugagcaacggcacccacugguucgugacccagcggaacuucuacgagccccagaucaucaccaccgacaacaccuucgugagcggcaacugcgacguggugaucggcaucgugaacaacaccguguacgacccccugcagccugagcuggacagcuucaaggaggagcuggacaaguacuucaagaaccacaccagccccgacguggaucugggcgacaucagcggcaucaacgccagcguggugaacauccagaaggagaucgaccggcugaacgagguggccaagaaccugaacgagagccugaucgaccugcaggagcugggcaaguacgagcaguacaucaaguggcccugguacaucuggcugggcuucaucgccggccugaucgccaucgugauggugaccaucaugcugugcugcaugaccagcugcuguagcugccugaagggcugcugcagcugcggcagcugcugcaaguucgacgaggacgacagcgagccagugcugaagggcgugaagcugcacuacaccuga

SEQ ID NO: 23028 - RNA, 3822 nt, Artificial Sequence
  SARS-CoV-2/Wuhan/WIV05/2019__EPI_ISL_402128 spike protein CDS gc (1-1273)(N501Y_D614G)
auguucguguuccuggugcugcugccccuggugagcagccagugcgugaaccugaccacccggacccagcugcccccugccuacaccaacagcuucacccggggcguguacuaccccgacaagguguuccggagcagcgugcugcacagcacccaggaccuguuccugcccuucuucagcaacgugaccugguuccacgccauccacgugagcggcaccaacggcaccaagcgguucgacaacccagugcugcccuucaacgacggcguguacuucgccagcaccgagaagucaaacaucauccggggcuggaucuucggcaccacccuggacagcaagacacagagccugcugaucgugaacaacgccaccaacguggugaucaaggugugcgaguuucaguucugcaacgaccccuuccugggcguguacuaccacaagaacaacaagagcuggauggagagcgaguuccgggucuacagcagcgcuaacaauugcaccuucgaguacgugagccagcccuuccugauggaccucgagggcaagcagggcaacuucaagaaccugcgggaguucguguucaagaacaucgauggcuacuucaagaucuacagcaagcacacccccaucaaccuggugcgggaccugccccagggauucagcgcccuggagccucugguggaccugcccaucggcaucaacaucaccagguuccagacccugcuggcccugcaccggagcuaccugacccccggcgacagcagcagcggcuggaccgccggcgccgccgcauacuacgugggcuaccugcagccacggaccuuccugcugaaguacaacgagaacggcaccaucaccgacgccguggacugcgcccuggacccccugagcgagaccaagugcacccuaaagagcuucaccguggagaagggcaucuaccagaccagcaacuuccgggugcagcccacugagagcaucgugcgguuccccaacauuaccaaccugugucccuucggcgagguguucaacgccacccgguucgccagcguguacgccuggaaccggaagcggaucagcaacugcguggccgacuacagcgugcuguacaacagcgccagcuucagcaccuucaagugcuacggcgugagcccuaccaagcugaacgaccugugcuucaccaacguguacgcugacagcuucgugauccggggcgacgaggugcggcagaucgcccccggccagaccggcaagaucgccgacuacaacuacaagcugcccgacgacuucaccggcugcgugaucgccuggaacagcaacaaccuggacagcaaggugggcggcaacuacaacuaccuguaccggcuguuccguaagagcaaccugaagccauucgagcgggacaucagcaccgagaucuaccaggccggcagcacccccugcaacgguguggagggcuuuaacugcuacuucccccugcagagcuacggcuuccagcccaccuacggcgugggcuaccagcccuaccgggugguggugcugagcuucgagcugcugcacgcccccgccaccgugugcggcccuaaaaagagcaccaaccuggugaagaacaagugcgugaacuucaacuucaauggccugaccggcaccggcgugcugaccgagagcaacaagaaguuccugcccuuccagcaguucggccgggauaucgccgacaccaccgacgcagugcgggacccccagacccuggagauccuggacaucaccccaugcagcuucggcggcgugagcgucaucacccccggcacaaacaccagcaaccagguggccgugcuguaccagggagugaacugcaccgaggugcccguggccauccacgccgaccagcugacccccaccuggcggguguacagcaccggcagcaacguguuccagacccgggccggcugccugaucggcgccgagcacgugaacaacuccuacgagugcgacauccccaucggcgcuggcaucugcgccagcuaccagacccagaccaacagcccccggcgggcccggagcguggccagccagagcaucaucgccuacaccaugagcuuaggcgccgagaacagcguggccuacagcaacaacagcaucgcgaucccuaccaacuucaccaucagcgugaccaccgagauacugcccgugagcaugaccaagaccagcguggacuguaccauguacaucugcggcgacagcaccgagugcagcaaccugcugcugcaguacggcagcuucugcacccagcugaaccgggcccugaccggcaucgccguggagcaggacaagaacacccaagagguguucgcccaggugaagcagaucuacaagacucccccaaucaaggacuucggcggcuucaacuucagccagauccugcccgaccccagcaagcccagcaagcggagcuucaucgaggaccugcuguucaacaaggugacccuggccgacgccggcuucaucaagcaguacggcgacugccugggggauaucgccgcucgggaccugaucugcgcccagaaguucaacggccugaccgugcugcccccucugcugaccgacgagaugaucgcccaguacaccagcgcccugcuugccggcaccaucaccagcggcuggaccuucggcgccggcgcagcccugcagauccccuucgccaugcagauggccuaccgguucaacggcaucggcgugacccagaacgugcuguacgagaaccagaagcugaucgccaaccaguucaacagcgccaucggcaagauccaggacagccugagcagcaccgccagcgcccugggcaagcugcaggacguggugaaccagaacgcucaggcccugaacacccuggugaagcagcugagcagcaacuucggcgccaucagcucagugcugaacgacauccugagcaggcuggacaagguggaggccgaggugcagaucgaccggcugaucaccggccggcugcagagccugcagaccuacgugacccagcagcugauccgggccgccgagauccgggccagcgccaaucuggcagccaccaagaugagcgagugcgugcugggccagagcaagcggguggacuuuugcggcaagggcuaccaccugaugagcuucccccagagcgccccacacggcgugguguuccuccacgucacauacgugcccgcccaggagaagaacuucaccaccgcccccgccauuugccacgacggcaaggcucacuucccccgggagggaguguucgugagcaacggcacccacugguucgugacccagcggaacuucuacgagccccagaucaucaccaccgacaacaccuucgugagcggcaacugcgacguggugaucggcaucgugaacaacaccguguacgacccccugcagccugagcuggacagcuucaaggaggagcuggacaaguacuucaagaaccacaccagccccgacguggaucugggcgacaucagcggcaucaacgccagcguggugaacauccagaaggagaucgaccggcugaacgagguggccaagaaccugaacgagagccugaucgaccugcaggagcugggcaaguacgagcaguacaucaaguggcccugguacaucuggcugggcuucaucgccggccugaucgccaucgugauggugaccaucaugcugugcugcaugaccagcugcuguagcugccugaagggcugcugcagcugcggcagcugcugcaaguucgacgaggacgacagcgagccagugcugaagggcgugaagcugcacuacaccuga

SEQ ID NO: 23029 - RNA, 3816 nt, Artificial Sequence
  SARS-CoV-2/Wuhan/WIV05/2019__EPI_ISL_402128 spike protein CDS gc (1-1273)(H69del_V70del_D614G)
auguucguguuccuggugcugcugccccuggugagcagccagugcgugaaccugaccacccggacccagcugcccccugccuacaccaacagcuucacccggggcguguacuaccccgacaagguguuccggagcagcgugcugcacagcacccaggaccuguuccugcccuucuucagcaacgugaccugguuccacgccaucagcggcaccaacggcaccaagcgguucgacaacccagugcugcccuucaacgacggcguguacuucgccagcaccgagaagucaaacaucauccggggcuggaucuucggcaccacccuggacagcaagacacagagccugcugaucgugaacaacgccaccaacguggugaucaaggugugcgaguuucaguucugcaacgaccccuuccugggcguguacuaccacaagaacaacaagagcuggauggagagcgaguuccggguguacagcagcgcuaacaauugcaccuucgaguacgucagccagcccuuccugauggaccucgagggcaagcagggcaacuucaagaaccugcgggaguucguguucaagaacaucgauggcuacuucaagaucuacagcaagcacacccccaucaaccuggugcgggaccugccccagggauucagcgcccuggagccucugguggaccugcccaucggcaucaacaucaccagguuccagacccugcuggcccugcaccggagcuaccugacccccggcgacagcagcagcggcuggaccgccggcgccgccgcauacuacgugggcuaccugcagccacggaccuuccugcugaaguacaacgagaacggcaccaucaccgacgccguggacugcgcccuggacccccugagcgagaccaagugcacccuaaagagcuucaccguggagaagggcaucuaccagaccagcaacuuccgggugcagcccacugagagcaucgugcgguuccccaacauuaccaaccugugucccuucggcgagguguucaacgccacccgguucgccagcguguacgccuggaaccggaagcggaucagcaacugcguggccgacuacagcgugcuguacaacagcgccagcuucagcaccuucaagugcuacggcgugagcccuaccaagcugaacgaccugugcuucaccaacguguacgcugacagcuucgugauccggggcgacgaggugcggcagaucgcccccggccagaccggcaagaucgccgacuacaacuacaagcugcccgacgacuucaccggcugcgugaucgccuggaacagcaacaaccuggacagcaaggugggcggcaacuacaacuaccuguaccggcuguuccguaagagcaaccugaagccauucgagcgggacaucagcaccgagaucuaccaggccggcagcacccccugcaacgguguggagggcuuuaacugcuacuucccccugcagagcuacggcuuccagcccaccaacggcgugggcuaccagcccuaccgggugguggugcugagcuucgagcugcugcacgcccccgccaccgugugcggcccuaaaaagagcaccaaccuggugaagaacaagugcgugaacuucaauuucaacggccugaccggcaccggcgugcugaccgagagcaacaagaaguuccugcccuuccagcaguucggccgggauaucgccgacaccaccgacgcagugcgggacccccagacccuggagauccuggacaucaccccaugcagcuucggcggcgugagcgugaucacccccggcacaaacaccagcaaccaggucgccgugcuguaccagggagugaacugcaccgaggugcccguggccauccacgccgaccagcugacccccaccuggcggguguacagcaccggcagcaacguguuccagacccgggccggcugccugaucggcgccgagcacgugaacaacuccuacgagugcgacauccccaucggcgcuggcaucugcgccagcuaccagacccagaccaacagcccccggcgggcccggagcguggccagccagagcaucaucgccuacaccaugagcuuaggcgccgagaacagcguggccuacagcaacaacagcaucgcgaucccuaccaacuucaccaucagcgugaccaccgagauacugcccgugagcaugaccaagaccagcguggacuguaccauguacaucugcggcgacagcaccgagugcagcaaccugcugcugcaguacggcagcuucugcacccagcugaaccgggcccugaccggcaucgccguggagcaggacaagaacacccaagagguguucgcccaggugaagcagaucuacaagacucccccaaucaaggacuucggcggcuucaacuucagccagauccugcccgaccccagcaagcccagcaagcggagcuucaucgaggaccugcuguucaacaaggugacccuggccgacgccggcuucaucaagcaguacggcgacugccugggggauaucgccgcucgggaccugaucugcgcccagaaguucaacggccugaccgugcugcccccucugcugaccgacgagaugaucgcccaguacaccagcgcccugcuugccggcaccaucaccagcggcuggaccuucggcgccggcgcagcccugcagauccccuucgccaugcagauggccuaccgguucaacggcaucggcgugacccagaacgugcuguacgagaaccagaagcugaucgccaaccaguucaacagcgccaucggcaagauccaggacagccugagcagcaccgccagcgcccugggcaagcugcaggacguggugaaccagaacgcucaggcccugaacacccuggugaagcagcugagcagcaacuucggcgccaucagcucagugcugaaugacauccugagcaggcuggacaagguggaggccgaggugcagaucgaccggcugaucaccggccggcugcagagccugcagaccuacgugacccagcagcugauccgggccgccgagauccgggccagcgccaaccuggcagccaccaagaugagcgagugcgugcugggccagagcaagcggguggacuuuugcggcaagggcuaccaccugaugagcuucccccagagcgccccacacggcgugguguuccuccacgugacauacguccccgcccaggagaagaacuucaccaccgcccccgccauuugccacgacggcaaggcucacuucccccgggagggaguguucgugagcaacggcacccacugguucgugacccagcggaacuucuacgagccccagaucaucaccaccgacaacaccuucgugagcggcaacugcgacguggugaucggcaucgugaacaacaccguguacgacccccugcagccugagcuggacagcuucaaggaggagcuggacaaguacuucaagaaccacaccagccccgacguggaucugggcgacaucagcggcaucaacgccagcguggugaacauccagaaggagaucgaccggcugaacgagguggccaagaaccugaacgagagccugaucgaccugcaggagcugggcaaguacgagcaguacaucaaguggcccugguacaucuggcugggcuucaucgccggccugaucgccaucgugauggugaccaucaugcugugcugcaugaccagcugcuguagcugccugaagggcugcugcagcugcggcagcugcugcaaguucgacgaggacgacagcgagccagugcugaagggcgugaagcugcacuacaccuga

SEQ ID NO: 23030 - RNA, 3822 nt, Artificial Sequence
  SARS-CoV-2/Wuhan/WIV05/2019__EPI_ISL_402128 spike protein CDS gc (1-1273)(Y453F_D614G)
auguucguguuccuggugcugcugccccuggugagcagccagugcgugaaccugaccacccggacccagcugcccccugccuacaccaacagcuucacccggggcguguacuaccccgacaagguguuccggagcagcgugcugcacagcacccaggaccuguuccugcccuucuucagcaacgugaccugguuccacgccauccacgugagcggcaccaacggcaccaagcgguucgacaacccagugcugcccuucaacgacggcguguacuucgccagcaccgagaagucaaacaucauccggggcuggaucuucggcaccacccuggacagcaagacacagagccugcugaucgugaacaacgccaccaacguggugaucaaggugugcgaguuucaguucugcaacgaccccuuccugggcguguacuaccacaagaacaacaagagcuggauggagagcgaguuccgggucuacagcagcgcuaacaauugcaccuucgaguacgugagccagcccuuccugauggaccucgagggcaagcagggcaacuucaagaaccugcgggaguucguguucaagaacaucgauggcuacuucaagaucuacagcaagcacacccccaucaaccuggugcgggaccugccccagggauucagcgcccuggagccucugguggaccugcccaucggcaucaacaucaccagguuccagacccugcuggcccugcaccggagcuaccugacccccggcgacagcagcagcggcuggaccgccggcgccgccgcauacuacgugggcuaccugcagccacggaccuuccugcugaaguacaacgagaacggcaccaucaccgacgccguggacugcgcccuggacccccugagcgagaccaagugcacccuaaagagcuucaccguggagaagggcaucuaccagaccagcaacuuccgggugcagcccacugagagcaucgugcgguuccccaacauuaccaaccugugucccuucggcgagguguucaacgccacccgguucgccagcguguacgccuggaaccggaagcggaucagcaacugcguggccgacuacagcgugcuguacaacagcgccagcuucagcaccuucaagugcuacggcgugagcccuaccaagcugaacgaccugugcuucaccaacguguacgcugacagcuucgugauccggggcgacgaggugcggcagaucgcccccggccagaccggcaagaucgccgacuacaacuacaagcugcccgacgacuucaccggcugcgugaucgccuggaacagcaacaaccuggacagcaaggugggcggcaacuacaacuaccuguuccggcuguuccguaagagcaaccugaagccauuugagcgggacaucagcaccgagaucuaccaggccggcagcacccccugcaacgguguggagggcuucaacugcuacuucccccugcagagcuacggcuuccagcccaccaacggcgugggcuaccagcccuaccgggugguggugcugagcuucgagcugcugcacgcccccgccaccgugugcggcccuaaaaagagcaccaaccuggugaagaacaagugcgugaacuucaauuucaacggccugaccggcaccggcgugcugaccgagagcaacaagaaguuccugcccuuccagcaguucggccgggauaucgccgacaccaccgacgcagugcgggacccccagacccuggagauccuggacaucaccccaugcagcuucggcggcgugagcgucaucacccccggcacaaacaccagcaaccagguggccgugcuguaccagggagugaacugcaccgaggugcccguggccauccacgccgaccagcugacccccaccuggcggguguacagcaccggcagcaacguguuccagacccgggccggcugccugaucggcgccgagcacgugaacaacuccuacgagugcgacauccccaucggcgcuggcaucugcgccagcuaccagacccagaccaacagcccccggcgggcccggagcguggccagccagagcaucaucgccuacaccaugagcuuaggcgccgagaacagcguggccuacagcaacaacagcaucgcgaucccuaccaacuucaccaucagcgugaccaccgagauacugcccgugagcaugaccaagaccagcguggacuguaccauguacaucugcggcgacagcaccgagugcagcaaccugcugcugcaguacggcagcuucugcacccagcugaaccgggcccugaccggcaucgccguggagcaggacaagaacacccaagagguguucgcccaggugaagcagaucuacaagacucccccaaucaaggacuucggcggcuucaacuucagccagauccugcccgaccccagcaagcccagcaagcggagcuucaucgaggaccugcuguucaacaaggugacccuggccgacgccggcuucaucaagcaguacggcgacugccugggggauaucgccgcucgggaccugaucugcgcccagaaguucaacggccugaccgugcugcccccucugcugaccgacgagaugaucgcccaguacaccagcgcccugcuugccggcaccaucaccagcggcuggaccuucggcgccggcgcagcccugcagauccccuucgccaugcagauggccuaccgguucaacggcaucggcgugacccagaacgugcuguacgagaaccagaagcugaucgccaaccaguucaacagcgccaucggcaagauccaggacagccugagcagcaccgccagcgcccugggcaagcugcaggacguggugaaccagaacgcucaggcccugaacacccuggugaagcagcugagcagcaacuuuggcgccaucagcucagugcugaaugacauccugagcaggcuggacaagguggaggccgaggugcagaucgaccggcugaucaccggccggcugcagagccugcagaccuacgugacccagcagcugauccgggccgccgagauccgggccagcgccaaccuggcagccaccaagaugagcgagugcgugcugggccagagcaagcggguggacuucugcggcaagggcuaccaccugaugagcuucccccagagcgccccacacggcgugguguuccuccacgucacauacgugcccgcccaggagaagaacuucaccaccgcccccgccauuugccacgacggcaaggcucacuucccccgggagggaguguucgugagcaacggcacccacugguucgugacccagcggaacuucuacgagccccagaucaucaccaccgacaacaccuucgugagcggcaacugcgacguggugaucggcaucgugaacaacaccguguacgacccccugcagccugagcuggacagcuucaaggaggagcuggacaaguacuucaagaaccacaccagccccgacguggaucugggcgacaucagcggcaucaacgccagcguggugaacauccagaaggagaucgaccggcugaacgagguggccaagaaccugaacgagagccugaucgaccugcaggagcugggcaaguacgagcaguacaucaaguggcccugguacaucuggcugggcuucaucgccggccugaucgccaucgugauggugaccaucaugcugugcugcaugaccagcugcuguagcugccugaagggcugcugcagcugcggcagcugcugcaaguucgacgaggacgacagcgagccagugcugaagggcgugaagcugcacuacaccuga

SEQ ID NO: 23031 - RNA, 3822 nt, Artificial Sequence
  SARS-CoV-2/Wuhan/WIV05/2019__EPI_ISL_402128 spike protein CDS gc (1-1273)(D614G_I692V)
auguucguguuccuggugcugcugccccuggugagcagccagugcgugaaccugaccacccggacccagcugcccccugccuacaccaacagcuucacccggggcguguacuaccccgacaagguguuccggagcagcgugcugcacagcacccaggaccuguuccugcccuucuucagcaacgugaccugguuccacgccauccacgugagcggcaccaacggcaccaagcgguucgacaacccagugcugcccuucaacgacggcguguacuucgccagcaccgagaagucaaacaucauccggggcuggaucuucggcaccacccuggacagcaagacacagagccugcugaucgugaacaacgccaccaacguggugaucaaggugugcgaguuucaguucugcaacgaccccuuccugggcguguacuaccacaagaacaacaagagcuggauggagagcgaguuccgggucuacagcagcgcuaacaauugcaccuucgaguacgugagccagcccuuccugauggaccucgagggcaagcagggcaacuucaagaaccugcgggaguucguguucaagaacaucgauggcuacuucaagaucuacagcaagcacacccccaucaaccuggugcgggaccugccccagggauucagcgcccuggagccucugguggaccugcccaucggcaucaacaucaccagguuccagacccugcuggcccugcaccggagcuaccugacccccggcgacagcagcagcggcuggaccgccggcgccgccgcauacuacgugggcuaccugcagccacggaccuuccugcugaaguacaacgagaacggcaccaucaccgacgccguggacugcgcccuggacccccugagcgagaccaagugcacccuaaagagcuucaccguggagaagggcaucuaccagaccagcaacuuccgggugcagcccacugagagcaucgugcgguuccccaacauuaccaaccugugucccuucggcgagguguucaacgccacccgguucgccagcguguacgccuggaaccggaagcggaucagcaacugcguggccgacuacagcgugcuguacaacagcgccagcuucagcaccuucaagugcuacggcgugagcccuaccaagcugaacgaccugugcuucaccaacguguacgcugacagcuucgugauccggggcgacgaggugcggcagaucgcccccggccagaccggcaagaucgccgacuacaacuacaagcugcccgacgacuucaccggcugcgugaucgccuggaacagcaacaaccuggacagcaaggugggcggcaacuacaacuaccuguaccggcuguuccguaagagcaaccugaagccauucgagcgggacaucagcaccgagaucuaccaggccggcagcacccccugcaacgguguggagggcuuuaacugcuacuucccccugcagagcuacggcuuccagcccaccaacggcgugggcuaccagcccuaccgggugguggugcugagcuucgagcugcugcacgcccccgccaccgugugcggcccuaaaaagagcaccaaccuggugaagaacaagugcgugaacuucaauuucaacggccugaccggcaccggcgugcugaccgagagcaacaagaaguuccugcccuuccagcaguucggccgggauaucgccgacaccaccgacgcagugcgggacccccagacccuggagauccuggacaucaccccaugcagcuucggcggcgugagcgucaucacccccggcacaaacaccagcaaccagguggccgugcuguaccagggagugaacugcaccgaggugcccguggccauccacgccgaccagcugacccccaccuggcggguguacagcaccggcagcaacguguuccagacccgggccggcugccugaucggcgccgagcacgugaacaacuccuacgagugcgacauccccaucggcgcuggcaucugcgccagcuaccagacccagaccaacagcccccggcgggcccggagcguggccagccagagcgugaucgccuacaccaugagcuuaggcgccgagaacagcguggccuacagcaacaacagcaucgcgaucccuaccaacuucaccaucagcgugaccaccgagauccugcccgugagcaugaccaagaccagcguggacuguaccauguacauaugcggcgacagcaccgagugcagcaaccugcugcugcaguacggcagcuucugcacccagcugaaccgggcccugaccggcaucgccguggagcaggacaagaacacccaagagguguucgcccaggugaagcagaucuacaagacucccccaaucaaggacuucggcggcuucaacuucagccagauccugcccgaccccagcaagcccagcaagcggagcuucaucgaggaccugcuguucaacaaggugacccuggccgacgccggcuucaucaagcaguacggcgacugccugggggauaucgccgcucgggaccugaucugcgcccagaaguucaacggccugaccgugcugcccccucugcugaccgacgagaugaucgcccaguacaccagcgcccugcuugccggcaccaucaccagcggcuggaccuucggcgccggcgcagcccugcagauccccuucgccaugcagauggccuaccgguucaacggcaucggcgugacccagaacgugcuguacgagaaccagaagcugaucgccaaccaguucaacagcgccaucggcaagauccaggacagccugagcagcaccgccagcgcccugggcaagcugcaggacguggugaaccagaacgcucaggcccugaacacccuggugaagcagcugagcagcaacuucggcgccaucagcucagugcugaaugacauccugagcaggcuggacaagguggaggccgaggugcagaucgaccggcugaucaccggccggcugcagagccugcagaccuacgugacccagcagcugauccgggccgccgagauccgggccagcgccaaccuggcagccaccaagaugagcgagugcgugcugggccagagcaagcggguggacuuuugcggcaagggcuaccaccugaugagcuucccccagagcgccccacacggcguggucuuccuccacgugacauacgugcccgcccaggagaagaacuucaccaccgcccccgccaucugccacgacggcaaggcucacuucccccgggagggaguguucgugagcaacggcacccacugguucgugacccagcggaacuucuacgagccccagauuaucaccaccgacaacaccuucgugagcggcaacugcgacguggugaucggcaucgugaacaacaccguguacgacccccugcagccugagcuggacagcuucaaggaggagcuggacaaguacuucaagaaccacaccagccccgacguggaucugggcgacaucagcggcaucaacgccagcguggugaacauccagaaggagaucgaccggcugaacgagguggccaagaaccugaacgagagccugaucgaccugcaggagcugggcaaguacgagcaguacaucaaguggcccugguacaucuggcugggcuucaucgccggccugaucgccaucgugauggugaccaucaugcugugcugcaugaccagcugcuguagcugccugaagggcugcugcagcugcggcagcugcugcaaguucgacgaggacgacagcgagccagugcugaagggcgugaagcugcacuacaccuga

SEQ ID NO: 23032 - RNA, 3822 nt, Artificial Sequence
  SARS-CoV-2/Wuhan/WIV05/2019__EPI_ISL_402128 spike protein CDS gc (1-1273)(D614G_M1229I)
auguucguguuccuggugcugcugccccuggugagcagccagugcgugaaccugaccacccggacccagcugcccccugccuacaccaacagcuucacccggggcguguacuaccccgacaagguguuccggagcagcgugcugcacagcacccaggaccuguuccugcccuucuucagcaacgugaccugguuccacgccauccacgugagcggcaccaacggcaccaagcgguucgacaacccagugcugcccuucaacgacggcguguacuucgccagcaccgagaagucaaacaucauccggggcuggaucuucggcaccacccuggacagcaagacacagagccugcugaucgugaacaacgccaccaacguggugaucaaggugugcgaguuucaguucugcaacgaccccuuccugggcguguacuaccacaagaacaacaagagcuggauggagagcgaguuccgggucuacagcagcgcuaacaauugcaccuucgaguacgugagccagcccuuccugauggaccucgagggcaagcagggcaacuucaagaaccugcgggaguucguguucaagaacaucgauggcuacuucaagaucuacagcaagcacacccccaucaaccuggugcgggaccugccccagggauucagcgcccuggagccucugguggaccugcccaucggcaucaacaucaccagguuccagacccugcuggcccugcaccggagcuaccugacccccggcgacagcagcagcggcuggaccgccggcgccgccgcauacuacgugggcuaccugcagccacggaccuuccugcugaaguacaacgagaacggcaccaucaccgacgccguggacugcgcccuggacccccugagcgagaccaagugcacccuaaagagcuucaccguggagaagggcaucuaccagaccagcaacuuccgggugcagcccacugagagcaucgugcgguuccccaacauuaccaaccugugucccuucggcgagguguucaacgccacccgguucgccagcguguacgccuggaaccggaagcggaucagcaacugcguggccgacuacagcgugcuguacaacagcgccagcuucagcaccuucaagugcuacggcgugagcccuaccaagcugaacgaccugugcuucaccaacguguacgcugacagcuucgugauccggggcgacgaggugcggcagaucgcccccggccagaccggcaagaucgccgacuacaacuacaagcugcccgacgacuucaccggcugcgugaucgccuggaacagcaacaaccuggacagcaaggugggcggcaacuacaacuaccuguaccggcuguuccguaagagcaaccugaagccauucgagcgggacaucagcaccgagaucuaccaggccggcagcacccccugcaacgguguggagggcuuuaacugcuacuucccccugcagagcuacggcuuccagcccaccaacggcgugggcuaccagcccuaccgggugguggugcugagcuucgagcugcugcacgcccccgccaccgugugcggcccuaaaaagagcaccaaccuggugaagaacaagugcgugaacuucaauuucaacggccugaccggcaccggcgugcugaccgagagcaacaagaaguuccugcccuuccagcaguucggccgggauaucgccgacaccaccgacgcagugcgggacccccagacccuggagauccuggacaucaccccaugcagcuucggcggcgugagcgucaucacccccggcacaaacaccagcaaccagguggccgugcuguaccagggagugaacugcaccgaggugcccguggccauccacgccgaccagcugacccccaccuggcggguguacagcaccggcagcaacguguuccagacccgggccggcugccugaucggcgccgagcacgugaacaacuccuacgagugcgacauccccaucggcgcuggcaucugcgccagcuaccagacccagaccaacagcccccggcgggcccggagcguggccagccagagcaucaucgccuacaccaugagcuuaggcgccgagaacagcguggccuacagcaacaacagcaucgcgaucccuaccaacuucaccaucagcgugaccaccgagauacugcccgugagcaugaccaagaccagcguggacuguaccauguacaucugcggcgacagcaccgagugcagcaaccugcugcugcaguacggcagcuucugcacccagcugaaccgggcccugaccggcaucgccguggagcaggacaagaacacccaagagguguucgcccaggugaagcagaucuacaagacucccccaaucaaggacuucggcggcuucaacuucagccagauccugcccgaccccagcaagcccagcaagcggagcuucaucgaggaccugcuguucaacaaggugacccuggccgacgccggcuucaucaagcaguacggcgacugccugggggauaucgccgcucgggaccugaucugcgcccagaaguucaacggccugaccgugcugcccccucugcugaccgacgagaugaucgcccaguacaccagcgcccugcuugccggcaccaucaccagcggcuggaccuucggcgccggcgcagcccugcagauccccuucgccaugcagauggccuaccgguucaacggcaucggcgugacccagaacgugcuguacgagaaccagaagcugaucgccaaccaguucaacagcgccaucggcaagauccaggacagccugagcagcaccgccagcgcccugggcaagcugcaggacguggugaaccagaacgcucaggcccugaacacccuggugaagcagcugagcagcaacuucggcgccaucagcucagugcugaaugacauccugagcaggcuggacaagguggaggccgaggugcagaucgaccggcugaucaccggccggcugcagagccugcagaccuacgugacccagcagcugauccgggccgccgagauccgggccagcgccaaccuggcagccaccaagaugagcgagugcgugcugggccagagcaagcggguggacuuuugcggcaagggcuaccaccugaugagcuucccccagagcgccccacacggcgugguguuccuccacgucacauacgugcccgcccaggagaagaacuucaccaccgcccccgccauuugccacgacggcaaggcucacuucccccgggagggaguguucgugagcaacggcacccacugguucgugacccagcggaacuucuacgagccccagaucaucaccaccgacaacaccuucgugagcggcaacugcgacguggugaucggcaucgugaacaacaccguguacgacccccugcagccugagcuggacagcuucaaggaggagcuggacaaguacuucaagaaccacaccagccccgacguggaucugggcgacaucagcggcaucaacgccagcguggugaacauccagaaggagaucgaccggcugaacgagguggccaagaaccugaacgagagccugaucgaccugcaggagcugggcaaguacgagcaguacaucaaguggcccugguacaucuggcugggcuucaucgccggccugaucgccaucgugaucgugaccaucaugcugugcugcaugaccagcugcuguagcugccugaagggcugcugcagcugcggcagcugcugcaaguucgacgaggacgacagcgagccagugcugaagggcgugaagcugcacuacaccuga

SEQ ID NO: 23033 - RNA, 3816 nt, Artificial Sequence
  SARS-CoV-2/Wuhan/WIV05/2019__EPI_ISL_402128 spike protein CDS gc (1-1273)(H69del_V70del_A222V_Y453F_S477N_D614G_I692V)
auguucguguuccuggugcugcugccccuggugagcagccagugcgugaaccugaccacccggacccagcugcccccugccuacaccaacagcuucacccggggcguguacuaccccgacaagguguuccggagcagcgugcugcacagcacccaggaccuguuccugcccuucuucagcaacgugaccugguuccacgccaucagcggcaccaacggcaccaagcgguucgacaacccagugcugcccuucaacgacggcguguacuucgccagcaccgagaagucaaacaucauccggggcuggaucuucggcaccacccuggacagcaagacacagagccugcugaucgugaacaacgccaccaacguggugaucaaggugugcgaguuucaguucugcaacgaccccuuccugggcguguacuaccacaagaacaacaagagcuggauggagagcgaguuccggguguacagcagcgcuaacaauugcaccuucgaguacgucagccagcccuuccugauggaccucgagggcaagcagggcaacuucaagaaccugcgggaguucguguucaagaacaucgauggcuacuucaagaucuacagcaagcacacccccaucaaccuggugcgggaccugccccagggauucagcgugcuggagccucugguggaccugcccaucggcaucaacaucaccagguuccagacccugcuggcccugcaccggagcuaccugacccccggcgacagcagcagcggcuggaccgccggcgccgccgccuacuacgugggcuaccugcagccacggaccuuccugcugaaguacaacgagaacggcaccaucaccgacgcaguggacugcgcccuggacccccugagcgagaccaagugcacccuaaagagcuucaccguggagaagggcaucuaccagaccagcaacuuccgggugcagcccacugagagcaucgugcgguuccccaacauuaccaaccugugucccuucggcgagguguucaacgccacccgguucgccagcguguacgccuggaaccggaagcggaucagcaacugcguggccgacuacagcgugcuguacaacagcgccagcuucagcaccuucaagugcuacggcgugagcccuaccaagcugaacgaccugugcuucaccaacguguacgccgacagcuucgugauccggggcgacgaggugcggcagaucgcucccggccagaccggcaagaucgccgacuacaacuacaagcugcccgacgacuucaccggcugcgugaucgccuggaacagcaacaaccuggacagcaaggugggcggcaacuacaacuaccuguuccggcuguuccguaagagcaaccugaagccauuugagcgggacaucagcaccgagaucuaccaggccggcaacacccccugcaacgguguggagggcuucaacugcuacuucccccugcagagcuacggcuuccagcccaccaacggcgugggcuaccagcccuaccgggugguggugcugagcuucgagcugcugcacgcccccgccaccgugugcggcccuaaaaagagcaccaaccuggugaagaacaagugcgugaauuucaacuucaacggccugaccggcaccggcgugcugaccgagagcaacaagaaguuccugcccuuccagcaguucggccgggauaucgccgacaccaccgacgccgugcgggacccccagacccuggagauccuggacaucaccccaugcagcuucggcggcgugagcgucaucacccccggcacaaacaccagcaaccagguggcagugcuguaccagggagugaacugcaccgaggugcccguggccauccacgccgaccagcugacccccaccuggcggguguacagcaccggcagcaacguguuccagacccgggccggcugccugaucggcgccgagcacgugaacaacagcuacgagugcgacauccccaucggcgccggcaucugcgcuuccuaccagacccagaccaacagcccccggcgggcccggagcguggccagccagagcgugaucgccuacaccaugagcuuaggcgccgagaacagcguggccuacagcaacaacagcaucgccaucccuaccaacuucaccaucagcgugaccaccgagauccugcccgugagcaugaccaagaccagcguggacuguaccauguacauaugcggcgacagcaccgagugcagcaaccugcugcugcaguacggcagcuucugcacccagcugaaccgggcgcugaccggcaucgccguggagcaggacaagaacacccaagagguguucgcccaggugaagcagaucuacaagacucccccaaucaaggacuucggcggcuucaacuucagccagauccugcccgaccccagcaagcccagcaagcggagcuucaucgaggaccugcuguucaacaaggugacccuggccgacgccggcuucaucaagcaguacggcgacugccugggggauaucgccgcccgggaccugaucugcgcucagaaguucaacggccugaccgugcugcccccucugcugaccgacgagaugaucgcccaguacaccagcgcccugcuugccggcaccaucaccagcggcuggaccuucggcgccggcgccgcacugcagauccccuucgccaugcagauggccuaccgguucaacggcaucggcgugacccagaacgugcuguacgagaaccagaagcugaucgccaaccaguucaacagcgccaucggcaagauccaggacagccugagcagcaccgccagcgcccugggcaagcugcaggacguggugaaccagaacgcccaggcucugaacacccuggugaagcagcugagcagcaauuuuggcgccaucagcagcgugcugaacgacauccugucaaggcuggacaagguggaggccgaggugcagaucgaccggcugaucaccggccggcugcagagccugcagaccuacgugacccagcagcugauccgggccgccgagauccgggccagcgccaaccuggccgcaaccaagaugagcgagugcgugcugggccagagcaagcggguggacuucugcggcaagggcuaccaccugaugagcuucccccagagcgccccacacggcguggucuuccuccacgugacauacgugcccgcccaggagaagaacuucaccaccgcccccgccaucugccacgacggcaaggcccacuucccccgggagggaguguucgugagcaacggcacccacugguucgugacccagcggaacuucuacgagccccagauuaucaccaccgacaacaccuucgugagcggcaacugcgacguggugaucggcaucgugaacaacaccguguacgacccccugcagccugagcuggacagcuucaaggaggagcuggacaaguacuucaagaaccacaccagccccgacguggaucugggcgacaucagcggcaucaacgcuagcguggugaacauccagaaggagaucgaccggcugaacgagguggccaagaaccugaacgagagccugaucgaccugcaggagcugggcaaguacgagcaguacaucaaguggcccugguacaucuggcugggcuucaucgccggccugaucgccaucgugauggugaccaucaugcugugcugcaugaccagcugcuguagcugccugaagggcugcugcagcugcggcagcugcugcaaguucgacgaggacgacagcgagccagugcugaagggcgugaagcugcacuacaccuga

SEQ ID NO: 23034 - RNA, 3816 nt, Artificial Sequence
  SARS-CoV-2/Wuhan/WIV05/2019__EPI_ISL_402128 spike protein CDS gc (1-1273)(H69del_V70del_Y453F_D614G_I692V_M1229I)
auguucguguuccuggugcugcugccccuggugagcagccagugcgugaaccugaccacccggacccagcugcccccugccuacaccaacagcuucacccggggcguguacuaccccgacaagguguuccggagcagcgugcugcacagcacccaggaccuguuccugcccuucuucagcaacgugaccugguuccacgccaucagcggcaccaacggcaccaagcgguucgacaacccagugcugcccuucaacgacggcguguacuucgccagcaccgagaagucaaacaucauccggggcuggaucuucggcaccacccuggacagcaagacacagagccugcugaucgugaacaacgccaccaacguggugaucaaggugugcgaguuucaguucugcaacgaccccuuccugggcguguacuaccacaagaacaacaagagcuggauggagagcgaguuccggguguacagcagcgcuaacaauugcaccuucgaguacgucagccagcccuuccugauggaccucgagggcaagcagggcaacuucaagaaccugcgggaguucguguucaagaacaucgauggcuacuucaagaucuacagcaagcacacccccaucaaccuggugcgggaccugccccagggauucagcgcccuggagccucugguggaccugcccaucggcaucaacaucaccagguuccagacccugcuggcccugcaccggagcuaccugacccccggcgacagcagcagcggcuggaccgccggcgccgccgcauacuacgugggcuaccugcagccacggaccuuccugcugaaguacaacgagaacggcaccaucaccgacgccguggacugcgcccuggacccccugagcgagaccaagugcacccuaaagagcuucaccguggagaagggcaucuaccagaccagcaacuuccgggugcagcccacugagagcaucgugcgguuccccaacauuaccaaccugugucccuucggcgagguguucaacgccacccgguucgccagcguguacgccuggaaccggaagcggaucagcaacugcguggccgacuacagcgugcuguacaacagcgccagcuucagcaccuucaagugcuacggcgugagcccuaccaagcugaacgaccugugcuucaccaacguguacgcugacagcuucgugauccggggcgacgaggugcggcagaucgcccccggccagaccggcaagaucgccgacuacaacuacaagcugcccgacgacuucaccggcugcgugaucgccuggaacagcaacaaccuggacagcaaggugggcggcaacuacaacuaccuguuccggcuguuccguaagagcaaccugaagccauuugagcgggacaucagcaccgagaucuaccaggccggcagcacccccugcaacgguguggagggcuucaacugcuacuucccccugcagagcuacggcuuccagcccaccaacggcgugggcuaccagcccuaccgggugguggugcugagcuucgagcugcugcacgcccccgccaccgugugcggcccuaaaaagagcaccaaccuggugaagaacaagugcgugaacuucaauuucaacggccugaccggcaccggcgugcugaccgagagcaacaagaaguuccugcccuuccagcaguucggccgggauaucgccgacaccaccgacgcagugcgggacccccagacccuggagauccuggacaucaccccaugcagcuucggcggcgugagcgugaucacccccggcacaaacaccagcaaccaggucgccgugcuguaccagggagugaacugcaccgaggugcccguggccauccacgccgaccagcugacccccaccuggcggguguacagcaccggcagcaacguguuccagacccgggccggcugccugaucggcgccgagcacgugaacaacuccuacgagugcgacauccccaucggcgcuggcaucugcgccagcuaccagacccagaccaacagcccccggcgggcccggagcguggccagccagagcgugaucgccuacaccaugagcuuaggcgccgagaacagcguggccuacagcaacaacagcaucgcgaucccuaccaacuucaccaucagcgugaccaccgagauccugcccgugagcaugaccaagaccagcguggacuguaccauguacauaugcggcgacagcaccgagugcagcaaccugcugcugcaguacggcagcuucugcacccagcugaaccgggcccugaccggcaucgccguggagcaggacaagaacacccaagagguguucgcccaggugaagcagaucuacaagacucccccaaucaaggacuucggcggcuucaacuucagccagauccugcccgaccccagcaagcccagcaagcggagcuucaucgaggaccugcuguucaacaaggugacccuggccgacgccggcuucaucaagcaguacggcgacugccugggggauaucgccgcucgggaccugaucugcgcccagaaguucaacggccugaccgugcugcccccucugcugaccgacgagaugaucgcccaguacaccagcgcccugcuugccggcaccaucaccagcggcuggaccuucggcgccggcgcagcccugcagauccccuucgccaugcagauggccuaccgguucaacggcaucggcgugacccagaacgugcuguacgagaaccagaagcugaucgccaaccaguucaacagcgccaucggcaagauccaggacagccugagcagcaccgccagcgcccugggcaagcugcaggacguggugaaccagaacgcucaggcccugaacacccuggugaagcagcugagcagcaacuuuggcgccaucagcucagugcugaaugacauccugagcaggcuggacaagguggaggccgaggugcagaucgaccggcugaucaccggccggcugcagagccugcagaccuacgugacccagcagcugauccgggccgccgagauccgggccagcgccaaccuggcagccaccaagaugagcgagugcgugcugggccagagcaagcggguggacuucugcggcaagggcuaccaccugaugagcuucccccagagcgccccacacggcgugguguuccuccacgucacauacgugcccgcccaggagaagaacuucaccaccgcccccgccaucugccacgacggcaaggcucacuucccccgggagggaguguucgugagcaacggcacccacugguucgugacccagcggaacuucuacgagccccagauuaucaccaccgacaacaccuucgugagcggcaacugcgacguggugaucggcaucgugaacaacaccguguacgacccccugcagccugagcuggacagcuucaaggaggagcuggacaaguacuucaagaaccacaccagccccgacguggaucugggcgacaucagcggcaucaacgccagcguggugaacauccagaaggagaucgaccggcugaacgagguggccaagaaccugaacgagagccugaucgaccugcaggagcugggcaaguacgagcaguacaucaaguggcccugguacaucuggcugggcuucaucgccggccugaucgccaucgugaucgugaccaucaugcugugcugcaugaccagcugcuguagcugccugaagggcugcugcagcugcggcagcugcugcaaguucgacgaggacgacagcgagccagugcugaagggcgugaagcugcacuacaccuga

SEQ ID NO: 23035 - RNA, 3813 nt, Artificial Sequence
  SARS-CoV-2/Wuhan/WIV05/2019__EPI_ISL_402128 spike protein CDS gc (1-1273)(H69del_V70del_Y144del_N501Y_A570D_D614G_P681H_T716I_S982 A_D1118H)
auguucguguuccuggugcugcugccccuggugagcagccagugcgugaaccugaccacccggacccagcugcccccugccuacaccaacagcuucacccggggcguguacuaccccgacaagguguuccggagcagcgugcugcacagcacccaggaccuguuccugcccuucuucagcaacgugaccugguuccacgccaucagcggcaccaacggcaccaagcgguucgacaacccagugcugcccuucaacgacggcguguacuucgccagcaccgagaagucaaacaucauccggggcuggaucuucggcaccacccuggacagcaagacacagagccugcugaucgugaacaacgccaccaacguggugaucaaggugugcgaguuucaguucugcaacgaccccuuccugggcguguaccacaagaacaacaagagcuggauggagagcgaguuccggguguacagcagcgcuaacaauugcaccuucgaguacgucagccagcccuuccugauggaccucgagggcaagcagggcaacuucaagaaccugcgggaguucguguucaagaacaucgauggcuacuucaagaucuacagcaagcacacccccaucaaccuggugcgggaccugccccagggauucagcgcccuggagccucugguggaccugcccaucggcaucaacaucaccagguuccagacccugcuggcccugcaccggagcuaccugacccccggcgacagcagcagcggcuggaccgccggcgccgccgcauacuacgugggcuaccugcagccacggaccuuccugcugaaguacaacgagaacggcaccaucaccgacgccguggacugcgcccuggacccccugagcgagaccaagugcacccuaaagagcuucaccguggagaagggcaucuaccagaccagcaacuuccgggugcagcccacugagagcaucgugcgguuccccaacauuaccaaccugugucccuucggcgagguguucaacgccacccgguucgccagcguguacgccuggaaccggaagcggaucagcaacugcguggccgacuacagcgugcuguacaacagcgccagcuucagcaccuucaagugcuacggcgugagcccuaccaagcugaacgaccugugcuucaccaacguguacgcugacagcuucgugauccggggcgacgaggugcggcagaucgcccccggccagaccggcaagaucgccgacuacaacuacaagcugcccgacgacuucaccggcugcgugaucgccuggaacagcaacaaccuggacagcaaggugggcggcaacuacaacuaccuguaccggcuguuccguaagagcaaccugaagccauucgagcgggacaucagcaccgagaucuaccaggccggcagcacccccugcaacgguguggagggcuuuaacugcuacuucccccugcagagcuacggcuuccagcccaccuacggcgugggcuaccagcccuaccgggugguggugcugagcuucgagcugcugcacgcccccgccaccgugugcggcccuaaaaagagcaccaaccuggugaagaacaagugcgugaacuucaacuucaauggccugaccggcaccggcgugcugaccgagagcaacaagaaguuccugcccuuccagcaguucggccgggauaucgacgacaccaccgacgccgugcgggacccccagacccuggagauccuggacaucaccccaugcagcuucggcggcgugagcgugaucacccccggcacaaacaccagcaaccaggucgcagugcuguaccagggagugaacugcaccgaggugcccguggccauccacgccgaccagcugacccccaccuggcggguguacagcaccggcagcaacguguuccagacccgggccggcugccugaucggcgccgagcacgugaacaacuccuacgagugcgacauccccaucggcgccggcaucugcgcuagcuaccagacccagaccaacagccaccggcgggcccggagcguggccagccagagcaucaucgccuacaccaugagcuuaggcgccgagaacagcguggccuacagcaacaacagcaucgccauccccaucaacuucaccauaagcgugaccaccgagauccugccugugagcaugaccaagaccagcguggacuguaccauguacaucugcggcgacagcaccgagugcagcaaccugcugcugcaguacggcagcuucugcacccagcugaaccgggcgcugaccggcaucgccguggagcaggacaagaacacccaagagguguucgcccaggugaagcagaucuacaagaccccacccaucaaggacuucggcggcuucaacuucagccagauccugcccgaccccagcaagcccagcaagcggagcuucaucgaggaccugcuguucaacaaggugacucuggccgacgccggcuucaucaagcaguacggcgauugccugggggacaucgccgcccgggaccugaucugcgcucagaaguucaacggccugaccgugcugccuccccugcugaccgacgagaugaucgcccaguacaccagcgcccugcuugccggcaccaucaccagcggcuggaccuucggcgccggcgccgcacugcagauccccuucgccaugcagauggccuaccgguucaacggcaucggcgugacccagaacgugcuguacgagaaccagaagcugaucgccaaccaguucaacagcgccaucggcaagauccaggacagccugagcagcaccgccagcgcccugggcaagcugcaggacguggugaaccagaacgcccaggcucugaacacccuggugaagcagcugagcagcaacuucggcgccaucagcucagugcugaacgacauccuggccaggcuggacaagguggaggccgaggugcagaucgaccggcugaucaccggccggcugcagagccugcagaccuacgugacccagcagcugauccgggccgccgagauucgggccagcgccaaucuggcagccaccaagaugagcgagugcgugcugggccagagcaagcggguggacuuuugcggcaagggcuaccaccugaugagcuucccccagagcgcuccccacggcgugguguuccuccacgugaccuacgucccagcccaggagaagaacuucacaaccgcccccgccaucugccacgacggcaaggcccacuucccccgggagggaguguucgugagcaacggcacccacugguucgugacccagcggaacuucuacgagccccagaucaucaccacccacaacaccuucgugagcggcaacugcgacguggugaucggcaucgugaacaacaccguguacgacccccugcagcccgagcuggacagcuucaaggaggagcuggacaaguacuucaagaaccacaccagcccugacguggaucugggcgacaucagcggcaucaacgccagcguggugaacauccagaaggagaucgaccggcugaacgagguggccaagaaccugaacgagagccugaucgaccugcaggagcugggcaaguacgagcaguacaucaaguggcccugguacaucuggcugggcuucaucgccggccugaucgccaucgugauggugaccaucaugcugugcugcaugaccagcugcuguagcugccugaagggcugcugcagcugcggcagcugcugcaaguucgacgaggacgacagcgagcccgugcugaagggcgugaagcugcacuacaccuga

SEQ ID NO: 23036 - RNA, 3822 nt, Artificial Sequence
  SARS-CoV-2/Wuhan/WIV05/2019__EPI_ISL_402128 spike protein CDS gc (1-1273)(K417N_E484K_N501Y_D614G)
auguucguguuccuggugcugcugccccuggugagcagccagugcgugaaccugaccacccggacccagcugcccccugccuacaccaacagcuucacccggggcguguacuaccccgacaagguguuccggagcagcgugcugcacagcacccaggaccuguuccugcccuucuucagcaacgugaccugguuccacgccauccacgugagcggcaccaacggcaccaagcgguucgacaacccagugcugcccuucaacgacggcguguacuucgccagcaccgagaagucaaacaucauccggggcuggaucuucggcaccacccuggacagcaagacacagagccugcugaucgugaacaacgccaccaacguggugaucaaggugugcgaguuucaguucugcaacgaccccuuccugggcguguacuaccacaagaacaacaagagcuggauggagagcgaguuccgggucuacagcagcgcuaacaauugcaccuucgaguacgugagccagcccuuccugauggaccucgagggcaagcagggcaacuucaagaaccugcgggaguucguguucaagaacaucgauggcuacuucaagaucuacagcaagcacacccccaucaaccuggugcgggaccugccccagggauucagcgcccuggagccucugguggaccugcccaucggcaucaacaucaccagguuccagacccugcuggcccugcaccggagcuaccugacccccggcgacagcagcagcggcuggaccgccggcgccgccgcauacuacgugggcuaccugcagccacggaccuuccugcugaaguacaacgagaacggcaccaucaccgacgccguggacugcgcccuggacccccugagcgagaccaagugcacccuaaagagcuucaccguggagaagggcaucuaccagaccagcaacuuccgggugcagcccacugagagcaucgugcgguuccccaacauuaccaaccugugucccuucggcgagguguucaacgccacccgguucgccagcguguacgccuggaaccggaagcggaucagcaacugcguggccgacuacagcgugcuguacaacagcgccagcuucagcaccuucaagugcuacggcgugagcccuaccaagcugaacgaccugugcuucaccaacguguacgcugacagcuucgugauccggggcgacgaggugcggcagaucgcccccggccagaccggcaacaucgccgacuacaacuacaagcugcccgacgacuucaccggcugcgugaucgccuggaacagcaacaaccuggacagcaaggugggcggcaacuacaacuaccuguaccggcuguuccguaagagcaaccugaagccauucgagcgggacaucagcaccgagaucuaccaggccggcagcacccccugcaacggugugaagggcuuuaacugcuacuucccccugcagagcuacggcuuccagcccaccuacggcgugggcuaccagcccuaccgggugguggugcugagcuucgagcugcugcacgcccccgccaccgugugcggcccuaaaaagagcaccaaccuggugaagaacaagugcgugaacuucaauuucaacggccugaccggcaccggcgugcugaccgagagcaacaagaaguuccugcccuuccagcaguucggccgggauaucgccgacaccaccgacgcagugcgggacccccagacccuggagauccuggacaucaccccaugcagcuucggcggcgugagcgucaucacccccggcacaaacaccagcaaccagguggccgugcuguaccagggagugaacugcaccgaggugcccguggccauccacgccgaccagcugacccccaccuggcggguguacagcaccggcagcaacguguuccagacccgggccggcugccugaucggcgccgagcacgugaacaacuccuacgagugcgacauccccaucggcgcuggcaucugcgccagcuaccagacccagaccaacagcccccggcgggcccggagcguggccagccagagcaucaucgccuacaccaugagcuuaggcgccgagaacagcguggccuacagcaacaacagcaucgcgaucccuaccaacuucaccaucagcgugaccaccgagauacugcccgugagcaugaccaagaccagcguggacuguaccauguacaucugcggcgacagcaccgagugcagcaaccugcugcugcaguacggcagcuucugcacccagcugaaccgggcccugaccggcaucgccguggagcaggacaagaacacccaagagguguucgcccaggugaagcagaucuacaagacucccccaaucaaggacuucggcggcuucaacuucagccagauccugcccgaccccagcaagcccagcaagcggagcuucaucgaggaccugcuguucaacaaggugacccuggccgacgccggcuucaucaagcaguacggcgacugccugggggauaucgccgcucgggaccugaucugcgcccagaaguucaacggccugaccgugcugcccccucugcugaccgacgagaugaucgcccaguacaccagcgcccugcuugccggcaccaucaccagcggcuggaccuucggcgccggcgcagcccugcagauccccuucgccaugcagauggccuaccgguucaacggcaucggcgugacccagaacgugcuguacgagaaccagaagcugaucgccaaccaguucaacagcgccaucggcaagauccaggacagccugagcagcaccgccagcgcccugggcaagcugcaggacguggugaaccagaacgcucaggcccugaacacccuggugaagcagcugagcagcaacuucggcgccaucagcucagugcugaaugacauccugagcaggcuggacaagguggaggccgaggugcagaucgaccggcugaucaccggccggcugcagagccugcagaccuacgugacccagcagcugauccgggccgccgagauccgggccagcgccaaccuggcagccaccaagaugagcgagugcgugcugggccagagcaagcggguggacuuuugcggcaagggcuaccaccugaugagcuucccccagagcgccccacacggcgugguguuccuccacgucacauacgugcccgcccaggagaagaacuucaccaccgcccccgccauuugccacgacggcaaggcucacuucccccgggagggaguguucgugagcaacggcacccacugguucgugacccagcggaacuucuacgagccccagaucaucaccaccgacaacaccuucgugagcggcaacugcgacguggugaucggcaucgugaacaacaccguguacgacccccugcagccugagcuggacagcuucaaggaggagcuggacaaguacuucaagaaccacaccagccccgacguggaucugggcgacaucagcggcaucaacgccagcguggugaacauccagaaggagaucgaccggcugaacgagguggccaagaaccugaacgagagccugaucgaccugcaggagcugggcaaguacgagcaguacaucaaguggcccugguacaucuggcugggcuucaucgccggccugaucgccaucgugauggugaccaucaugcugugcugcaugaccagcugcuguagcugccugaagggcugcugcagcugcggcagcugcugcaaguucgacgaggacgacagcgagccagugcugaagggcgugaagcugcacuacaccuga

SEQ ID NO: 23037 - RNA, 3813 nt, Artificial Sequence
  SARS-CoV-2/Wuhan/WIV05/2019__EPI_ISL_402128 spike protein CDS gc (1-1273)(L18F_D80A_D215G_L242del_A243del_L244del_R246I_K417N_E484 K_N501Y_D614G_A701V)
auguucguguuccuggugcugcugccccuggugagcagccagugcgugaacuucaccacccggacccagcugcccccugccuacaccaacagcuucacccggggcguguacuaccccgacaagguguuccggagcagcgugcugcacagcacccaggaccuguuccugcccuucuucagcaacgugaccugguuccacgccauccacgugagcggcaccaacggcaccaagcgguucgccaacccagugcugcccuucaacgacggcguguacuucgccagcaccgagaagucaaacaucauccggggcuggaucuuuggcaccacccuggacagcaagacacagagccugcugaucgugaacaacgcuaccaacguggugaucaaggugugcgaguuccaguucugcaacgaccccuuccugggcguguacuaccacaagaacaacaagagcuggauggagagcgaguuccgggucuacagcagcgccaacaauugcaccuucgaguacgugagccagcccuuccugauggaccuggagggcaagcagggcaacuucaagaaccuccgggaguucguguucaagaacaucgacggcuacuucaagaucuacagcaagcacacccccaucaaccuggugcggggacugccccagggcuucagcgcccuggagccucugguggaucugcccaucggcaucaacaucaccagguuccagacccugcacaucagcuaccugacccccggcgacagcagcagcggcuggaccgccggcgccgccgcauacuacgugggcuaccugcagccacggaccuuccugcugaaguacaacgagaacggcaccaucaccgacgccguggacugcgcccuggacccccugagcgagaccaagugcacccuuaagagcuucaccguggagaagggcaucuaccagaccagcaacuuccgggugcagcccacugagagcauugugcgguuccccaacaucaccaaccugugucccuucggcgagguguucaacgccacccgguucgccagcguguacgccuggaaccggaagcggaucagcaacugcguggccgacuacagcgugcuguacaacagcgccagcuucagcaccuucaagugcuacggcgugagcccuaccaagcugaacgaccugugcuucaccaacguguacgcugacagcuucgugauccggggcgacgaggugcggcagaucgcccccggccagaccggcaacaucgccgacuacaacuacaagcugcccgacgacuucaccggcugcgugaucgccuggaacagcaacaaccuggacagcaaggugggcggcaacuacaacuaccuguaccggcuauuccguaagagcaaccugaagccauuugagcgggacaucagcaccgagaucuaccaggccgguagcacccccugcaacggcgugaagggcuucaacugcuacuucccccugcagagcuacggcuuccagcccaccuacggcgugggcuaccagcccuaccgggugguggugcugagcuucgagcugcugcacgcccccgccaccgugugcggcccuaaaaagagcaccaaccuggugaagaacaagugcgugaacuucaauuucaacggccugaccggcaccggcgugcugaccgagagcaacaagaaguuccugcccuuccagcaguucggccgggacaucgccgacaccaccgaugcagugcgggacccccagacccuggagauccuggacaucaccccaugcagcuucggcggcgugagcgucaucacccccggaacaaacaccagcaaccagguggccgugcuguaccagggcgugaacugcaccgaggugcccguggccauccacgccgaccagcugacccccaccuggcggguguacagcaccggcagcaacguguuccagacccgggccggcugccugaucggcgccgagcacgugaacaacuccuacgagugcgacauccccaucggcgcuggcaucugcgccagcuaccagacccagaccaacagcccccggcgggcccggagcguggccagccagagcaucaucgccuacaccaugagccugggcguggagaacagcguggccuacagcaacaacagcaucgccaucccuaccaacuucaccauaagcgugaccaccgagauccugcccgugagcaugaccaagaccagcguggacuguaccauguacaucugcggcgacagcaccgagugcagcaaccuguuacugcaguacggcagcuucugcacccagcugaaccgggcgcugaccggcaucgccguggagcaggacaagaacacccaagagguguucgcccaggugaagcagaucuacaagacucccccaaucaaggacuucggcggcuucaacuucagccagauccugcccgaccccagcaagcccagcaagcggagcuucaucgaggaccugcuguucaacaaggugacccuggccgacgccggcuucaucaagcaguacggggacugccugggcgacaucgccgcccgggaccugaucugcgcucagaaguucaacggccugaccgugcugcccccucugcugaccgaugagaugaucgcccaguacaccagcgcccugcuggccggcaccaucaccagcggcuggaccuucggcgccggcgccgcacugcagauccccuucgccaugcagauggccuaccgguucaacggcaucggcgugacccagaacgugcuguacgagaaccagaagcugaucgccaaccaguucaacagcgccaucggcaagauccaggacagccugagcagcaccgccagcgcccugggcaagcugcaggacguggugaaccagaacgcccaggcucugaacacccuggugaagcagcugagcagcaacuuuggcgccaucagcucagugcugaaugacauccugagccggcuggacaagguggaggccgaggugcagaucgacaggcugaucaccggccggcugcagagccugcagaccuacgugacccagcagcugauccgggccgccgagauucgggccagcgccaaccuggccgcaaccaagaugagcgagugcgugcugggccagagcaagcggguggacuucugcggcaagggcuaccaccugaugagcuucccccagagcgccccacacggcguggucuuccugcacgugacauacgugcccgcccaggagaagaacuucaccaccgcccccgccaucugccacgacggaaaggcccacuucccccgggagggcguguucgugagcaacggcacccacugguucgugacccagcggaacuucuacgagccccagaucaucaccaccgacaacaccuucgugagcggcaacugcgacguggugaucggcaucgugaacaacaccguguacgacccccugcagccugagcuggacagcuucaaggaggagcucgacaaguacuucaagaaccacaccagccccgacguggaccugggcgacaucagcggcaucaacgcuagcguggugaacauccagaaggagaucgaucggcugaacgagguggccaagaaccugaacgagagccugaucgaccugcaggagcugggcaaguacgagcaguacaucaaguggcccugguacaucuggcugggcuucaucgccggccugaucgccaucgugauggugaccaucaugcugugcugcaugaccagcugcuguagcugccugaagggcugcugcagcugcggcagcugcugcaaguucgacgaggacgacagcgagccagugcugaagggcgugaagcugcacuacaccuga

SEQ ID NO: 23038 - RNA, 3822 nt, Artificial Sequence
  SARS-CoV-2/Wuhan/WIV05/2019__EPI_ISL_402128 spike protein CDS gc (1-1273)(E484K_D614G)
auguucguguuccuggugcugcugccccuggugagcagccagugcgugaaccugaccacccggacccagcugcccccugccuacaccaacagcuucacccggggcguguacuaccccgacaagguguuccggagcagcgugcugcacagcacccaggaccuguuccugcccuucuucagcaacgugaccugguuccacgccauccacgugagcggcaccaacggcaccaagcgguucgacaacccagugcugcccuucaacgacggcguguacuucgccagcaccgagaagucaaacaucauccggggcuggaucuucggcaccacccuggacagcaagacacagagccugcugaucgugaacaacgccaccaacguggugaucaaggugugcgaguuucaguucugcaacgaccccuuccugggcguguacuaccacaagaacaacaagagcuggauggagagcgaguuccgggucuacagcagcgcuaacaauugcaccuucgaguacgugagccagcccuuccugauggaccucgagggcaagcagggcaacuucaagaaccugcgggaguucguguucaagaacaucgauggcuacuucaagaucuacagcaagcacacccccaucaaccuggugcgggaccugccccagggauucagcgcccuggagccucugguggaccugcccaucggcaucaacaucaccagguuccagacccugcuggcccugcaccggagcuaccugacccccggcgacagcagcagcggcuggaccgccggcgccgccgcauacuacgugggcuaccugcagccacggaccuuccugcugaaguacaacgagaacggcaccaucaccgacgccguggacugcgcccuggacccccugagcgagaccaagugcacccuaaagagcuucaccguggagaagggcaucuaccagaccagcaacuuccgggugcagcccacugagagcaucgugcgguuccccaacauuaccaaccugugucccuucggcgagguguucaacgccacccgguucgccagcguguacgccuggaaccggaagcggaucagcaacugcguggccgacuacagcgugcuguacaacagcgccagcuucagcaccuucaagugcuacggcgugagcccuaccaagcugaacgaccugugcuucaccaacguguacgcugacagcuucgugauccggggcgacgaggugcggcagaucgcccccggccagaccggcaagaucgccgacuacaacuacaagcugcccgacgacuucaccggcugcgugaucgccuggaacagcaacaaccuggacagcaaggugggcggcaacuacaacuaccuguaccggcuguuccguaagagcaaccugaagccauucgagcgggacaucagcaccgagaucuaccaggccggcagcacccccugcaacggugugaagggcuuuaacugcuacuucccccugcagagcuacggcuuccagcccaccaacggcgugggcuaccagcccuaccgggugguggugcugagcuucgagcugcugcacgcccccgccaccgugugcggcccuaaaaagagcaccaaccuggugaagaacaagugcgugaacuucaauuucaacggccugaccggcaccggcgugcugaccgagagcaacaagaaguuccugcccuuccagcaguucggccgggauaucgccgacaccaccgacgcagugcgggacccccagacccuggagauccuggacaucaccccaugcagcuucggcggcgugagcgucaucacccccggcacaaacaccagcaaccagguggccgugcuguaccagggagugaacugcaccgaggugcccguggccauccacgccgaccagcugacccccaccuggcggguguacagcaccggcagcaacguguuccagacccgggccggcugccugaucggcgccgagcacgugaacaacuccuacgagugcgacauccccaucggcgcuggcaucugcgccagcuaccagacccagaccaacagcccccggcgggcccggagcguggccagccagagcaucaucgccuacaccaugagcuuaggcgccgagaacagcguggccuacagcaacaacagcaucgcgaucccuaccaacuucaccaucagcgugaccaccgagauacugcccgugagcaugaccaagaccagcguggacuguaccauguacaucugcggcgacagcaccgagugcagcaaccugcugcugcaguacggcagcuucugcacccagcugaaccgggcccugaccggcaucgccguggagcaggacaagaacacccaagagguguucgcccaggugaagcagaucuacaagacucccccaaucaaggacuucggcggcuucaacuucagccagauccugcccgaccccagcaagcccagcaagcggagcuucaucgaggaccugcuguucaacaaggugacccuggccgacgccggcuucaucaagcaguacggcgacugccugggggauaucgccgcucgggaccugaucugcgcccagaaguucaacggccugaccgugcugcccccucugcugaccgacgagaugaucgcccaguacaccagcgcccugcuugccggcaccaucaccagcggcuggaccuucggcgccggcgcagcccugcagauccccuucgccaugcagauggccuaccgguucaacggcaucggcgugacccagaacgugcuguacgagaaccagaagcugaucgccaaccaguucaacagcgccaucggcaagauccaggacagccugagcagcaccgccagcgcccugggcaagcugcaggacguggugaaccagaacgcucaggcccugaacacccuggugaagcagcugagcagcaacuucggcgccaucagcucagugcugaaugacauccugagcaggcuggacaagguggaggccgaggugcagaucgaccggcugaucaccggccggcugcagagccugcagaccuacgugacccagcagcugauccgggccgccgagauccgggccagcgccaaccuggcagccaccaagaugagcgagugcgugcugggccagagcaagcggguggacuuuugcggcaagggcuaccaccugaugagcuucccccagagcgccccacacggcgugguguuccuccacgucacauacgugcccgcccaggagaagaacuucaccaccgcccccgccauuugccacgacggcaaggcucacuucccccgggagggaguguucgugagcaacggcacccacugguucgugacccagcggaacuucuacgagccccagaucaucaccaccgacaacaccuucgugagcggcaacugcgacguggugaucggcaucgugaacaacaccguguacgacccccugcagccugagcuggacagcuucaaggaggagcuggacaaguacuucaagaaccacaccagccccgacguggaucugggcgacaucagcggcaucaacgccagcguggugaacauccagaaggagaucgaccggcugaacgagguggccaagaaccugaacgagagccugaucgaccugcaggagcugggcaaguacgagcaguacaucaaguggcccugguacaucuggcugggcuucaucgccggccugaucgccaucgugauggugaccaucaugcugugcugcaugaccagcugcuguagcugccugaagggcugcugcagcugcggcagcugcugcaaguucgacgaggacgacagcgagccagugcugaagggcgugaagcugcacuacaccuga

SEQ ID NO: 23039 - RNA, 3822 nt, Artificial Sequence
  SARS-CoV-2/Wuhan/WIV05/2019__EPI_ISL_402128 spike protein CDS gc (1-1273)(L18F_T20N_P26S_D138Y_R190S_K417T_E484K_N501Y_D614G_H655Y _T1027I)
auguucguguuccuggugcugcugccccuggugagcagccagugcgugaacuucaccaaccggacccagcugcccagcgccuacaccaacagcuucacccggggcguguacuacccugacaagguguuccggagcagcgugcugcacagcacccaggaccuguuccugcccuucuucagcaacgugaccugguuccacgccauccacgugagcggcaccaacggcaccaagcgguucgacaaccccgugcugccauucaacgacggcguguacuucgccagcaccgagaagucaaacaucauccggggcuggaucuuuggcaccacccuggacagcaagacccagagccugcugaucgugaacaacgccacaaacguggugaucaaggugugcgaguuccaguucugcaacuaccccuuccugggcguguacuaccacaagaacaacaagagcuggauggagagcgaguuccgggucuacagcagcgcuaauaacugcaccuucgaguacgugagccagcccuuccugauggaccuggagggcaagcagggcaacuucaagaaccucagcgaguucguguucaagaacaucgacggcuacuucaagaucuacagcaagcacacccccaucaaccuggugcgggaucugccccagggauucagcgcccuggagccccugguggaccugccuaucggcaucaacaucacccgguuccagacccugcuggcccugcacaggagcuaccugacccccggcgacagcagcagcggcuggaccgccggcgccgccgcauacuacgugggcuaccugcagccccggaccuuccugcugaaguacaacgagaacggcaccaucaccgacgccguggacugcgcccuggacccacugagcgagaccaagugcacccuaaagagcuucaccguggagaagggcaucuaccagaccagcaacuuccgggugcagcccaccgagagcaucgugcgguuccccaacauuacuaaccugugucccuucggcgagguguucaacgccacccgguucgccagcguguacgccuggaaccggaagcggaucagcaacugcguggccgacuacagcgugcuguacaacagcgccagcuucagcaccuucaagugcuacggcgugagccccaccaagcugaacgaccugugcuucaccaacguguacgcugacagcuucgugauccggggcgacgaggugcggcagaucgccccuggccagaccggcaccaucgccgacuacaacuacaagcugcccgacgacuucaccggcugcgugaucgccuggaacagcaacaaccuggacagcaaggugggcggcaacuacaacuaccuguaccggcuguuccguaagagcaaccugaagcccuuugagcgggacaucagcaccgagaucuaccaggccggcagcaccccaugcaacggugugaagggcuucaacugcuacuucccccugcagagcuacggcuuccagcccaccuacggcgugggcuaccagcccuaccgggugguggugcugagcuucgagcugcugcacgcccccgccaccgugugcggccccaaaaagagcaccaaccuggugaagaacaagugcgugaacuucaauuucaacggccugaccggcaccggcgugcugaccgagagcaacaagaaguuccugccuuuccagcaguucggccgggacaucgccgauaccaccgacgcagugcgggacccccagacccuggagauccuggacaucacccccugcagcuucggcggcgugagcgucaucaccccaggcacaaacaccagcaaccagguggccgugcuguaccagggagugaacugcaccgaggugcccguggccauccacgccgaccagcugacccccaccuggcggguguacuccaccggcagcaacguguuccagacccgggccggcugccugaucggcgccgaguacgugaacaacagcuacgagugcgacauccccaucggcgcuggcaucugcgccagcuaccagacccagaccaacagcccccggcgggcccggagcguggccagccagagcaucaucgccuacaccaugagccugggcgccgagaacagcguggccuacagcaacaacagcaucgcgauccccaccaacuucaccaucagcgugaccaccgagauauuaccugugagcaugaccaagaccagcguggacuguaccauguacaucugcggcgacagcaccgagugcagcaaccugcugcugcaguacggcagcuucugcacccagcugaaccgggcccugaccggcaucgccguggagcaggacaagaacacccaagagguguucgcccaggugaagcagaucuacaagacuccacccaucaaggacuucggcggcuucaacuucagccagauccugcccgaccccagcaagcccagcaagcggagcuucaucgaggaccugcuguucaacaaggugacccuggccgacgccggcuucaucaagcaguacggcgacugccugggggacaucgccgcucgggaucugaucugcgcccagaaguucaacggccugaccgugcugccuccccugcugaccgacgagaugaucgcccaguacaccagcgcccugcuggccggcaccaucaccagcggcuggaccuucggcgccggcgcagcccuucagauccccuucgccaugcagauggccuaccgguucaacggcaucggcgugacccagaacgugcuguacgagaaccagaagcugaucgccaaccaguucaacagcgccaucggcaagauccaggacagccugagcagcaccgccagcgcccugggcaagcugcaggacguggugaaccagaacgcucaggcccugaacacccuggugaagcagcugagcucaaacuuuggcgccaucagcagcgugcugaaugacauccugagccggcuggacaagguggaggccgaggugcagaucgacaggcugaucaccggccggcugcagagccugcagaccuacgugacccagcagcugauccgggccgccgagauccgggccagcgccaaccuggcagccauuaagaugagcgagugcgugcugggccagagcaagcggguggacuucugcggcaagggcuaccaccugaugagcuucccccagagcgcuccccacggcgugguguuccugcacgucaccuacgugccagcccaggagaagaacuucacaaccgcccccgccaucugccacgacggcaaggcccacuucccccgggagggaguguucgugagcaacggcacccacugguucgugacccagcggaacuucuacgagccccagaucaucaccaccgacaacaccuucgugagcggcaacugcgacguggugaucggcaucgugaacaacaccguguacgacccccuccagcccgagcuggacagcuucaaggaggagcuggacaaguacuucaagaaccacaccagcccugacguggaccugggcgauaucagcggcaucaacgccagcguggugaacauccagaaggagaucgaccggcugaacgagguggccaagaaccugaacgagagccugaucgaccugcaggagcugggcaaguacgagcaguacaucaaguggcccugguacaucuggcugggcuucaucgccggccugaucgccaucgugauggugaccaucaugcugugcugcaugaccagcugcuguagcugccugaagggcugcugcagcugcggcagcugcugcaaguucgacgaggacgacagcgagcccgugcugaagggcgugaagcugcacuacaccuga

SEQ ID NO: 23040 - RNA, 3822 nt, Artificial Sequence
  SARS-CoV-2/Wuhan/WIV05/2019__EPI_ISL_402128 spike protein CDS gc (1-1273)(S13I_W152C_L452R_D614G)
auguucguguuccuggugcugcugccccuggugagcauccagugcgugaaccugaccacccggacccagcugcccccugccuacaccaacagcuucacccggggcguguacuaccccgacaagguguuccggagcagcgugcugcacagcacccaggaccuguuccugcccuucuucagcaacgugaccugguuccacgccauccacgugagcggcaccaacggcaccaagcgguucgacaacccagugcugcccuucaacgacggcguguacuucgccagcaccgagaagucaaacaucauccggggcuggaucuucggcaccacccuggacagcaagacacagagccugcugaucgugaacaacgccaccaacguggugaucaaggugugcgaguuucaguucugcaacgaccccuuccugggcguguacuaccacaagaacaacaagagcugcauggagagcgaguuccgggucuacagcagcgcuaacaauugcaccuucgaguacgugagccagcccuuccugauggaccucgagggcaagcagggcaacuucaagaaccugcgggaguucguguucaagaacaucgauggcuacuucaagaucuacagcaagcacacccccaucaaccuggugcgggaccugccccagggauucagcgcccuggagccucugguggaccugcccaucggcaucaacaucaccagguuccagacccugcuggcccugcaccggagcuaccugacccccggcgacagcagcagcggcuggaccgccggcgccgccgcauacuacgugggcuaccugcagccacggaccuuccugcugaaguacaacgagaacggcaccaucaccgacgccguggacugcgcccuggacccccugagcgagaccaaguguacccuaaagagcuucaccguggagaagggcaucuaccagaccagcaacuuccgggugcagcccacugagagcauugugcgguuccccaacaucaccaaccugugccccuucggcgagguguucaacgccacccgguucgccagcguguacgccuggaaccggaagcggaucagcaacugcguggccgacuacagcgugcuguacaacagcgccagcuucagcaccuucaagugcuacggcgugagcccuaccaagcugaacgaccugugcuucaccaacguguacgcugacagcuucgugauccggggcgacgaggugcggcagaucgcccccggccagaccggcaagaucgccgacuacaacuacaagcugcccgacgacuucaccggcugcgugaucgccuggaacagcaacaaccuggacagcaaggugggcggcaacuacaacuaccgguaccggcuguuccguaagagcaaccugaagccauucgagcgggacaucagcaccgagaucuaccaggccggcagcacccccugcaacgguguggagggcuuuaacugcuacuucccccugcagagcuacggcuuccagcccaccaacggcgugggcuaccagcccuaccgggugguggugcugagcuucgagcugcugcacgcccccgccaccgugugcggcccuaaaaagagcaccaaccuggugaagaacaagugcgugaacuucaauuucaacggccugaccggcaccggcgugcugaccgagagcaacaagaaguuccugcccuuccagcaguucggccgggauaucgccgacaccaccgacgcagugcgggacccccagacccuggagauccuggacaucaccccaugcagcuucggcggcgugagcgucaucacccccggcacaaacaccagcaaccagguggccgugcuguaccagggagugaacugcaccgaggugcccguggccauccacgccgaccagcugacccccaccuggcggguguacagcaccggcagcaacguguuccagacccgggccggcugccugaucggcgccgagcacgugaacaacagcuacgagugcgacauccccaucggcgcuggcaucugugccuccuaccagacccagaccaacagcccccggcgggcccggagcguggccagccagagcaucaucgccuacaccaugagccugggcgccgagaacagcguggccuacagcaacaacagcaucgcgaucccuaccaacuucaccauaagcgugaccaccgagaucuuacccgugagcaugaccaagaccagcguggacugcaccauguacaucugcggcgacagcaccgagugcagcaaccugcugcugcaguacggcagcuucugcacccagcugaaccgggcccugaccggcaucgccguggagcaggacaagaacacccaagagguguucgcccaggugaagcagaucuacaagacucccccaaucaaggacuucggcggcuucaacuucagccagauccugcccgaccccagcaagcccagcaagcggagcuucaucgaggaccugcuguucaacaaggugacccuggccgacgccggcuucaucaagcaguacggcgacugccugggggauaucgccgcucgggaccugaucugcgcccagaaguucaacggccugaccgugcugcccccucugcugaccgacgagaugaucgcccaguacaccagcgcccugcuggccggcaccaucaccagcggcuggaccuucggcgccggcgcagcccuucagauccccuucgccaugcagauggccuacagguucaacggcaucggcgugacccagaacgugcuguacgagaaccagaagcugaucgccaaccaguucaacagcgccaucggcaagauccaggacagccugagcagcaccgccagcgcccugggcaagcugcaggacguggugaaccagaacgcucaggcccugaacacccuggugaagcagcugagcagcaacuucggcgccaucagcagcgugcugaaugacauccugucacggcuggacaagguggaggccgaggugcagaucgaccggcugaucaccggccggcugcagagccugcagaccuacgugacccagcagcugauccgggccgccgagauucgggccagcgccaaccuggcagccaccaagaugagcgagugcgugcugggccagagcaagcggguggacuuuugcggcaagggcuaccaccugaugagcuucccccagagcgccccacacggcgugguguuccugcacgucacauacgugcccgcccaggagaagaacuucaccaccgcccccgccaucugccacgacggcaaggcucacuucccccgggagggaguguucgugagcaacggcacccacugguucgugacccagcggaacuucuacgagccccagaucaucaccaccgacaacaccuucgugagcggcaacugcgacguggugaucggcaucgugaacaacaccguguacgacccccuccagccugagcuggacagcuucaaggaggagcuggacaaguacuucaagaaccacaccagccccgacguggaucugggcgacaucagcggcaucaacgccagcguggugaacauccagaaggagaucgaccggcugaacgagguggccaagaaccugaacgagagccugaucgaccugcaggagcugggcaaguacgagcaguacaucaaguggcccugguacaucuggcugggcuucaucgccggccugaucgccaucgugauggugaccaucaugcugugcugcaugaccagcuguugcagcugccugaagggcugcugcagcugcggcagcugcugcaaguucgacgaggacgacagcgagccagugcugaagggcgugaagcugcacuacaccuga

SEQ ID NO: 23041 - RNA, 3822 nt, Artificial Sequence; identical to SEQ ID NO: 12034
  SARS-CoV-2/Wuhan/WIV05/2019__EPI_ISL_402128 spike protein CDS gc mod (1-1273)

SEQ ID NO: 23042 - RNA, 3822 nt, Artificial Sequence
  SARS-CoV-2/Wuhan/WIV05/2019__EPI_ISL_402128 spike protein CDS gc mod (1-1273)(D614G)
auguucguguuucuggugcugcugccccugguguccagccagugugugaaccugaccaccagaacacagcugccuccagccuacaccaacagcuucaccagaggcguguacuaccccgacaagguguucagauccagcgugcugcacucuacccaggaccuguuccugccuuucuucagcaacgugaccugguuccacgccauccacguguccggcaccaauggcaccaagagauucgacaaccccgugcugcccuucaacgacgggguguacuuugccagcaccgagaaguccaacaucaucagaggcuggaucuucggcaccacacuggacagcaagacccagagccugcugaucgugaacaacgccaccaacguggucaucaaagugugcgaguuccaguucugcaacgaccccuuccugggcgucuacuaccacaagaacaacaagagcuggauggaaagcgaguuccggguguacagcagcgccaacaacugcaccuucgaguacgugucccagccuuuccugauggaccuggaaggcaagcagggcaacuucaagaaccugcgcgaguucguguucaagaacaucgacggcuacuucaaaaucuacagcaagcacaccccuaucaaccucgugcgggaucugccucagggcuucucugcucuggaaccccugguggaucugcccaucggcaucaacaucacccgguuucagacacugcuggcccugcacagaagcuaccugacaccuggcgauagcagcagcggauggacagcuggugccgccgcuuacuaugugggcuaccugcagccuagaaccuuccugcugaaguacaacgagaacggcaccaucaccgacgccguggauugugcucuggauccucugagcgagacaaagugcacccugaaguccuucaccguggaaaagggcaucuaccagaccagcaacuuccgggugcagcccaccgaauccaucgugcgguuccccaauaucaccaaucugugccccuucggcgagguguucaaugccaccagauucgccucuguguacgccuggaaccggaagcggaucagcaauugcguggccgacuacuccgugcuguacaacuccgccagcuucagcaccuucaagugcuacggcguguccccuaccaagcugaacgaccugugcuucacaaacguguacgccgacagcuucgugauccggggagaugaagugcggcagauugccccuggacagacaggcaagaucgccgacuacaacuacaagcugcccgacgacuucaccggcugugugauugccuggaacagcaacaaccuggacuccaaagucggcggcaacuacaauuaccuguaccggcuguuccggaaguccaaucugaagcccuucgagcgggacaucagcaccgaaaucuaucaggccggcagcaccccuugcaacggcguggaaggcuucaacugcuacuucccacugcaguccuacggcuuucagcccacaaauggcgugggcuaucagcccuacagagugguggugcugagcuucgaacugcugcaugcuccugccacagugugcggcccuaagaaaagcaccaaucucgugaagaacaaaugcgugaacuucaacuucaacggccugaccggcaccggcgugcugacagagagcaacaagaaguuccugccauuccagcaguuuggccgggauaucgccgauaccacagacgccguuagagauccccagacacuggaaauccuggacaucaccccaugcagcuucggcggagugucugugaucaccccuggcaccaacaccagcaaucagguggcagugcuguaccagggcgugaacuguaccgaagugcccguggccauucacgccgaucagcugacaccuacauggcggguguacuccaccggcagcaauguguuucagaccagagccggcugucugaucggagccgagcacgugaacaauagcuacgagugcgacauccccaucggcgcuggcaucugugccagcuaccagacacagacaaacagccccagacgggcuagaagcguggccagccagagcaucauugccuacacaaugucucugggcgccgagaacagcguggccuacuccaacaacucuaucgcuauccccaccaacuucaccaucagcgugaccaccgagauccugccuguguccaugaccaagaccagcguggacugcaccauguacaucugcggcgauuccaccgagugcuccaaccugcugcugcaguacggcagcuucugcacccagcugaauagagcccugacagggaucgccguggaacaggacaagaacacccaagagguguucgcccaagugaagcaaaucuacaagaccccuccuaucaaggacuucggcggcuucaauuucagccagauucugcccgauccuagcaagcccagcaagcggagcuucaucgaggaccugcuguucaacaaagugacacuggccgacgccggcuucaucaagcaguauggcgauugucugggcgacauugccgccagggaucugauuugcgcccagaaguuuaacggacugacagugcugccuccucugcugaccgaugagaugaucgcccaguacacaucugcccugcuggccggcacaaucacaagcggcuggacauuuggagcuggcgccgcucugcagauccccuuugcuaugcagauggccuaccgguucaacggcaucggagugacccagaaugugcuguacgagaaccagaagcugaucgccaaccaguucaacagcgccaucggcaagauccaggacagccugagcagcacagcaagcgcccugggaaagcugcaggacguggucaaccagaaugcccaggcacugaacacccuggucaagcagcuguccuccaacuucggcgccaucagcucugugcugaacgauauccugagcagacuggacaaggucgaggccgaggugcagaucgacagacugaucacaggcagacugcagagccuccagacauacgugacccagcagcugaucagagccgccgagauuagagccucugccaaucuggccgccaccaagaugucugagugugugcugggccagagcaagagaguggacuuuugcggcaagggcuaccaccugaugagcuucccucagucugccccucacggcgugguguuucugcacgugacauaugugcccgcucaagagaagaauuucaccaccgcuccagccaucugccacgacggcaaagcccacuuuccuagagaaggcguguucguguccaacggcacccauugguucgugacacagcggaacuucuacgagccccagaucaucaccaccgacaacaccuucgugucuggcaacugcgacguugugaucggcauugugaacaauaccguguacgacccucugcagcccgagcuggacagcuucaaagaggaacuggacaaguacuuuaagaaccacacaagccccgacguggaccugggcgauaucagcggaaucaaugccagcgucgugaacauccagaaagagaucgaccggcugaacgagguggccaagaaucugaacgagagccugaucgaccugcaagaacuggggaaguacgagcaguacaucaaguggcccugguacaucuggcugggcuuuaucgccggacugauugccaucgugauggucacaaucaugcuguguugcaugaccagcugcuguagcugccugaagggcuguuguagcuguggcagcugcugcaaguucgacgaggacgauucugagcccgugcugaagggcgugaaacugcacuacaccuga

SEQ ID NO: 23043 - RNA, 3822 nt, Artificial Sequence
  SARS-CoV-2/Wuhan/WIV05/2019__EPI_ISL_402128 spike protein CDS gc mod (1-1273)(A222V_D614G)
auguucguguuucuggugcugcugccccugguguccagccagugugugaaccugaccaccagaacacagcugccuccagccuacaccaacagcuucaccagaggcguguacuaccccgacaagguguucagauccagcgugcugcacucuacccaggaccuguuccugccuuucuucagcaacgugaccugguuccacgccauccacguguccggcaccaauggcaccaagagauucgacaaccccgugcugcccuucaacgacgggguguacuuugccagcaccgagaaguccaacaucaucagaggcuggaucuucggcaccacacuggacagcaagacccagagccugcugaucgugaacaacgccaccaacguggucaucaaagugugcgaguuccaguucugcaacgaccccuuccugggcgucuacuaccacaagaacaacaagagcuggauggaaagcgaguuccggguguacagcagcgccaacaacugcaccuucgaguacgugucccagccuuuccugauggaccuggaaggcaagcagggcaacuucaagaaccugcgcgaguucguguucaagaacaucgacggcuacuucaaaaucuacagcaagcacaccccuaucaaccucgugcgggaucugccucagggcuucucugugcuggaaccccugguggaucugcccaucggcaucaacaucacccgguuucagacacugcuggcccugcacagaagcuaccugacaccuggcgauagcagcagcggauggacagcuggugccgccgcuuacuaugugggcuaccugcagccuagaaccuuccugcugaaguacaacgagaacggcaccaucaccgacgccguggauugugcucuggauccucugagcgagacaaagugcacccugaaguccuucaccguggaaaagggcaucuaccagaccagcaacuuccgggugcagcccaccgaauccaucgugcgguuccccaauaucaccaaucugugccccuucggcgagguguucaaugccaccagauucgccucuguguacgccuggaaccggaagcggaucagcaauugcguggccgacuacuccgugcuguacaacuccgccagcuucagcaccuucaagugcuacggcguguccccuaccaagcugaacgaccugugcuucacaaacguguacgccgacagcuucgugauccggggagaugaagugcggcagauugccccuggacagacaggcaagaucgccgacuacaacuacaagcugcccgacgacuucaccggcugugugauugccuggaacagcaacaaccuggacuccaaagucggcggcaacuacaauuaccuguaccggcuguuccggaaguccaaucugaagcccuucgagcgggacaucagcaccgaaaucuaucaggccggcagcaccccuugcaacggcguggaaggcuucaacugcuacuucccacugcaguccuacggcuuucagcccacaaauggcgugggcuaucagcccuacagagugguggugcugagcuucgaacugcugcaugcuccugccacagugugcggcccuaagaaaagcaccaaucucgugaagaacaaaugcgugaacuucaacuucaacggccugaccggcaccggcgugcugacagagagcaacaagaaguuccugccauuccagcaguuuggccgggauaucgccgauaccacagacgccguuagagauccccagacacuggaaauccuggacaucaccccaugcagcuucggcggagugucugugaucaccccuggcaccaacaccagcaaucagguggcagugcuguaccagggcgugaacuguaccgaagugcccguggccauucacgccgaucagcugacaccuacauggcggguguacuccaccggcagcaauguguuucagaccagagccggcugucugaucggagccgagcacgugaacaauagcuacgagugcgacauccccaucggcgcuggcaucugugccagcuaccagacacagacaaacagccccagacgggcuagaagcguggccagccagagcaucauugccuacacaaugucucugggcgccgagaacagcguggccuacuccaacaacucuaucgcuauccccaccaacuucaccaucagcgugaccaccgagauccugccuguguccaugaccaagaccagcguggacugcaccauguacaucugcggcgauuccaccgagugcuccaaccugcugcugcaguacggcagcuucugcacccagcugaauagagcccugacagggaucgccguggaacaggacaagaacacccaagagguguucgcccaagugaagcaaaucuacaagaccccuccuaucaaggacuucggcggcuucaauuucagccagauucugcccgauccuagcaagcccagcaagcggagcuucaucgaggaccugcuguucaacaaagugacacuggccgacgccggcuucaucaagcaguauggcgauugucugggcgacauugccgccagggaucugauuugcgcccagaaguuuaacggacugacagugcugccuccucugcugaccgaugagaugaucgcccaguacacaucugcccugcuggccggcacaaucacaagcggcuggacauuuggagcuggcgccgcucugcagauccccuuugcuaugcagauggccuaccgguucaacggcaucggagugacccagaaugugcuguacgagaaccagaagcugaucgccaaccaguucaacagcgccaucggcaagauccaggacagccugagcagcacagcaagcgcccugggaaagcugcaggacguggucaaccagaaugcccaggcacugaacacccuggucaagcagcuguccuccaacuucggcgccaucagcucugugcugaacgauauccugagcagacuggacaaggucgaggccgaggugcagaucgacagacugaucacaggcagacugcagagccuccagacauacgugacccagcagcugaucagagccgccgagauuagagccucugccaaucuggccgccaccaagaugucugagugugugcugggccagagcaagagaguggacuuuugcggcaagggcuaccaccugaugagcuucccucagucugccccucacggcgugguguuucugcacgugacauaugugcccgcucaagagaagaauuucaccaccgcuccagccaucugccacgacggcaaagcccacuuuccuagagaaggcguguucguguccaacggcacccauugguucgugacacagcggaacuucuacgagccccagaucaucaccaccgacaacaccuucgugucuggcaacugcgacguugugaucggcauugugaacaauaccguguacgacccucugcagcccgagcuggacagcuucaaagaggaacuggacaaguacuuuaagaaccacacaagccccgacguggaccugggcgauaucagcggaaucaaugccagcgucgugaacauccagaaagagaucgaccggcugaacgagguggccaagaaucugaacgagagccugaucgaccugcaagaacuggggaaguacgagcaguacaucaaguggcccugguacaucuggcugggcuuuaucgccggacugauugccaucgugauggucacaaucaugcuguguugcaugaccagcugcuguagcugccugaagggcuguuguagcuguggcagcugcugcaaguucgacgaggacgauucugagcccgugcugaagggcgugaaacugcacuacaccuga

SEQ ID NO: 23044 - RNA, 3822 nt, Artificial Sequence
  SARS-CoV-2/Wuhan/WIV05/2019__EPI_ISL_402128 spike protein CDS gc mod (1-1273)(N439K_D614G)
auguucguguuucuggugcugcugccccugguguccagccagugugugaaccugaccaccagaacacagcugccuccagccuacaccaacagcuucaccagaggcguguacuaccccgacaagguguucagauccagcgugcugcacucuacccaggaccuguuccugccuuucuucagcaacgugaccugguuccacgccauccacguguccggcaccaauggcaccaagagauucgacaaccccgugcugcccuucaacgacgggguguacuuugccagcaccgagaaguccaacaucaucagaggcuggaucuucggcaccacacuggacagcaagacccagagccugcugaucgugaacaacgccaccaacguggucaucaaagugugcgaguuccaguucugcaacgaccccuuccugggcgucuacuaccacaagaacaacaagagcuggauggaaagcgaguuccggguguacagcagcgccaacaacugcaccuucgaguacgugucccagccuuuccugauggaccuggaaggcaagcagggcaacuucaagaaccugcgcgaguucguguucaagaacaucgacggcuacuucaaaaucuacagcaagcacaccccuaucaaccucgugcgggaucugccucagggcuucucugcucuggaaccccugguggaucugcccaucggcaucaacaucacccgguuucagacacugcuggcccugcacagaagcuaccugacaccuggcgauagcagcagcggauggacagcuggugccgccgcuuacuaugugggcuaccugcagccuagaaccuuccugcugaaguacaacgagaacggcaccaucaccgacgccguggauugugcucuggauccucugagcgagacaaagugcacccugaaguccuucaccguggaaaagggcaucuaccagaccagcaacuuccgggugcagcccaccgaauccaucgugcgguuccccaauaucaccaaucugugccccuucggcgagguguucaaugccaccagauucgccucuguguacgccuggaaccggaagcggaucagcaauugcguggccgacuacuccgugcuguacaacuccgccagcuucagcaccuucaagugcuacggcguguccccuaccaagcugaacgaccugugcuucacaaacguguacgccgacagcuucgugauccggggagaugaagugcggcagauugccccuggacagacaggcaagaucgccgacuacaacuacaagcugcccgacgacuucaccggcugugugauugccuggaacagcaagaaccuggacuccaaagucggcggcaacuacaauuaccuguaccggcuguuccggaaguccaaucugaagcccuucgagcgggacaucagcaccgaaaucuaucaggccggcagcaccccuugcaacggcguggaaggcuucaacugcuacuucccacugcaguccuacggcuuucagcccacaaauggcgugggcuaucagcccuacagagugguggugcugagcuucgaacugcugcaugcuccugccacagugugcggcccuaagaaaagcaccaaucucgugaagaacaaaugcgugaacuucaacuucaacggccugaccggcaccggcgugcugacagagagcaacaagaaguuccugccauuccagcaguuuggccgggauaucgccgauaccacagacgccguuagagauccccagacacuggaaauccuggacaucaccccaugcagcuucggcggagugucugugaucaccccuggcaccaacaccagcaaucagguggcagugcuguaccagggcgugaacuguaccgaagugcccguggccauucacgccgaucagcugacaccuacauggcggguguacuccaccggcagcaauguguuucagaccagagccggcugucugaucggagccgagcacgugaacaauagcuacgagugcgacauccccaucggcgcuggcaucugugccagcuaccagacacagacaaacagccccagacgggcuagaagcguggccagccagagcaucauugccuacacaaugucucugggcgccgagaacagcguggccuacuccaacaacucuaucgcuauccccaccaacuucaccaucagcgugaccaccgagauccugccuguguccaugaccaagaccagcguggacugcaccauguacaucugcggcgauuccaccgagugcuccaaccugcugcugcaguacggcagcuucugcacccagcugaauagagcccugacagggaucgccguggaacaggacaagaacacccaagagguguucgcccaagugaagcaaaucuacaagaccccuccuaucaaggacuucggcggcuucaauuucagccagauucugcccgauccuagcaagcccagcaagcggagcuucaucgaggaccugcuguucaacaaagugacacuggccgacgccggcuucaucaagcaguauggcgauugucugggcgacauugccgccagggaucugauuugcgcccagaaguuuaacggacugacagugcugccuccucugcugaccgaugagaugaucgcccaguacacaucugcccugcuggccggcacaaucacaagcggcuggacauuuggagcuggcgccgcucugcagauccccuuugcuaugcagauggccuaccgguucaacggcaucggagugacccagaaugugcuguacgagaaccagaagcugaucgccaaccaguucaacagcgccaucggcaagauccaggacagccugagcagcacagcaagcgcccugggaaagcugcaggacguggucaaccagaaugcccaggcacugaacacccuggucaagcagcuguccuccaacuucggcgccaucagcucugugcugaacgauauccugagcagacuggacaaggucgaggccgaggugcagaucgacagacugaucacaggcagacugcagagccuccagacauacgugacccagcagcugaucagagccgccgagauuagagccucugccaaucuggccgccaccaagaugucugagugugugcugggccagagcaagagaguggacuuuugcggcaagggcuaccaccugaugagcuucccucagucugccccucacggcgugguguuucugcacgugacauaugugcccgcucaagagaagaauuucaccaccgcuccagccaucugccacgacggcaaagcccacuuuccuagagaaggcguguucguguccaacggcacccauugguucgugacacagcggaacuucuacgagccccagaucaucaccaccgacaacaccuucgugucuggcaacugcgacguugugaucggcauugugaacaauaccguguacgacccucugcagcccgagcuggacagcuucaaagaggaacuggacaaguacuuuaagaaccacacaagccccgacguggaccugggcgauaucagcggaaucaaugccagcgucgugaacauccagaaagagaucgaccggcugaacgagguggccaagaaucugaacgagagccugaucgaccugcaagaacuggggaaguacgagcaguacaucaaguggcccugguacaucuggcugggcuuuaucgccggacugauugccaucgugauggucacaaucaugcuguguugcaugaccagcugcuguagcugccugaagggcuguuguagcuguggcagcugcugcaaguucgacgaggacgauucugagcccgugcugaagggcgugaaacugcacuacaccuga

SEQ ID NO: 23045 - RNA, 3822 nt, Artificial Sequence
  SARS-CoV-2/Wuhan/WIV05/2019__EPI_ISL_402128 spike protein CDS gc mod (1-1273)(S477N_D614G)
auguucguguuucuggugcugcugccccugguguccagccagugugugaaccugaccaccagaacacagcugccuccagccuacaccaacagcuucaccagaggcguguacuaccccgacaagguguucagauccagcgugcugcacucuacccaggaccuguuccugccuuucuucagcaacgugaccugguuccacgccauccacguguccggcaccaauggcaccaagagauucgacaaccccgugcugcccuucaacgacgggguguacuuugccagcaccgagaaguccaacaucaucagaggcuggaucuucggcaccacacuggacagcaagacccagagccugcugaucgugaacaacgccaccaacguggucaucaaagugugcgaguuccaguucugcaacgaccccuuccugggcgucuacuaccacaagaacaacaagagcuggauggaaagcgaguuccggguguacagcagcgccaacaacugcaccuucgaguacgugucccagccuuuccugauggaccuggaaggcaagcagggcaacuucaagaaccugcgcgaguucguguucaagaacaucgacggcuacuucaaaaucuacagcaagcacaccccuaucaaccucgugcgggaucugccucagggcuucucugcucuggaaccccugguggaucugcccaucggcaucaacaucacccgguuucagacacugcuggcccugcacagaagcuaccugacaccuggcgauagcagcagcggauggacagcuggugccgccgcuuacuaugugggcuaccugcagccuagaaccuuccugcugaaguacaacgagaacggcaccaucaccgacgccguggauugugcucuggauccucugagcgagacaaagugcacccugaaguccuucaccguggaaaagggcaucuaccagaccagcaacuuccgggugcagcccaccgaauccaucgugcgguuccccaauaucaccaaucugugccccuucggcgagguguucaaugccaccagauucgccucuguguacgccuggaaccggaagcggaucagcaauugcguggccgacuacuccgugcuguacaacuccgccagcuucagcaccuucaagugcuacggcguguccccuaccaagcugaacgaccugugcuucacaaacguguacgccgacagcuucgugauccggggagaugaagugcggcagauugccccuggacagacaggcaagaucgccgacuacaacuacaagcugcccgacgacuucaccggcugugugauugccuggaacagcaacaaccuggacuccaaagucggcggcaacuacaauuaccuguaccggcuguuccggaaguccaaucugaagcccuucgagcgggacaucagcaccgaaaucuaucaggccggcaacaccccuugcaacggcguggaaggcuucaacugcuacuucccacugcaguccuacggcuuucagcccacaaauggcgugggcuaucagcccuacagagugguggugcugagcuucgaacugcugcaugcuccugccacagugugcggcccuaagaaaagcaccaaucucgugaagaacaaaugcgugaacuucaacuucaacggccugaccggcaccggcgugcugacagagagcaacaagaaguuccugccauuccagcaguuuggccgggauaucgccgauaccacagacgccguuagagauccccagacacuggaaauccuggacaucaccccaugcagcuucggcggagugucugugaucaccccuggcaccaacaccagcaaucagguggcagugcuguaccagggcgugaacuguaccgaagugcccguggccauucacgccgaucagcugacaccuacauggcggguguacuccaccggcagcaauguguuucagaccagagccggcugucugaucggagccgagcacgugaacaauagcuacgagugcgacauccccaucggcgcuggcaucugugccagcuaccagacacagacaaacagccccagacgggcuagaagcguggccagccagagcaucauugccuacacaaugucucugggcgccgagaacagcguggccuacuccaacaacucuaucgcuauccccaccaacuucaccaucagcgugaccaccgagauccugccuguguccaugaccaagaccagcguggacugcaccauguacaucugcggcgauuccaccgagugcuccaaccugcugcugcaguacggcagcuucugcacccagcugaauagagcccugacagggaucgccguggaacaggacaagaacacccaagagguguucgcccaagugaagcaaaucuacaagaccccuccuaucaaggacuucggcggcuucaauuucagccagauucugcccgauccuagcaagcccagcaagcggagcuucaucgaggaccugcuguucaacaaagugacacuggccgacgccggcuucaucaagcaguauggcgauugucugggcgacauugccgccagggaucugauuugcgcccagaaguuuaacggacugacagugcugccuccucugcugaccgaugagaugaucgcccaguacacaucugcccugcuggccggcacaaucacaagcggcuggacauuuggagcuggcgccgcucugcagauccccuuugcuaugcagauggccuaccgguucaacggcaucggagugacccagaaugugcuguacgagaaccagaagcugaucgccaaccaguucaacagcgccaucggcaagauccaggacagccugagcagcacagcaagcgcccugggaaagcugcaggacguggucaaccagaaugcccaggcacugaacacccuggucaagcagcuguccuccaacuucggcgccaucagcucugugcugaacgauauccugagcagacuggacaaggucgaggccgaggugcagaucgacagacugaucacaggcagacugcagagccuccagacauacgugacccagcagcugaucagagccgccgagauuagagccucugccaaucuggccgccaccaagaugucugagugugugcugggccagagcaagagaguggacuuuugcggcaagggcuaccaccugaugagcuucccucagucugccccucacggcgugguguuucugcacgugacauaugugcccgcucaagagaagaauuucaccaccgcuccagccaucugccacgacggcaaagcccacuuuccuagagaaggcguguucguguccaacggcacccauugguucgugacacagcggaacuucuacgagccccagaucaucaccaccgacaacaccuucgugucuggcaacugcgacguugugaucggcauugugaacaauaccguguacgacccucugcagcccgagcuggacagcuucaaagaggaacuggacaaguacuuuaagaaccacacaagccccgacguggaccugggcgauaucagcggaaucaaugccagcgucgugaacauccagaaagagaucgaccggcugaacgagguggccaagaaucugaacgagagccugaucgaccugcaagaacuggggaaguacgagcaguacaucaaguggcccugguacaucuggcugggcuuuaucgccggacugauugccaucgugauggucacaaucaugcuguguugcaugaccagcugcuguagcugccugaagggcuguuguagcuguggcagcugcugcaaguucgacgaggacgauucugagcccgugcugaagggcgugaaacugcacuacaccuga

SEQ ID NO: 23046 - RNA, 3822 nt, Artificial Sequence
  SARS-CoV-2/Wuhan/WIV05/2019__EPI_ISL_402128 spike protein CDS gc mod (1-1273)(N501Y_D614G)
auguucguguuucuggugcugcugccccugguguccagccagugugugaaccugaccaccagaacacagcugccuccagccuacaccaacagcuucaccagaggcguguacuaccccgacaagguguucagauccagcgugcugcacucuacccaggaccuguuccugccuuucuucagcaacgugaccugguuccacgccauccacguguccggcaccaauggcaccaagagauucgacaaccccgugcugcccuucaacgacgggguguacuuugccagcaccgagaaguccaacaucaucagaggcuggaucuucggcaccacacuggacagcaagacccagagccugcugaucgugaacaacgccaccaacguggucaucaaagugugcgaguuccaguucugcaacgaccccuuccugggcgucuacuaccacaagaacaacaagagcuggauggaaagcgaguuccggguguacagcagcgccaacaacugcaccuucgaguacgugucccagccuuuccugauggaccuggaaggcaagcagggcaacuucaagaaccugcgcgaguucguguucaagaacaucgacggcuacuucaaaaucuacagcaagcacaccccuaucaaccucgugcgggaucugccucagggcuucucugcucuggaaccccugguggaucugcccaucggcaucaacaucacccgguuucagacacugcuggcccugcacagaagcuaccugacaccuggcgauagcagcagcggauggacagcuggugccgccgcuuacuaugugggcuaccugcagccuagaaccuuccugcugaaguacaacgagaacggcaccaucaccgacgccguggauugugcucuggauccucugagcgagacaaagugcacccugaaguccuucaccguggaaaagggcaucuaccagaccagcaacuuccgggugcagcccaccgaauccaucgugcgguuccccaauaucaccaaucugugccccuucggcgagguguucaaugccaccagauucgccucuguguacgccuggaaccggaagcggaucagcaauugcguggccgacuacuccgugcuguacaacuccgccagcuucagcaccuucaagugcuacggcguguccccuaccaagcugaacgaccugugcuucacaaacguguacgccgacagcuucgugauccggggagaugaagugcggcagauugccccuggacagacaggcaagaucgccgacuacaacuacaagcugcccgacgacuucaccggcugugugauugccuggaacagcaacaaccuggacuccaaagucggcggcaacuacaauuaccuguaccggcuguuccggaaguccaaucugaagcccuucgagcgggacaucagcaccgaaaucuaucaggccggcagcaccccuugcaacggcguggaaggcuucaacugcuacuucccacugcaguccuacggcuuucagcccacauacggcgugggcuaucagcccuacagagugguggugcugagcuucgaacugcugcaugcuccugccacagugugcggcccuaagaaaagcaccaaucucgugaagaacaaaugcgugaacuucaacuucaacggccugaccggcaccggcgugcugacagagagcaacaagaaguuccugccauuccagcaguuuggccgggauaucgccgauaccacagacgccguuagagauccccagacacuggaaauccuggacaucaccccaugcagcuucggcggagugucugugaucaccccuggcaccaacaccagcaaucagguggcagugcuguaccagggcgugaacuguaccgaagugcccguggccauucacgccgaucagcugacaccuacauggcggguguacuccaccggcagcaauguguuucagaccagagccggcugucugaucggagccgagcacgugaacaauagcuacgagugcgacauccccaucggcgcuggcaucugugccagcuaccagacacagacaaacagccccagacgggcuagaagcguggccagccagagcaucauugccuacacaaugucucugggcgccgagaacagcguggccuacuccaacaacucuaucgcuauccccaccaacuucaccaucagcgugaccaccgagauccugccuguguccaugaccaagaccagcguggacugcaccauguacaucugcggcgauuccaccgagugcuccaaccugcugcugcaguacggcagcuucugcacccagcugaauagagcccugacagggaucgccguggaacaggacaagaacacccaagagguguucgcccaagugaagcaaaucuacaagaccccuccuaucaaggacuucggcggcuucaauuucagccagauucugcccgauccuagcaagcccagcaagcggagcuucaucgaggaccugcuguucaacaaagugacacuggccgacgccggcuucaucaagcaguauggcgauugucugggcgacauugccgccagggaucugauuugcgcccagaaguuuaacggacugacagugcugccuccucugcugaccgaugagaugaucgcccaguacacaucugcccugcuggccggcacaaucacaagcggcuggacauuuggagcuggcgccgcucugcagauccccuuugcuaugcagauggccuaccgguucaacggcaucggagugacccagaaugugcuguacgagaaccagaagcugaucgccaaccaguucaacagcgccaucggcaagauccaggacagccugagcagcacagcaagcgcccugggaaagcugcaggacguggucaaccagaaugcccaggcacugaacacccuggucaagcagcuguccuccaacuucggcgccaucagcucugugcugaacgauauccugagcagacuggacaaggucgaggccgaggugcagaucgacagacugaucacaggcagacugcagagccuccagacauacgugacccagcagcugaucagagccgccgagauuagagccucugccaaucuggccgccaccaagaugucugagugugugcugggccagagcaagagaguggacuuuugcggcaagggcuaccaccugaugagcuucccucagucugccccucacggcgugguguuucugcacgugacauaugugcccgcucaagagaagaauuucaccaccgcuccagccaucugccacgacggcaaagcccacuuuccuagagaaggcguguucguguccaacggcacccauugguucgugacacagcggaacuucuacgagccccagaucaucaccaccgacaacaccuucgugucuggcaacugcgacguugugaucggcauugugaacaauaccguguacgacccucugcagcccgagcuggacagcuucaaagaggaacuggacaaguacuuuaagaaccacacaagccccgacguggaccugggcgauaucagcggaaucaaugccagcgucgugaacauccagaaagagaucgaccggcugaacgagguggccaagaaucugaacgagagccugaucgaccugcaagaacuggggaaguacgagcaguacaucaaguggcccugguacaucuggcugggcuuuaucgccggacugauugccaucgugauggucacaaucaugcuguguugcaugaccagcugcuguagcugccugaagggcuguuguagcuguggcagcugcugcaaguucgacgaggacgauucugagcccgugcugaagggcgugaaacugcacuacaccuga

SEQ ID NO: 23047 - RNA, 3816 nt, Artificial Sequence
  SARS-CoV-2/Wuhan/WIV05/2019__EPI_ISL_402128 spike protein CDS gc mod (1-1273)(H69del_V70del_D614G)
auguucguguuucuggugcugcugccccugguguccagccagugugugaaccugaccaccagaacacagcugccuccagccuacaccaacagcuucaccagaggcguguacuaccccgacaagguguucagauccagcgugcugcacucuacccaggaccuguuccugccuuucuucagcaacgugaccugguuccacgccaucuccggcaccaauggcaccaagagauucgacaaccccgugcugcccuucaacgacgggguguacuuugccagcaccgagaaguccaacaucaucagaggcuggaucuucggcaccacacuggacagcaagacccagagccugcugaucgugaacaacgccaccaacguggucaucaaagugugcgaguuccaguucugcaacgaccccuuccugggcgucuacuaccacaagaacaacaagagcuggauggaaagcgaguuccggguguacagcagcgccaacaacugcaccuucgaguacgugucccagccuuuccugauggaccuggaaggcaagcagggcaacuucaagaaccugcgcgaguucguguucaagaacaucgacggcuacuucaaaaucuacagcaagcacaccccuaucaaccucgugcgggaucugccucagggcuucucugcucuggaaccccugguggaucugcccaucggcaucaacaucacccgguuucagacacugcuggcccugcacagaagcuaccugacaccuggcgauagcagcagcggauggacagcuggugccgccgcuuacuaugugggcuaccugcagccuagaaccuuccugcugaaguacaacgagaacggcaccaucaccgacgccguggauugugcucuggauccucugagcgagacaaagugcacccugaaguccuucaccguggaaaagggcaucuaccagaccagcaacuuccgggugcagcccaccgaauccaucgugcgguuccccaauaucaccaaucugugccccuucggcgagguguucaaugccaccagauucgccucuguguacgccuggaaccggaagcggaucagcaauugcguggccgacuacuccgugcuguacaacuccgccagcuucagcaccuucaagugcuacggcguguccccuaccaagcugaacgaccugugcuucacaaacguguacgccgacagcuucgugauccggggagaugaagugcggcagauugccccuggacagacaggcaagaucgccgacuacaacuacaagcugcccgacgacuucaccggcugugugauugccuggaacagcaacaaccuggacuccaaagucggcggcaacuacaauuaccuguaccggcuguuccggaaguccaaucugaagcccuucgagcgggacaucagcaccgaaaucuaucaggccggcagcaccccuugcaacggcguggaaggcuucaacugcuacuucccacugcaguccuacggcuuucagcccacaaauggcgugggcuaucagcccuacagagugguggugcugagcuucgaacugcugcaugcuccugccacagugugcggcccuaagaaaagcaccaaucucgugaagaacaaaugcgugaacuucaacuucaacggccugaccggcaccggcgugcugacagagagcaacaagaaguuccugccauuccagcaguuuggccgggauaucgccgauaccacagacgccguuagagauccccagacacuggaaauccuggacaucaccccaugcagcuucggcggagugucugugaucaccccuggcaccaacaccagcaaucagguggcagugcuguaccagggcgugaacuguaccgaagugcccguggccauucacgccgaucagcugacaccuacauggcggguguacuccaccggcagcaauguguuucagaccagagccggcugucugaucggagccgagcacgugaacaauagcuacgagugcgacauccccaucggcgcuggcaucugugccagcuaccagacacagacaaacagccccagacgggcuagaagcguggccagccagagcaucauugccuacacaaugucucugggcgccgagaacagcguggccuacuccaacaacucuaucgcuauccccaccaacuucaccaucagcgugaccaccgagauccugccuguguccaugaccaagaccagcguggacugcaccauguacaucugcggcgauuccaccgagugcuccaaccugcugcugcaguacggcagcuucugcacccagcugaauagagcccugacagggaucgccguggaacaggacaagaacacccaagagguguucgcccaagugaagcaaaucuacaagaccccuccuaucaaggacuucggcggcuucaauuucagccagauucugcccgauccuagcaagcccagcaagcggagcuucaucgaggaccugcuguucaacaaagugacacuggccgacgccggcuucaucaagcaguauggcgauugucugggcgacauugccgccagggaucugauuugcgcccagaaguuuaacggacugacagugcugccuccucugcugaccgaugagaugaucgcccaguacacaucugcccugcuggccggcacaaucacaagcggcuggacauuuggagcuggcgccgcucugcagauccccuuugcuaugcagauggccuaccgguucaacggcaucggagugacccagaaugugcuguacgagaaccagaagcugaucgccaaccaguucaacagcgccaucggcaagauccaggacagccugagcagcacagcaagcgcccugggaaagcugcaggacguggucaaccagaaugcccaggcacugaacacccuggucaagcagcuguccuccaacuucggcgccaucagcucugugcugaacgauauccugagcagacuggacaaggucgaggccgaggugcagaucgacagacugaucacaggcagacugcagagccuccagacauacgugacccagcagcugaucagagccgccgagauuagagccucugccaaucuggccgccaccaagaugucugagugugugcugggccagagcaagagaguggacuuuugcggcaagggcuaccaccugaugagcuucccucagucugccccucacggcgugguguuucugcacgugacauaugugcccgcucaagagaagaauuucaccaccgcuccagccaucugccacgacggcaaagcccacuuuccuagagaaggcguguucguguccaacggcacccauugguucgugacacagcggaacuucuacgagccccagaucaucaccaccgacaacaccuucgugucuggcaacugcgacguugugaucggcauugugaacaauaccguguacgacccucugcagcccgagcuggacagcuucaaagaggaacuggacaaguacuuuaagaaccacacaagccccgacguggaccugggcgauaucagcggaaucaaugccagcgucgugaacauccagaaagagaucgaccggcugaacgagguggccaagaaucugaacgagagccugaucgaccugcaagaacuggggaaguacgagcaguacaucaaguggcccugguacaucuggcugggcuuuaucgccggacugauugccaucgugauggucacaaucaugcuguguugcaugaccagcugcuguagcugccugaagggcuguuguagcuguggcagcugcugcaaguucgacgaggacgauucugagcccgugcugaagggcgugaaacugcacuacaccuga

SEQ ID NO: 23048 - RNA, 3822 nt, Artificial Sequence
  SARS-CoV-2/Wuhan/WIV05/2019__EPI_ISL_402128 spike protein CDS gc mod (1-1273)(Y453F_D614G)
auguucguguuucuggugcugcugccccugguguccagccagugugugaaccugaccaccagaacacagcugccuccagccuacaccaacagcuucaccagaggcguguacuaccccgacaagguguucagauccagcgugcugcacucuacccaggaccuguuccugccuuucuucagcaacgugaccugguuccacgccauccacguguccggcaccaauggcaccaagagauucgacaaccccgugcugcccuucaacgacgggguguacuuugccagcaccgagaaguccaacaucaucagaggcuggaucuucggcaccacacuggacagcaagacccagagccugcugaucgugaacaacgccaccaacguggucaucaaagugugcgaguuccaguucugcaacgaccccuuccugggcgucuacuaccacaagaacaacaagagcuggauggaaagcgaguuccggguguacagcagcgccaacaacugcaccuucgaguacgugucccagccuuuccugauggaccuggaaggcaagcagggcaacuucaagaaccugcgcgaguucguguucaagaacaucgacggcuacuucaaaaucuacagcaagcacaccccuaucaaccucgugcgggaucugccucagggcuucucugcucuggaaccccugguggaucugcccaucggcaucaacaucacccgguuucagacacugcuggcccugcacagaagcuaccugacaccuggcgauagcagcagcggauggacagcuggugccgccgcuuacuaugugggcuaccugcagccuagaaccuuccugcugaaguacaacgagaacggcaccaucaccgacgccguggauugugcucuggauccucugagcgagacaaagugcacccugaaguccuucaccguggaaaagggcaucuaccagaccagcaacuuccgggugcagcccaccgaauccaucgugcgguuccccaauaucaccaaucugugccccuucggcgagguguucaaugccaccagauucgccucuguguacgccuggaaccggaagcggaucagcaauugcguggccgacuacuccgugcuguacaacuccgccagcuucagcaccuucaagugcuacggcguguccccuaccaagcugaacgaccugugcuucacaaacguguacgccgacagcuucgugauccggggagaugaagugcggcagauugccccuggacagacaggcaagaucgccgacuacaacuacaagcugcccgacgacuucaccggcugugugauugccuggaacagcaacaaccuggacuccaaagucggcggcaacuacaauuaccuguuccggcuguuccggaaguccaaucugaagcccuucgagcgggacaucagcaccgaaaucuaucaggccggcagcaccccuugcaacggcguggaaggcuucaacugcuacuucccacugcaguccuacggcuuucagcccacaaauggcgugggcuaucagcccuacagagugguggugcugagcuucgaacugcugcaugcuccugccacagugugcggcccuaagaaaagcaccaaucucgugaagaacaaaugcgugaacuucaacuucaacggccugaccggcaccggcgugcugacagagagcaacaagaaguuccugccauuccagcaguuuggccgggauaucgccgauaccacagacgccguuagagauccccagacacuggaaauccuggacaucaccccaugcagcuucggcggagugucugugaucaccccuggcaccaacaccagcaaucagguggcagugcuguaccagggcgugaacuguaccgaagugcccguggccauucacgccgaucagcugacaccuacauggcggguguacuccaccggcagcaauguguuucagaccagagccggcugucugaucggagccgagcacgugaacaauagcuacgagugcgacauccccaucggcgcuggcaucugugccagcuaccagacacagacaaacagccccagacgggcuagaagcguggccagccagagcaucauugccuacacaaugucucugggcgccgagaacagcguggccuacuccaacaacucuaucgcuauccccaccaacuucaccaucagcgugaccaccgagauccugccuguguccaugaccaagaccagcguggacugcaccauguacaucugcggcgauuccaccgagugcuccaaccugcugcugcaguacggcagcuucugcacccagcugaauagagcccugacagggaucgccguggaacaggacaagaacacccaagagguguucgcccaagugaagcaaaucuacaagaccccuccuaucaaggacuucggcggcuucaauuucagccagauucugcccgauccuagcaagcccagcaagcggagcuucaucgaggaccugcuguucaacaaagugacacuggccgacgccggcuucaucaagcaguauggcgauugucugggcgacauugccgccagggaucugauuugcgcccagaaguuuaacggacugacagugcugccuccucugcugaccgaugagaugaucgcccaguacacaucugcccugcuggccggcacaaucacaagcggcuggacauuuggagcuggcgccgcucugcagauccccuuugcuaugcagauggccuaccgguucaacggcaucggagugacccagaaugugcuguacgagaaccagaagcugaucgccaaccaguucaacagcgccaucggcaagauccaggacagccugagcagcacagcaagcgcccugggaaagcugcaggacguggucaaccagaaugcccaggcacugaacacccuggucaagcagcuguccuccaacuucggcgccaucagcucugugcugaacgauauccugagcagacuggacaaggucgaggccgaggugcagaucgacagacugaucacaggcagacugcagagccuccagacauacgugacccagcagcugaucagagccgccgagauuagagccucugccaaucuggccgccaccaagaugucugagugugugcugggccagagcaagagaguggacuuuugcggcaagggcuaccaccugaugagcuucccucagucugccccucacggcgugguguuucugcacgugacauaugugcccgcucaagagaagaauuucaccaccgcuccagccaucugccacgacggcaaagcccacuuuccuagagaaggcguguucguguccaacggcacccauugguucgugacacagcggaacuucuacgagccccagaucaucaccaccgacaacaccuucgugucuggcaacugcgacguugugaucggcauugugaacaauaccguguacgacccucugcagcccgagcuggacagcuucaaagaggaacuggacaaguacuuuaagaaccacacaagccccgacguggaccugggcgauaucagcggaaucaaugccagcgucgugaacauccagaaagagaucgaccggcugaacgagguggccaagaaucugaacgagagccugaucgaccugcaagaacuggggaaguacgagcaguacaucaaguggcccugguacaucuggcugggcuuuaucgccggacugauugccaucgugauggucacaaucaugcuguguugcaugaccagcugcuguagcugccugaagggcuguuguagcuguggcagcugcugcaaguucgacgaggacgauucugagcccgugcugaagggcgugaaacugcacuacaccuga

SEQ ID NO: 23049 - RNA, 3822 nt, Artificial Sequence
  SARS-CoV-2/Wuhan/WIV05/2019__EPI_ISL_402128 spike protein CDS gc mod (1-1273)(D614G_I692V)
auguucguguuucuggugcugcugccccugguguccagccagugugugaaccugaccaccagaacacagcugccuccagccuacaccaacagcuucaccagaggcguguacuaccccgacaagguguucagauccagcgugcugcacucuacccaggaccuguuccugccuuucuucagcaacgugaccugguuccacgccauccacguguccggcaccaauggcaccaagagauucgacaaccccgugcugcccuucaacgacgggguguacuuugccagcaccgagaaguccaacaucaucagaggcuggaucuucggcaccacacuggacagcaagacccagagccugcugaucgugaacaacgccaccaacguggucaucaaagugugcgaguuccaguucugcaacgaccccuuccugggcgucuacuaccacaagaacaacaagagcuggauggaaagcgaguuccggguguacagcagcgccaacaacugcaccuucgaguacgugucccagccuuuccugauggaccuggaaggcaagcagggcaacuucaagaaccugcgcgaguucguguucaagaacaucgacggcuacuucaaaaucuacagcaagcacaccccuaucaaccucgugcgggaucugccucagggcuucucugcucuggaaccccugguggaucugcccaucggcaucaacaucacccgguuucagacacugcuggcccugcacagaagcuaccugacaccuggcgauagcagcagcggauggacagcuggugccgccgcuuacuaugugggcuaccugcagccuagaaccuuccugcugaaguacaacgagaacggcaccaucaccgacgccguggauugugcucuggauccucugagcgagacaaagugcacccugaaguccuucaccguggaaaagggcaucuaccagaccagcaacuuccgggugcagcccaccgaauccaucgugcgguuccccaauaucaccaaucugugccccuucggcgagguguucaaugccaccagauucgccucuguguacgccuggaaccggaagcggaucagcaauugcguggccgacuacuccgugcuguacaacuccgccagcuucagcaccuucaagugcuacggcguguccccuaccaagcugaacgaccugugcuucacaaacguguacgccgacagcuucgugauccggggagaugaagugcggcagauugccccuggacagacaggcaagaucgccgacuacaacuacaagcugcccgacgacuucaccggcugugugauugccuggaacagcaacaaccuggacuccaaagucggcggcaacuacaauuaccuguaccggcuguuccggaaguccaaucugaagcccuucgagcgggacaucagcaccgaaaucuaucaggccggcagcaccccuugcaacggcguggaaggcuucaacugcuacuucccacugcaguccuacggcuuucagcccacaaauggcgugggcuaucagcccuacagagugguggugcugagcuucgaacugcugcaugcuccugccacagugugcggcccuaagaaaagcaccaaucucgugaagaacaaaugcgugaacuucaacuucaacggccugaccggcaccggcgugcugacagagagcaacaagaaguuccugccauuccagcaguuuggccgggauaucgccgauaccacagacgccguuagagauccccagacacuggaaauccuggacaucaccccaugcagcuucggcggagugucugugaucaccccuggcaccaacaccagcaaucagguggcagugcuguaccagggcgugaacuguaccgaagugcccguggccauucacgccgaucagcugacaccuacauggcggguguacuccaccggcagcaauguguuucagaccagagccggcugucugaucggagccgagcacgugaacaauagcuacgagugcgacauccccaucggcgcuggcaucugugccagcuaccagacacagacaaacagccccagacgggcuagaagcguggccagccagagcgugauugccuacacaaugucucugggcgccgagaacagcguggccuacuccaacaacucuaucgcuauccccaccaacuucaccaucagcgugaccaccgagauccugccuguguccaugaccaagaccagcguggacugcaccauguacaucugcggcgauuccaccgagugcuccaaccugcugcugcaguacggcagcuucugcacccagcugaauagagcccugacagggaucgccguggaacaggacaagaacacccaagagguguucgcccaagugaagcaaaucuacaagaccccuccuaucaaggacuucggcggcuucaauuucagccagauucugcccgauccuagcaagcccagcaagcggagcuucaucgaggaccugcuguucaacaaagugacacuggccgacgccggcuucaucaagcaguauggcgauugucugggcgacauugccgccagggaucugauuugcgcccagaaguuuaacggacugacagugcugccuccucugcugaccgaugagaugaucgcccaguacacaucugcccugcuggccggcacaaucacaagcggcuggacauuuggagcuggcgccgcucugcagauccccuuugcuaugcagauggccuaccgguucaacggcaucggagugacccagaaugugcuguacgagaaccagaagcugaucgccaaccaguucaacagcgccaucggcaagauccaggacagccugagcagcacagcaagcgcccugggaaagcugcaggacguggucaaccagaaugcccaggcacugaacacccuggucaagcagcuguccuccaacuucggcgccaucagcucugugcugaacgauauccugagcagacuggacaaggucgaggccgaggugcagaucgacagacugaucacaggcagacugcagagccuccagacauacgugacccagcagcugaucagagccgccgagauuagagccucugccaaucuggccgccaccaagaugucugagugugugcugggccagagcaagagaguggacuuuugcggcaagggcuaccaccugaugagcuucccucagucugccccucacggcgugguguuucugcacgugacauaugugcccgcucaagagaagaauuucaccaccgcuccagccaucugccacgacggcaaagcccacuuuccuagagaaggcguguucguguccaacggcacccauugguucgugacacagcggaacuucuacgagccccagaucaucaccaccgacaacaccuucgugucuggcaacugcgacguugugaucggcauugugaacaauaccguguacgacccucugcagcccgagcuggacagcuucaaagaggaacuggacaaguacuuuaagaaccacacaagccccgacguggaccugggcgauaucagcggaaucaaugccagcgucgugaacauccagaaagagaucgaccggcugaacgagguggccaagaaucugaacgagagccugaucgaccugcaagaacuggggaaguacgagcaguacaucaaguggcccugguacaucuggcugggcuuuaucgccggacugauugccaucgugauggucacaaucaugcuguguugcaugaccagcugcuguagcugccugaagggcuguuguagcuguggcagcugcugcaaguucgacgaggacgauucugagcccgugcugaagggcgugaaacugcacuacaccuga

SEQ ID NO: 23050 - RNA, 3822 nt, Artificial Sequence
  SARS-CoV-2/Wuhan/WIV05/2019__EPI_ISL_402128 spike protein CDS gc mod (1-1273)(D614G_M1229I)
auguucguguuucuggugcugcugccccugguguccagccagugugugaaccugaccaccagaacacagcugccuccagccuacaccaacagcuucaccagaggcguguacuaccccgacaagguguucagauccagcgugcugcacucuacccaggaccuguuccugccuuucuucagcaacgugaccugguuccacgccauccacguguccggcaccaauggcaccaagagauucgacaaccccgugcugcccuucaacgacgggguguacuuugccagcaccgagaaguccaacaucaucagaggcuggaucuucggcaccacacuggacagcaagacccagagccugcugaucgugaacaacgccaccaacguggucaucaaagugugcgaguuccaguucugcaacgaccccuuccugggcgucuacuaccacaagaacaacaagagcuggauggaaagcgaguuccggguguacagcagcgccaacaacugcaccuucgaguacgugucccagccuuuccugauggaccuggaaggcaagcagggcaacuucaagaaccugcgcgaguucguguucaagaacaucgacggcuacuucaaaaucuacagcaagcacaccccuaucaaccucgugcgggaucugccucagggcuucucugcucuggaaccccugguggaucugcccaucggcaucaacaucacccgguuucagacacugcuggcccugcacagaagcuaccugacaccuggcgauagcagcagcggauggacagcuggugccgccgcuuacuaugugggcuaccugcagccuagaaccuuccugcugaaguacaacgagaacggcaccaucaccgacgccguggauugugcucuggauccucugagcgagacaaagugcacccugaaguccuucaccguggaaaagggcaucuaccagaccagcaacuuccgggugcagcccaccgaauccaucgugcgguuccccaauaucaccaaucugugccccuucggcgagguguucaaugccaccagauucgccucuguguacgccuggaaccggaagcggaucagcaauugcguggccgacuacuccgugcuguacaacuccgccagcuucagcaccuucaagugcuacggcguguccccuaccaagcugaacgaccugugcuucacaaacguguacgccgacagcuucgugauccggggagaugaagugcggcagauugccccuggacagacaggcaagaucgccgacuacaacuacaagcugcccgacgacuucaccggcugugugauugccuggaacagcaacaaccuggacuccaaagucggcggcaacuacaauuaccuguaccggcuguuccggaaguccaaucugaagcccuucgagcgggacaucagcaccgaaaucuaucaggccggcagcaccccuugcaacggcguggaaggcuucaacugcuacuucccacugcaguccuacggcuuucagcccacaaauggcgugggcuaucagcccuacagagugguggugcugagcuucgaacugcugcaugcuccugccacagugugcggcccuaagaaaagcaccaaucucgugaagaacaaaugcgugaacuucaacuucaacggccugaccggcaccggcgugcugacagagagcaacaagaaguuccugccauuccagcaguuuggccgggauaucgccgauaccacagacgccguuagagauccccagacacuggaaauccuggacaucaccccaugcagcuucggcggagugucugugaucaccccuggcaccaacaccagcaaucagguggcagugcuguaccagggcgugaacuguaccgaagugcccguggccauucacgccgaucagcugacaccuacauggcggguguacuccaccggcagcaauguguuucagaccagagccggcugucugaucggagccgagcacgugaacaauagcuacgagugcgacauccccaucggcgcuggcaucugugccagcuaccagacacagacaaacagccccagacgggcuagaagcguggccagccagagcaucauugccuacacaaugucucugggcgccgagaacagcguggccuacuccaacaacucuaucgcuauccccaccaacuucaccaucagcgugaccaccgagauccugccuguguccaugaccaagaccagcguggacugcaccauguacaucugcggcgauuccaccgagugcuccaaccugcugcugcaguacggcagcuucugcacccagcugaauagagcccugacagggaucgccguggaacaggacaagaacacccaagagguguucgcccaagugaagcaaaucuacaagaccccuccuaucaaggacuucggcggcuucaauuucagccagauucugcccgauccuagcaagcccagcaagcggagcuucaucgaggaccugcuguucaacaaagugacacuggccgacgccggcuucaucaagcaguauggcgauugucugggcgacauugccgccagggaucugauuugcgcccagaaguuuaacggacugacagugcugccuccucugcugaccgaugagaugaucgcccaguacacaucugcccugcuggccggcacaaucacaagcggcuggacauuuggagcuggcgccgcucugcagauccccuuugcuaugcagauggccuaccgguucaacggcaucggagugacccagaaugugcuguacgagaaccagaagcugaucgccaaccaguucaacagcgccaucggcaagauccaggacagccugagcagcacagcaagcgcccugggaaagcugcaggacguggucaaccagaaugcccaggcacugaacacccuggucaagcagcuguccuccaacuucggcgccaucagcucugugcugaacgauauccugagcagacuggacaaggucgaggccgaggugcagaucgacagacugaucacaggcagacugcagagccuccagacauacgugacccagcagcugaucagagccgccgagauuagagccucugccaaucuggccgccaccaagaugucugagugugugcugggccagagcaagagaguggacuuuugcggcaagggcuaccaccugaugagcuucccucagucugccccucacggcgugguguuucugcacgugacauaugugcccgcucaagagaagaauuucaccaccgcuccagccaucugccacgacggcaaagcccacuuuccuagagaaggcguguucguguccaacggcacccauugguucgugacacagcggaacuucuacgagccccagaucaucaccaccgacaacaccuucgugucuggcaacugcgacguugugaucggcauugugaacaauaccguguacgacccucugcagcccgagcuggacagcuucaaagaggaacuggacaaguacuuuaagaaccacacaagccccgacguggaccugggcgauaucagcggaaucaaugccagcgucgugaacauccagaaagagaucgaccggcugaacgagguggccaagaaucugaacgagagccugaucgaccugcaagaacuggggaaguacgagcaguacaucaaguggcccugguacaucuggcugggcuuuaucgccggacugauugccaucgugaucgucacaaucaugcuguguugcaugaccagcugcuguagcugccugaagggcuguuguagcuguggcagcugcugcaaguucgacgaggacgauucugagcccgugcugaagggcgugaaacugcacuacaccuga

SEQ ID NO: 23051 - RNA, 3816 nt, Artificial Sequence
  SARS-CoV-2/Wuhan/WIV05/2019__EPI_ISL_402128 spike protein CDS gc mod (1-1273)(H69del_V70del_A222V_Y453F_S477N_D614G_I692V)
auguucguguuucuggugcugcugccccugguguccagccagugugugaaccugaccaccagaacacagcugccuccagccuacaccaacagcuucaccagaggcguguacuaccccgacaagguguucagauccagcgugcugcacucuacccaggaccuguuccugccuuucuucagcaacgugaccugguuccacgccaucuccggcaccaauggcaccaagagauucgacaaccccgugcugcccuucaacgacgggguguacuuugccagcaccgagaaguccaacaucaucagaggcuggaucuucggcaccacacuggacagcaagacccagagccugcugaucgugaacaacgccaccaacguggucaucaaagugugcgaguuccaguucugcaacgaccccuuccugggcgucuacuaccacaagaacaacaagagcuggauggaaagcgaguuccggguguacagcagcgccaacaacugcaccuucgaguacgugucccagccuuuccugauggaccuggaaggcaagcagggcaacuucaagaaccugcgcgaguucguguucaagaacaucgacggcuacuucaaaaucuacagcaagcacaccccuaucaaccucgugcgggaucugccucagggcuucucugugcuggaaccccugguggaucugcccaucggcaucaacaucacccgguuucagacacugcuggcccugcacagaagcuaccugacaccuggcgauagcagcagcggauggacagcuggugccgccgcuuacuaugugggcuaccugcagccuagaaccuuccugcugaaguacaacgagaacggcaccaucaccgacgccguggauugugcucuggauccucugagcgagacaaagugcacccugaaguccuucaccguggaaaagggcaucuaccagaccagcaacuuccgggugcagcccaccgaauccaucgugcgguuccccaauaucaccaaucugugccccuucggcgagguguucaaugccaccagauucgccucuguguacgccuggaaccggaagcggaucagcaauugcguggccgacuacuccgugcuguacaacuccgccagcuucagcaccuucaagugcuacggcguguccccuaccaagcugaacgaccugugcuucacaaacguguacgccgacagcuucgugauccggggagaugaagugcggcagauugccccuggacagacaggcaagaucgccgacuacaacuacaagcugcccgacgacuucaccggcugugugauugccuggaacagcaacaaccuggacuccaaagucggcggcaacuacaauuaccuguuccggcuguuccggaaguccaaucugaagcccuucgagcgggacaucagcaccgaaaucuaucaggccggcaacaccccuugcaacggcguggaaggcuucaacugcuacuucccacugcaguccuacggcuuucagcccacaaauggcgugggcuaucagcccuacagagugguggugcugagcuucgaacugcugcaugcuccugccacagugugcggcccuaagaaaagcaccaaucucgugaagaacaaaugcgugaacuucaacuucaacggccugaccggcaccggcgugcugacagagagcaacaagaaguuccugccauuccagcaguuuggccgggauaucgccgauaccacagacgccguuagagauccccagacacuggaaauccuggacaucaccccaugcagcuucggcggagugucugugaucaccccuggcaccaacaccagcaaucagguggcagugcuguaccagggcgugaacuguaccgaagugcccguggccauucacgccgaucagcugacaccuacauggcggguguacuccaccggcagcaauguguuucagaccagagccggcugucugaucggagccgagcacgugaacaauagcuacgagugcgacauccccaucggcgcuggcaucugugccagcuaccagacacagacaaacagccccagacgggcuagaagcguggccagccagagcgugauugccuacacaaugucucugggcgccgagaacagcguggccuacuccaacaacucuaucgcuauccccaccaacuucaccaucagcgugaccaccgagauccugccuguguccaugaccaagaccagcguggacugcaccauguacaucugcggcgauuccaccgagugcuccaaccugcugcugcaguacggcagcuucugcacccagcugaauagagcccugacagggaucgccguggaacaggacaagaacacccaagagguguucgcccaagugaagcaaaucuacaagaccccuccuaucaaggacuucggcggcuucaauuucagccagauucugcccgauccuagcaagcccagcaagcggagcuucaucgaggaccugcuguucaacaaagugacacuggccgacgccggcuucaucaagcaguauggcgauugucugggcgacauugccgccagggaucugauuugcgcccagaaguuuaacggacugacagugcugccuccucugcugaccgaugagaugaucgcccaguacacaucugcccugcuggccggcacaaucacaagcggcuggacauuuggagcuggcgccgcucugcagauccccuuugcuaugcagauggccuaccgguucaacggcaucggagugacccagaaugugcuguacgagaaccagaagcugaucgccaaccaguucaacagcgccaucggcaagauccaggacagccugagcagcacagcaagcgcccugggaaagcugcaggacguggucaaccagaaugcccaggcacugaacacccuggucaagcagcuguccuccaacuucggcgccaucagcucugugcugaacgauauccugagcagacuggacaaggucgaggccgaggugcagaucgacagacugaucacaggcagacugcagagccuccagacauacgugacccagcagcugaucagagccgccgagauuagagccucugccaaucuggccgccaccaagaugucugagugugugcugggccagagcaagagaguggacuuuugcggcaagggcuaccaccugaugagcuucccucagucugccccucacggcgugguguuucugcacgugacauaugugcccgcucaagagaagaauuucaccaccgcuccagccaucugccacgacggcaaagcccacuuuccuagagaaggcguguucguguccaacggcacccauugguucgugacacagcggaacuucuacgagccccagaucaucaccaccgacaacaccuucgugucuggcaacugcgacguugugaucggcauugugaacaauaccguguacgacccucugcagcccgagcuggacagcuucaaagaggaacuggacaaguacuuuaagaaccacacaagccccgacguggaccugggcgauaucagcggaaucaaugccagcgucgugaacauccagaaagagaucgaccggcugaacgagguggccaagaaucugaacgagagccugaucgaccugcaagaacuggggaaguacgagcaguacaucaaguggcccugguacaucuggcugggcuuuaucgccggacugauugccaucgugauggucacaaucaugcuguguugcaugaccagcugcuguagcugccugaagggcuguuguagcuguggcagcugcugcaaguucgacgaggacgauucugagcccgugcugaagggcgugaaacugcacuacaccuga

SEQ ID NO: 23052 - RNA, 3816 nt, Artificial Sequence
  SARS-CoV-2/Wuhan/WIV05/2019__EPI_ISL_402128 spike protein CDS gc mod (1-1273)(H69del_V70del_Y453F_D614G_I692V_M1229I)
auguucguguuucuggugcugcugccccugguguccagccagugugugaaccugaccaccagaacacagcugccuccagccuacaccaacagcuucaccagaggcguguacuaccccgacaagguguucagauccagcgugcugcacucuacccaggaccuguuccugccuuucuucagcaacgugaccugguuccacgccaucuccggcaccaauggcaccaagagauucgacaaccccgugcugcccuucaacgacgggguguacuuugccagcaccgagaaguccaacaucaucagaggcuggaucuucggcaccacacuggacagcaagacccagagccugcugaucgugaacaacgccaccaacguggucaucaaagugugcgaguuccaguucugcaacgaccccuuccugggcgucuacuaccacaagaacaacaagagcuggauggaaagcgaguuccggguguacagcagcgccaacaacugcaccuucgaguacgugucccagccuuuccugauggaccuggaaggcaagcagggcaacuucaagaaccugcgcgaguucguguucaagaacaucgacggcuacuucaaaaucuacagcaagcacaccccuaucaaccucgugcgggaucugccucagggcuucucugcucuggaaccccugguggaucugcccaucggcaucaacaucacccgguuucagacacugcuggcccugcacagaagcuaccugacaccuggcgauagcagcagcggauggacagcuggugccgccgcuuacuaugugggcuaccugcagccuagaaccuuccugcugaaguacaacgagaacggcaccaucaccgacgccguggauugugcucuggauccucugagcgagacaaagugcacccugaaguccuucaccguggaaaagggcaucuaccagaccagcaacuuccgggugcagcccaccgaauccaucgugcgguuccccaauaucaccaaucugugccccuucggcgagguguucaaugccaccagauucgccucuguguacgccuggaaccggaagcggaucagcaauugcguggccgacuacuccgugcuguacaacuccgccagcuucagcaccuucaagugcuacggcguguccccuaccaagcugaacgaccugugcuucacaaacguguacgccgacagcuucgugauccggggagaugaagugcggcagauugccccuggacagacaggcaagaucgccgacuacaacuacaagcugcccgacgacuucaccggcugugugauugccuggaacagcaacaaccuggacuccaaagucggcggcaacuacaauuaccuguuccggcuguuccggaaguccaaucugaagcccuucgagcgggacaucagcaccgaaaucuaucaggccggcagcaccccuugcaacggcguggaaggcuucaacugcuacuucccacugcaguccuacggcuuucagcccacaaauggcgugggcuaucagcccuacagagugguggugcugagcuucgaacugcugcaugcuccugccacagugugcggcccuaagaaaagcaccaaucucgugaagaacaaaugcgugaacuucaacuucaacggccugaccggcaccggcgugcugacagagagcaacaagaaguuccugccauuccagcaguuuggccgggauaucgccgauaccacagacgccguuagagauccccagacacuggaaauccuggacaucaccccaugcagcuucggcggagugucugugaucaccccuggcaccaacaccagcaaucagguggcagugcuguaccagggcgugaacuguaccgaagugcccguggccauucacgccgaucagcugacaccuacauggcggguguacuccaccggcagcaauguguuucagaccagagccggcugucugaucggagccgagcacgugaacaauagcuacgagugcgacauccccaucggcgcuggcaucugugccagcuaccagacacagacaaacagccccagacgggcuagaagcguggccagccagagcgugauugccuacacaaugucucugggcgccgagaacagcguggccuacuccaacaacucuaucgcuauccccaccaacuucaccaucagcgugaccaccgagauccugccuguguccaugaccaagaccagcguggacugcaccauguacaucugcggcgauuccaccgagugcuccaaccugcugcugcaguacggcagcuucugcacccagcugaauagagcccugacagggaucgccguggaacaggacaagaacacccaagagguguucgcccaagugaagcaaaucuacaagaccccuccuaucaaggacuucggcggcuucaauuucagccagauucugcccgauccuagcaagcccagcaagcggagcuucaucgaggaccugcuguucaacaaagugacacuggccgacgccggcuucaucaagcaguauggcgauugucugggcgacauugccgccagggaucugauuugcgcccagaaguuuaacggacugacagugcugccuccucugcugaccgaugagaugaucgcccaguacacaucugcccugcuggccggcacaaucacaagcggcuggacauuuggagcuggcgccgcucugcagauccccuuugcuaugcagauggccuaccgguucaacggcaucggagugacccagaaugugcuguacgagaaccagaagcugaucgccaaccaguucaacagcgccaucggcaagauccaggacagccugagcagcacagcaagcgcccugggaaagcugcaggacguggucaaccagaaugcccaggcacugaacacccuggucaagcagcuguccuccaacuucggcgccaucagcucugugcugaacgauauccugagcagacuggacaaggucgaggccgaggugcagaucgacagacugaucacaggcagacugcagagccuccagacauacgugacccagcagcugaucagagccgccgagauuagagccucugccaaucuggccgccaccaagaugucugagugugugcugggccagagcaagagaguggacuuuugcggcaagggcuaccaccugaugagcuucccucagucugccccucacggcgugguguuucugcacgugacauaugugcccgcucaagagaagaauuucaccaccgcuccagccaucugccacgacggcaaagcccacuuuccuagagaaggcguguucguguccaacggcacccauugguucgugacacagcggaacuucuacgagccccagaucaucaccaccgacaacaccuucgugucuggcaacugcgacguugugaucggcauugugaacaauaccguguacgacccucugcagcccgagcuggacagcuucaaagaggaacuggacaaguacuuuaagaaccacacaagccccgacguggaccugggcgauaucagcggaaucaaugccagcgucgugaacauccagaaagagaucgaccggcugaacgagguggccaagaaucugaacgagagccugaucgaccugcaagaacuggggaaguacgagcaguacaucaaguggcccugguacaucuggcugggcuuuaucgccggacugauugccaucgugaucgucacaaucaugcuguguugcaugaccagcugcuguagcugccugaagggcuguuguagcuguggcagcugcugcaaguucgacgaggacgauucugagcccgugcugaagggcgugaaacugcacuacaccuga

SEQ ID NO: 23053 - RNA, 3813 nt, Artificial Sequence
  SARS-CoV-2/Wuhan/WIV05/2019__EPI_ISL_402128 spike protein CDS gc mod (1-1273)(H69del_V70del_Y144del_N501Y_A570D_D614G_P681H_T716I_S982 A_D1118H)
auguucguguuucuggugcugcugccccugguguccagccagugugugaaccugaccaccagaacacagcugccuccagccuacaccaacagcuucaccagaggcguguacuaccccgacaagguguucagauccagcgugcugcacucuacccaggaccuguuccugccuuucuucagcaacgugaccugguuccacgccaucuccggcaccaauggcaccaagagauucgacaaccccgugcugcccuucaacgacgggguguacuuugccagcaccgagaaguccaacaucaucagaggcuggaucuucggcaccacacuggacagcaagacccagagccugcugaucgugaacaacgccaccaacguggucaucaaagugugcgaguuccaguucugcaacgaccccuuccugggcgucuaccacaagaacaacaagagcuggauggaaagcgaguuccggguguacagcagcgccaacaacugcaccuucgaguacgugucccagccuuuccugauggaccuggaaggcaagcagggcaacuucaagaaccugcgcgaguucguguucaagaacaucgacggcuacuucaaaaucuacagcaagcacaccccuaucaaccucgugcgggaucugccucagggcuucucugcucuggaaccccugguggaucugcccaucggcaucaacaucacccgguuucagacacugcuggcccugcacagaagcuaccugacaccuggcgauagcagcagcggauggacagcuggugccgccgcuuacuaugugggcuaccugcagccuagaaccuuccugcugaaguacaacgagaacggcaccaucaccgacgccguggauugugcucuggauccucugagcgagacaaagugcacccugaaguccuucaccguggaaaagggcaucuaccagaccagcaacuuccgggugcagcccaccgaauccaucgugcgguuccccaauaucaccaaucugugccccuucggcgagguguucaaugccaccagauucgccucuguguacgccuggaaccggaagcggaucagcaauugcguggccgacuacuccgugcuguacaacuccgccagcuucagcaccuucaagugcuacggcguguccccuaccaagcugaacgaccugugcuucacaaacguguacgccgacagcuucgugauccggggagaugaagugcggcagauugccccuggacagacaggcaagaucgccgacuacaacuacaagcugcccgacgacuucaccggcugugugauugccuggaacagcaacaaccuggacuccaaagucggcggcaacuacaauuaccuguaccggcuguuccggaaguccaaucugaagcccuucgagcgggacaucagcaccgaaaucuaucaggccggcagcaccccuugcaacggcguggaaggcuucaacugcuacuucccacugcaguccuacggcuuucagcccacauacggcgugggcuaucagcccuacagagugguggugcugagcuucgaacugcugcaugcuccugccacagugugcggcccuaagaaaagcaccaaucucgugaagaacaaaugcgugaacuucaacuucaacggccugaccggcaccggcgugcugacagagagcaacaagaaguuccugccauuccagcaguuuggccgggauaucgacgauaccacagacgccguuagagauccccagacacuggaaauccuggacaucaccccaugcagcuucggcggagugucugugaucaccccuggcaccaacaccagcaaucagguggcagugcuguaccagggcgugaacuguaccgaagugcccguggccauucacgccgaucagcugacaccuacauggcggguguacuccaccggcagcaauguguuucagaccagagccggcugucugaucggagccgagcacgugaacaauagcuacgagugcgacauccccaucggcgcuggcaucugugccagcuaccagacacagacaaacagccacagacgggcuagaagcguggccagccagagcaucauugccuacacaaugucucugggcgccgagaacagcguggccuacuccaacaacucuaucgcuauccccaucaacuucaccaucagcgugaccaccgagauccugccuguguccaugaccaagaccagcguggacugcaccauguacaucugcggcgauuccaccgagugcuccaaccugcugcugcaguacggcagcuucugcacccagcugaauagagcccugacagggaucgccguggaacaggacaagaacacccaagagguguucgcccaagugaagcaaaucuacaagaccccuccuaucaaggacuucggcggcuucaauuucagccagauucugcccgauccuagcaagcccagcaagcggagcuucaucgaggaccugcuguucaacaaagugacacuggccgacgccggcuucaucaagcaguauggcgauugucugggcgacauugccgccagggaucugauuugcgcccagaaguuuaacggacugacagugcugccuccucugcugaccgaugagaugaucgcccaguacacaucugcccugcuggccggcacaaucacaagcggcuggacauuuggagcuggcgccgcucugcagauccccuuugcuaugcagauggccuaccgguucaacggcaucggagugacccagaaugugcuguacgagaaccagaagcugaucgccaaccaguucaacagcgccaucggcaagauccaggacagccugagcagcacagcaagcgcccugggaaagcugcaggacguggucaaccagaaugcccaggcacugaacacccuggucaagcagcuguccuccaacuucggcgccaucagcucugugcugaacgauauccuggccagacuggacaaggucgaggccgaggugcagaucgacagacugaucacaggcagacugcagagccuccagacauacgugacccagcagcugaucagagccgccgagauuagagccucugccaaucuggccgccaccaagaugucugagugugugcugggccagagcaagagaguggacuuuugcggcaagggcuaccaccugaugagcuucccucagucugccccucacggcgugguguuucugcacgugacauaugugcccgcucaagagaagaauuucaccaccgcuccagccaucugccacgacggcaaagcccacuuuccuagagaaggcguguucguguccaacggcacccauugguucgugacacagcggaacuucuacgagccccagaucaucaccacccacaacaccuucgugucuggcaacugcgacguugugaucggcauugugaacaauaccguguacgacccucugcagcccgagcuggacagcuucaaagaggaacuggacaaguacuuuaagaaccacacaagccccgacguggaccugggcgauaucagcggaaucaaugccagcgucgugaacauccagaaagagaucgaccggcugaacgagguggccaagaaucugaacgagagccugaucgaccugcaagaacuggggaaguacgagcaguacaucaaguggcccugguacaucuggcugggcuuuaucgccggacugauugccaucgugauggucacaaucaugcuguguugcaugaccagcugcuguagcugccugaagggcuguuguagcuguggcagcugcugcaaguucgacgaggacgauucugagcccgugcugaagggcgugaaacugcacuacaccuga

SEQ ID NO: 23054 - RNA, 3822 nt, Artificial Sequence
  SARS-CoV-2/Wuhan/WIV05/2019__EPI_ISL_402128 spike protein CDS gc mod (1-1273)(K417N_E484K_N501Y_D614G)
auguucguguuucuggugcugcugccccugguguccagccagugugugaaccugaccaccagaacacagcugccuccagccuacaccaacagcuucaccagaggcguguacuaccccgacaagguguucagauccagcgugcugcacucuacccaggaccuguuccugccuuucuucagcaacgugaccugguuccacgccauccacguguccggcaccaauggcaccaagagauucgacaaccccgugcugcccuucaacgacgggguguacuuugccagcaccgagaaguccaacaucaucagaggcuggaucuucggcaccacacuggacagcaagacccagagccugcugaucgugaacaacgccaccaacguggucaucaaagugugcgaguuccaguucugcaacgaccccuuccugggcgucuacuaccacaagaacaacaagagcuggauggaaagcgaguuccggguguacagcagcgccaacaacugcaccuucgaguacgugucccagccuuuccugauggaccuggaaggcaagcagggcaacuucaagaaccugcgcgaguucguguucaagaacaucgacggcuacuucaaaaucuacagcaagcacaccccuaucaaccucgugcgggaucugccucagggcuucucugcucuggaaccccugguggaucugcccaucggcaucaacaucacccgguuucagacacugcuggcccugcacagaagcuaccugacaccuggcgauagcagcagcggauggacagcuggugccgccgcuuacuaugugggcuaccugcagccuagaaccuuccugcugaaguacaacgagaacggcaccaucaccgacgccguggauugugcucuggauccucugagcgagacaaagugcacccugaaguccuucaccguggaaaagggcaucuaccagaccagcaacuuccgggugcagcccaccgaauccaucgugcgguuccccaauaucaccaaucugugccccuucggcgagguguucaaugccaccagauucgccucuguguacgccuggaaccggaagcggaucagcaauugcguggccgacuacuccgugcuguacaacuccgccagcuucagcaccuucaagugcuacggcguguccccuaccaagcugaacgaccugugcuucacaaacguguacgccgacagcuucgugauccggggagaugaagugcggcagauugccccuggacagacaggcaacaucgccgacuacaacuacaagcugcccgacgacuucaccggcugugugauugccuggaacagcaacaaccuggacuccaaagucggcggcaacuacaauuaccuguaccggcuguuccggaaguccaaucugaagcccuucgagcgggacaucagcaccgaaaucuaucaggccggcagcaccccuugcaacggcgugaagggcuucaacugcuacuucccacugcaguccuacggcuuucagcccacauacggcgugggcuaucagcccuacagagugguggugcugagcuucgaacugcugcaugcuccugccacagugugcggcccuaagaaaagcaccaaucucgugaagaacaaaugcgugaacuucaacuucaacggccugaccggcaccggcgugcugacagagagcaacaagaaguuccugccauuccagcaguuuggccgggauaucgccgauaccacagacgccguuagagauccccagacacuggaaauccuggacaucaccccaugcagcuucggcggagugucugugaucaccccuggcaccaacaccagcaaucagguggcagugcuguaccagggcgugaacuguaccgaagugcccguggccauucacgccgaucagcugacaccuacauggcggguguacuccaccggcagcaauguguuucagaccagagccggcugucugaucggagccgagcacgugaacaauagcuacgagugcgacauccccaucggcgcuggcaucugugccagcuaccagacacagacaaacagccccagacgggcuagaagcguggccagccagagcaucauugccuacacaaugucucugggcgccgagaacagcguggccuacuccaacaacucuaucgcuauccccaccaacuucaccaucagcgugaccaccgagauccugccuguguccaugaccaagaccagcguggacugcaccauguacaucugcggcgauuccaccgagugcuccaaccugcugcugcaguacggcagcuucugcacccagcugaauagagcccugacagggaucgccguggaacaggacaagaacacccaagagguguucgcccaagugaagcaaaucuacaagaccccuccuaucaaggacuucggcggcuucaauuucagccagauucugcccgauccuagcaagcccagcaagcggagcuucaucgaggaccugcuguucaacaaagugacacuggccgacgccggcuucaucaagcaguauggcgauugucugggcgacauugccgccagggaucugauuugcgcccagaaguuuaacggacugacagugcugccuccucugcugaccgaugagaugaucgcccaguacacaucugcccugcuggccggcacaaucacaagcggcuggacauuuggagcuggcgccgcucugcagauccccuuugcuaugcagauggccuaccgguucaacggcaucggagugacccagaaugugcuguacgagaaccagaagcugaucgccaaccaguucaacagcgccaucggcaagauccaggacagccugagcagcacagcaagcgcccugggaaagcugcaggacguggucaaccagaaugcccaggcacugaacacccuggucaagcagcuguccuccaacuucggcgccaucagcucugugcugaacgauauccugagcagacuggacaaggucgaggccgaggugcagaucgacagacugaucacaggcagacugcagagccuccagacauacgugacccagcagcugaucagagccgccgagauuagagccucugccaaucuggccgccaccaagaugucugagugugugcugggccagagcaagagaguggacuuuugcggcaagggcuaccaccugaugagcuucccucagucugccccucacggcgugguguuucugcacgugacauaugugcccgcucaagagaagaauuucaccaccgcuccagccaucugccacgacggcaaagcccacuuuccuagagaaggcguguucguguccaacggcacccauugguucgugacacagcggaacuucuacgagccccagaucaucaccaccgacaacaccuucgugucuggcaacugcgacguugugaucggcauugugaacaauaccguguacgacccucugcagcccgagcuggacagcuucaaagaggaacuggacaaguacuuuaagaaccacacaagccccgacguggaccugggcgauaucagcggaaucaaugccagcgucgugaacauccagaaagagaucgaccggcugaacgagguggccaagaaucugaacgagagccugaucgaccugcaagaacuggggaaguacgagcaguacaucaaguggcccugguacaucuggcugggcuuuaucgccggacugauugccaucgugauggucacaaucaugcuguguugcaugaccagcugcuguagcugccugaagggcuguuguagcuguggcagcugcugcaaguucgacgaggacgauucugagcccgugcugaagggcgugaaacugcacuacaccuga

SEQ ID NO: 23055 - RNA, 3813 nt, Artificial Sequence
  SARS-CoV-2/Wuhan/WIV05/2019__EPI_ISL_402128 spike protein CDS gc mod (1-1273)(L18F_D80A_D215G_L242del_A243del_L244del_R246I_K417N_E484 K_N501Y_D614G_A701V)
auguucguguuucuggugcugcugccccugguguccagccagugugugaacuucaccaccagaacacagcugccuccagccuacaccaacagcuucaccagaggcguguacuaccccgacaagguguucagauccagcgugcugcacucuacccaggaccuguuccugccuuucuucagcaacgugaccugguuccacgccauccacguguccggcaccaauggcaccaagagauucgccaaccccgugcugcccuucaacgacgggguguacuuugccagcaccgagaaguccaacaucaucagaggcuggaucuucggcaccacacuggacagcaagacccagagccugcugaucgugaacaacgccaccaacguggucaucaaagugugcgaguuccaguucugcaacgaccccuuccugggcgucuacuaccacaagaacaacaagagcuggauggaaagcgaguuccggguguacagcagcgccaacaacugcaccuucgaguacgugucccagccuuuccugauggaccuggaaggcaagcagggcaacuucaagaaccugcgcgaguucguguucaagaacaucgacggcuacuucaaaaucuacagcaagcacaccccuaucaaccucgugcggggccugccucagggcuucucugcucuggaaccccugguggaucugcccaucggcaucaacaucacccgguuucagacacugcacaucagcuaccugacaccuggcgauagcagcagcggauggacagcuggugccgccgcuuacuaugugggcuaccugcagccuagaaccuuccugcugaaguacaacgagaacggcaccaucaccgacgccguggauugugcucuggauccucugagcgagacaaagugcacccugaaguccuucaccguggaaaagggcaucuaccagaccagcaacuuccgggugcagcccaccgaauccaucgugcgguuccccaauaucaccaaucugugccccuucggcgagguguucaaugccaccagauucgccucuguguacgccuggaaccggaagcggaucagcaauugcguggccgacuacuccgugcuguacaacuccgccagcuucagcaccuucaagugcuacggcguguccccuaccaagcugaacgaccugugcuucacaaacguguacgccgacagcuucgugauccggggagaugaagugcggcagauugccccuggacagacaggcaacaucgccgacuacaacuacaagcugcccgacgacuucaccggcugugugauugccuggaacagcaacaaccuggacuccaaagucggcggcaacuacaauuaccuguaccggcuguuccggaaguccaaucugaagcccuucgagcgggacaucagcaccgaaaucuaucaggccggcagcaccccuugcaacggcgugaagggcuucaacugcuacuucccacugcaguccuacggcuuucagcccacauacggcgugggcuaucagcccuacagagugguggugcugagcuucgaacugcugcaugcuccugccacagugugcggcccuaagaaaagcaccaaucucgugaagaacaaaugcgugaacuucaacuucaacggccugaccggcaccggcgugcugacagagagcaacaagaaguuccugccauuccagcaguuuggccgggauaucgccgauaccacagacgccguuagagauccccagacacuggaaauccuggacaucaccccaugcagcuucggcggagugucugugaucaccccuggcaccaacaccagcaaucagguggcagugcuguaccagggcgugaacuguaccgaagugcccguggccauucacgccgaucagcugacaccuacauggcggguguacuccaccggcagcaauguguuucagaccagagccggcugucugaucggagccgagcacgugaacaauagcuacgagugcgacauccccaucggcgcuggcaucugugccagcuaccagacacagacaaacagccccagacgggcuagaagcguggccagccagagcaucauugccuacacaaugucucugggcguggagaacagcguggccuacuccaacaacucuaucgcuauccccaccaacuucaccaucagcgugaccaccgagauccugccuguguccaugaccaagaccagcguggacugcaccauguacaucugcggcgauuccaccgagugcuccaaccugcugcugcaguacggcagcuucugcacccagcugaauagagcccugacagggaucgccguggaacaggacaagaacacccaagagguguucgcccaagugaagcaaaucuacaagaccccuccuaucaaggacuucggcggcuucaauuucagccagauucugcccgauccuagcaagcccagcaagcggagcuucaucgaggaccugcuguucaacaaagugacacuggccgacgccggcuucaucaagcaguauggcgauugucugggcgacauugccgccagggaucugauuugcgcccagaaguuuaacggacugacagugcugccuccucugcugaccgaugagaugaucgcccaguacacaucugcccugcuggccggcacaaucacaagcggcuggacauuuggagcuggcgccgcucugcagauccccuuugcuaugcagauggccuaccgguucaacggcaucggagugacccagaaugugcuguacgagaaccagaagcugaucgccaaccaguucaacagcgccaucggcaagauccaggacagccugagcagcacagcaagcgcccugggaaagcugcaggacguggucaaccagaaugcccaggcacugaacacccuggucaagcagcuguccuccaacuucggcgccaucagcucugugcugaacgauauccugagcagacuggacaaggucgaggccgaggugcagaucgacagacugaucacaggcagacugcagagccuccagacauacgugacccagcagcugaucagagccgccgagauuagagccucugccaaucuggccgccaccaagaugucugagugugugcugggccagagcaagagaguggacuuuugcggcaagggcuaccaccugaugagcuucccucagucugccccucacggcgugguguuucugcacgugacauaugugcccgcucaagagaagaauuucaccaccgcuccagccaucugccacgacggcaaagcccacuuuccuagagaaggcguguucguguccaacggcacccauugguucgugacacagcggaacuucuacgagccccagaucaucaccaccgacaacaccuucgugucuggcaacugcgacguugugaucggcauugugaacaauaccguguacgacccucugcagcccgagcuggacagcuucaaagaggaacuggacaaguacuuuaagaaccacacaagccccgacguggaccugggcgauaucagcggaaucaaugccagcgucgugaacauccagaaagagaucgaccggcugaacgagguggccaagaaucugaacgagagccugaucgaccugcaagaacuggggaaguacgagcaguacaucaaguggcccugguacaucuggcugggcuuuaucgccggacugauugccaucgugauggucacaaucaugcuguguugcaugaccagcugcuguagcugccugaagggcuguuguagcuguggcagcugcugcaaguucgacgaggacgauucugagcccgugcugaagggcgugaaacugcacuacaccuga

SEQ ID NO: 23056 - RNA, 3822 nt, Artificial Sequence
  SARS-CoV-2/Wuhan/WIV05/2019__EPI_ISL_402128 spike protein CDS gc mod (1-1273)(E484K_D614G)
auguucguguuucuggugcugcugccccugguguccagccagugugugaaccugaccaccagaacacagcugccuccagccuacaccaacagcuucaccagaggcguguacuaccccgacaagguguucagauccagcgugcugcacucuacccaggaccuguuccugccuuucuucagcaacgugaccugguuccacgccauccacguguccggcaccaauggcaccaagagauucgacaaccccgugcugcccuucaacgacgggguguacuuugccagcaccgagaaguccaacaucaucagaggcuggaucuucggcaccacacuggacagcaagacccagagccugcugaucgugaacaacgccaccaacguggucaucaaagugugcgaguuccaguucugcaacgaccccuuccugggcgucuacuaccacaagaacaacaagagcuggauggaaagcgaguuccggguguacagcagcgccaacaacugcaccuucgaguacgugucccagccuuuccugauggaccuggaaggcaagcagggcaacuucaagaaccugcgcgaguucguguucaagaacaucgacggcuacuucaaaaucuacagcaagcacaccccuaucaaccucgugcgggaucugccucagggcuucucugcucuggaaccccugguggaucugcccaucggcaucaacaucacccgguuucagacacugcuggcccugcacagaagcuaccugacaccuggcgauagcagcagcggauggacagcuggugccgccgcuuacuaugugggcuaccugcagccuagaaccuuccugcugaaguacaacgagaacggcaccaucaccgacgccguggauugugcucuggauccucugagcgagacaaagugcacccugaaguccuucaccguggaaaagggcaucuaccagaccagcaacuuccgggugcagcccaccgaauccaucgugcgguuccccaauaucaccaaucugugccccuucggcgagguguucaaugccaccagauucgccucuguguacgccuggaaccggaagcggaucagcaauugcguggccgacuacuccgugcuguacaacuccgccagcuucagcaccuucaagugcuacggcguguccccuaccaagcugaacgaccugugcuucacaaacguguacgccgacagcuucgugauccggggagaugaagugcggcagauugccccuggacagacaggcaagaucgccgacuacaacuacaagcugcccgacgacuucaccggcugugugauugccuggaacagcaacaaccuggacuccaaagucggcggcaacuacaauuaccuguaccggcuguuccggaaguccaaucugaagcccuucgagcgggacaucagcaccgaaaucuaucaggccggcagcaccccuugcaacggcgugaagggcuucaacugcuacuucccacugcaguccuacggcuuucagcccacaaauggcgugggcuaucagcccuacagagugguggugcugagcuucgaacugcugcaugcuccugccacagugugcggcccuaagaaaagcaccaaucucgugaagaacaaaugcgugaacuucaacuucaacggccugaccggcaccggcgugcugacagagagcaacaagaaguuccugccauuccagcaguuuggccgggauaucgccgauaccacagacgccguuagagauccccagacacuggaaauccuggacaucaccccaugcagcuucggcggagugucugugaucaccccuggcaccaacaccagcaaucagguggcagugcuguaccagggcgugaacuguaccgaagugcccguggccauucacgccgaucagcugacaccuacauggcggguguacuccaccggcagcaauguguuucagaccagagccggcugucugaucggagccgagcacgugaacaauagcuacgagugcgacauccccaucggcgcuggcaucugugccagcuaccagacacagacaaacagccccagacgggcuagaagcguggccagccagagcaucauugccuacacaaugucucugggcgccgagaacagcguggccuacuccaacaacucuaucgcuauccccaccaacuucaccaucagcgugaccaccgagauccugccuguguccaugaccaagaccagcguggacugcaccauguacaucugcggcgauuccaccgagugcuccaaccugcugcugcaguacggcagcuucugcacccagcugaauagagcccugacagggaucgccguggaacaggacaagaacacccaagagguguucgcccaagugaagcaaaucuacaagaccccuccuaucaaggacuucggcggcuucaauuucagccagauucugcccgauccuagcaagcccagcaagcggagcuucaucgaggaccugcuguucaacaaagugacacuggccgacgccggcuucaucaagcaguauggcgauugucugggcgacauugccgccagggaucugauuugcgcccagaaguuuaacggacugacagugcugccuccucugcugaccgaugagaugaucgcccaguacacaucugcccugcuggccggcacaaucacaagcggcuggacauuuggagcuggcgccgcucugcagauccccuuugcuaugcagauggccuaccgguucaacggcaucggagugacccagaaugugcuguacgagaaccagaagcugaucgccaaccaguucaacagcgccaucggcaagauccaggacagccugagcagcacagcaagcgcccugggaaagcugcaggacguggucaaccagaaugcccaggcacugaacacccuggucaagcagcuguccuccaacuucggcgccaucagcucugugcugaacgauauccugagcagacuggacaaggucgaggccgaggugcagaucgacagacugaucacaggcagacugcagagccuccagacauacgugacccagcagcugaucagagccgccgagauuagagccucugccaaucuggccgccaccaagaugucugagugugugcugggccagagcaagagaguggacuuuugcggcaagggcuaccaccugaugagcuucccucagucugccccucacggcgugguguuucugcacgugacauaugugcccgcucaagagaagaauuucaccaccgcuccagccaucugccacgacggcaaagcccacuuuccuagagaaggcguguucguguccaacggcacccauugguucgugacacagcggaacuucuacgagccccagaucaucaccaccgacaacaccuucgugucuggcaacugcgacguugugaucggcauugugaacaauaccguguacgacccucugcagcccgagcuggacagcuucaaagaggaacuggacaaguacuuuaagaaccacacaagccccgacguggaccugggcgauaucagcggaaucaaugccagcgucgugaacauccagaaagagaucgaccggcugaacgagguggccaagaaucugaacgagagccugaucgaccugcaagaacuggggaaguacgagcaguacaucaaguggcccugguacaucuggcugggcuuuaucgccggacugauugccaucgugauggucacaaucaugcuguguugcaugaccagcugcuguagcugccugaagggcuguuguagcuguggcagcugcugcaaguucgacgaggacgauucugagcccgugcugaagggcgugaaacugcacuacaccuga

SEQ ID NO: 23057 - RNA, 3822 nt, Artificial Sequence
  SARS-CoV-2/Wuhan/WIV05/2019__EPI_ISL_402128 spike protein CDS gc mod (1-1273)(L18F_T20N_P26S_D138Y_R190S_K417T_E484K_N501Y_D614G_H655Y _T1027I)
auguucguguuucuggugcugcugccccugguguccagccagugugugaacuucaccaacagaacacagcugccuagcgccuacaccaacagcuucaccagaggcguguacuaccccgacaagguguucagauccagcgugcugcacucuacccaggaccuguuccugccuuucuucagcaacgugaccugguuccacgccauccacguguccggcaccaauggcaccaagagauucgacaaccccgugcugcccuucaacgacgggguguacuuugccagcaccgagaaguccaacaucaucagaggcuggaucuucggcaccacacuggacagcaagacccagagccugcugaucgugaacaacgccaccaacguggucaucaaagugugcgaguuccaguucugcaacuaccccuuccugggcgucuacuaccacaagaacaacaagagcuggauggaaagcgaguuccggguguacagcagcgccaacaacugcaccuucgaguacgugucccagccuuuccugauggaccuggaaggcaagcagggcaacuucaagaaccugagcgaguucguguucaagaacaucgacggcuacuucaaaaucuacagcaagcacaccccuaucaaccucgugcgggaucugccucagggcuucucugcucuggaaccccugguggaucugcccaucggcaucaacaucacccgguuucagacacugcuggcccugcacagaagcuaccugacaccuggcgauagcagcagcggauggacagcuggugccgccgcuuacuaugugggcuaccugcagccuagaaccuuccugcugaaguacaacgagaacggcaccaucaccgacgccguggauugugcucuggauccucugagcgagacaaagugcacccugaaguccuucaccguggaaaagggcaucuaccagaccagcaacuuccgggugcagcccaccgaauccaucgugcgguuccccaauaucaccaaucugugccccuucggcgagguguucaaugccaccagauucgccucuguguacgccuggaaccggaagcggaucagcaauugcguggccgacuacuccgugcuguacaacuccgccagcuucagcaccuucaagugcuacggcguguccccuaccaagcugaacgaccugugcuucacaaacguguacgccgacagcuucgugauccggggagaugaagugcggcagauugccccuggacagacaggcaccaucgccgacuacaacuacaagcugcccgacgacuucaccggcugugugauugccuggaacagcaacaaccuggacuccaaagucggcggcaacuacaauuaccuguaccggcuguuccggaaguccaaucugaagcccuucgagcgggacaucagcaccgaaaucuaucaggccggcagcaccccuugcaacggcgugaagggcuucaacugcuacuucccacugcaguccuacggcuuucagcccacauacggcgugggcuaucagcccuacagagugguggugcugagcuucgaacugcugcaugcuccugccacagugugcggcccuaagaaaagcaccaaucucgugaagaacaaaugcgugaacuucaacuucaacggccugaccggcaccggcgugcugacagagagcaacaagaaguuccugccauuccagcaguuuggccgggauaucgccgauaccacagacgccguuagagauccccagacacuggaaauccuggacaucaccccaugcagcuucggcggagugucugugaucaccccuggcaccaacaccagcaaucagguggcagugcuguaccagggcgugaacuguaccgaagugcccguggccauucacgccgaucagcugacaccuacauggcggguguacuccaccggcagcaauguguuucagaccagagccggcugucugaucggagccgaguacgugaacaauagcuacgagugcgacauccccaucggcgcuggcaucugugccagcuaccagacacagacaaacagccccagacgggcuagaagcguggccagccagagcaucauugccuacacaaugucucugggcgccgagaacagcguggccuacuccaacaacucuaucgcuauccccaccaacuucaccaucagcgugaccaccgagauccugccuguguccaugaccaagaccagcguggacugcaccauguacaucugcggcgauuccaccgagugcuccaaccugcugcugcaguacggcagcuucugcacccagcugaauagagcccugacagggaucgccguggaacaggacaagaacacccaagagguguucgcccaagugaagcaaaucuacaagaccccuccuaucaaggacuucggcggcuucaauuucagccagauucugcccgauccuagcaagcccagcaagcggagcuucaucgaggaccugcuguucaacaaagugacacuggccgacgccggcuucaucaagcaguauggcgauugucugggcgacauugccgccagggaucugauuugcgcccagaaguuuaacggacugacagugcugccuccucugcugaccgaugagaugaucgcccaguacacaucugcccugcuggccggcacaaucacaagcggcuggacauuuggagcuggcgccgcucugcagauccccuuugcuaugcagauggccuaccgguucaacggcaucggagugacccagaaugugcuguacgagaaccagaagcugaucgccaaccaguucaacagcgccaucggcaagauccaggacagccugagcagcacagcaagcgcccugggaaagcugcaggacguggucaaccagaaugcccaggcacugaacacccuggucaagcagcuguccuccaacuucggcgccaucagcucugugcugaacgauauccugagcagacuggacaaggucgaggccgaggugcagaucgacagacugaucacaggcagacugcagagccuccagacauacgugacccagcagcugaucagagccgccgagauuagagccucugccaaucuggccgccaucaagaugucugagugugugcugggccagagcaagagaguggacuuuugcggcaagggcuaccaccugaugagcuucccucagucugccccucacggcgugguguuucugcacgugacauaugugcccgcucaagagaagaauuucaccaccgcuccagccaucugccacgacggcaaagcccacuuuccuagagaaggcguguucguguccaacggcacccauugguucgugacacagcggaacuucuacgagccccagaucaucaccaccgacaacaccuucgugucuggcaacugcgacguugugaucggcauugugaacaauaccguguacgacccucugcagcccgagcuggacagcuucaaagaggaacuggacaaguacuuuaagaaccacacaagccccgacguggaccugggcgauaucagcggaaucaaugccagcgucgugaacauccagaaagagaucgaccggcugaacgagguggccaagaaucugaacgagagccugaucgaccugcaagaacuggggaaguacgagcaguacaucaaguggcccugguacaucuggcugggcuuuaucgccggacugauugccaucgugauggucacaaucaugcuguguugcaugaccagcugcuguagcugccugaagggcuguuguagcuguggcagcugcugcaaguucgacgaggacgauucugagcccgugcugaagggcgugaaacugcacuacaccuga

SEQ ID NO: 23058 - RNA, 3822 nt, Artificial Sequence
  SARS-CoV-2/Wuhan/WIV05/2019__EPI_ISL_402128 spike protein CDS gc mod (1-1273)(S13I_W152C_L452R_D614G)
auguucguguuucuggugcugcugccccugguguccauccagugugugaaccugaccaccagaacacagcugccuccagccuacaccaacagcuucaccagaggcguguacuaccccgacaagguguucagauccagcgugcugcacucuacccaggaccuguuccugccuuucuucagcaacgugaccugguuccacgccauccacguguccggcaccaauggcaccaagagauucgacaaccccgugcugcccuucaacgacgggguguacuuugccagcaccgagaaguccaacaucaucagaggcuggaucuucggcaccacacuggacagcaagacccagagccugcugaucgugaacaacgccaccaacguggucaucaaagugugcgaguuccaguucugcaacgaccccuuccugggcgucuacuaccacaagaacaacaagagcugcauggaaagcgaguuccggguguacagcagcgccaacaacugcaccuucgaguacgugucccagccuuuccugauggaccuggaaggcaagcagggcaacuucaagaaccugcgcgaguucguguucaagaacaucgacggcuacuucaaaaucuacagcaagcacaccccuaucaaccucgugcgggaucugccucagggcuucucugcucuggaaccccugguggaucugcccaucggcaucaacaucacccgguuucagacacugcuggcccugcacagaagcuaccugacaccuggcgauagcagcagcggauggacagcuggugccgccgcuuacuaugugggcuaccugcagccuagaaccuuccugcugaaguacaacgagaacggcaccaucaccgacgccguggauugugcucuggauccucugagcgagacaaagugcacccugaaguccuucaccguggaaaagggcaucuaccagaccagcaacuuccgggugcagcccaccgaauccaucgugcgguuccccaauaucaccaaucugugccccuucggcgagguguucaaugccaccagauucgccucuguguacgccuggaaccggaagcggaucagcaauugcguggccgacuacuccgugcuguacaacuccgccagcuucagcaccuucaagugcuacggcguguccccuaccaagcugaacgaccugugcuucacaaacguguacgccgacagcuucgugauccggggagaugaagugcggcagauugccccuggacagacaggcaagaucgccgacuacaacuacaagcugcccgacgacuucaccggcugugugauugccuggaacagcaacaaccuggacuccaaagucggcggcaacuacaauuaccgcuaccggcuguuccggaaguccaaucugaagcccuucgagcgggacaucagcaccgaaaucuaucaggccggcagcaccccuugcaacggcguggaaggcuucaacugcuacuucccacugcaguccuacggcuuucagcccacaaauggcgugggcuaucagcccuacagagugguggugcugagcuucgaacugcugcaugcuccugccacagugugcggcccuaagaaaagcaccaaucucgugaagaacaaaugcgugaacuucaacuucaacggccugaccggcaccggcgugcugacagagagcaacaagaaguuccugccauuccagcaguuuggccgggauaucgccgauaccacagacgccguuagagauccccagacacuggaaauccuggacaucaccccaugcagcuucggcggagugucugugaucaccccuggcaccaacaccagcaaucagguggcagugcuguaccagggcgugaacuguaccgaagugcccguggccauucacgccgaucagcugacaccuacauggcggguguacuccaccggcagcaauguguuucagaccagagccggcugucugaucggagccgagcacgugaacaauagcuacgagugcgacauccccaucggcgcuggcaucugugccagcuaccagacacagacaaacagccccagacgggcuagaagcguggccagccagagcaucauugccuacacaaugucucugggcgccgagaacagcguggccuacuccaacaacucuaucgcuauccccaccaacuucaccaucagcgugaccaccgagauccugccuguguccaugaccaagaccagcguggacugcaccauguacaucugcggcgauuccaccgagugcuccaaccugcugcugcaguacggcagcuucugcacccagcugaauagagcccugacagggaucgccguggaacaggacaagaacacccaagagguguucgcccaagugaagcaaaucuacaagaccccuccuaucaaggacuucggcggcuucaauuucagccagauucugcccgauccuagcaagcccagcaagcggagcuucaucgaggaccugcuguucaacaaagugacacuggccgacgccggcuucaucaagcaguauggcgauugucugggcgacauugccgccagggaucugauuugcgcccagaaguuuaacggacugacagugcugccuccucugcugaccgaugagaugaucgcccaguacacaucugcccugcuggccggcacaaucacaagcggcuggacauuuggagcuggcgccgcucugcagauccccuuugcuaugcagauggccuaccgguucaacggcaucggagugacccagaaugugcuguacgagaaccagaagcugaucgccaaccaguucaacagcgccaucggcaagauccaggacagccugagcagcacagcaagcgcccugggaaagcugcaggacguggucaaccagaaugcccaggcacugaacacccuggucaagcagcuguccuccaacuucggcgccaucagcucugugcugaacgauauccugagcagacuggacaaggucgaggccgaggugcagaucgacagacugaucacaggcagacugcagagccuccagacauacgugacccagcagcugaucagagccgccgagauuagagccucugccaaucuggccgccaccaagaugucugagugugugcugggccagagcaagagaguggacuuuugcggcaagggcuaccaccugaugagcuucccucagucugccccucacggcgugguguuucugcacgugacauaugugcccgcucaagagaagaauuucaccaccgcuccagccaucugccacgacggcaaagcccacuuuccuagagaaggcguguucguguccaacggcacccauugguucgugacacagcggaacuucuacgagccccagaucaucaccaccgacaacaccuucgugucuggcaacugcgacguugugaucggcauugugaacaauaccguguacgacccucugcagcccgagcuggacagcuucaaagaggaacuggacaaguacuuuaagaaccacacaagccccgacguggaccugggcgauaucagcggaaucaaugccagcgucgugaacauccagaaagagaucgaccggcugaacgagguggccaagaaucugaacgagagccugaucgaccugcaagaacuggggaaguacgagcaguacaucaaguggcccugguacaucuggcugggcuuuaucgccggacugauugccaucgugauggucacaaucaugcuguguugcaugaccagcugcuguagcugccugaagggcuguuguagcuguggcagcugcugcaaguucgacgaggacgauucugagcccgugcugaagggcgugaaacugcacuacaccuga

SEQ ID NO: 23059 - RNA, 3822 nt, Artificial Sequence
  SARS-CoV-2/Wuhan/WIV05/2019__EPI_ISL_402128 spike protein CDS gc mod (1-1273)
auguucguguuccuggugcugcugccucugguguccagccagugugugaaccugaccaccagaacacagcugccuccagccuacaccaacagcuuuaccagaggcguguacuaccccgacaagguguucagauccagcgugcugcacucuacccaggaccuguuccugccuuucuucagcaacgugaccugguuccacgccauccacguguccggcaccaauggcaccaagagauucgacaaccccgugcugcccuucaacgacgggguguacuuugccagcaccgagaaguccaacaucaucagaggcuggaucuucggcaccacacuggacagcaagacccagagccugcugaucgugaacaacgccaccaacguggucaucaaagugugcgaguuccaguucugcaacgaccccuuccugggcgucuacuaccacaagaacaacaagagcuggauggaaagcgaguuccggguguacagcagcgccaacaacugcaccuucgaguacgugucccagccuuuccugauggaccuggaaggcaagcagggcaacuucaagaaccugcgcgaguucguguuuaagaacaucgacggcuacuucaagaucuacagcaagcacaccccuaucaaccucgugcgggaucugccucagggcuucucugcucuggaaccccugguggaucugcccaucggcaucaacaucacccgguuucagacacugcuggcccugcacagaagcuaccugacaccuggcgauagcagcagcggauggacagcuggugccgccgcuuacuaugugggcuaccugcagccuagaaccuuccugcugaaguacaacgagaacggcaccaucaccgacgccguggauugugcucuggauccucugagcgagacaaagugcacccugaaguccuucaccguggaaaagggcaucuaccagaccagcaacuuccgggugcagcccaccgaauccaucgugcgguuccccaauaucaccaaucugugccccuucggcgagguguucaaugccaccagauucgccucuguguacgccuggaaccggaagcggaucagcaauugcguggccgacuacuccgugcuguacaacuccgccagcuucagcaccuucaagugcuacggcguguccccuaccaagcugaacgaccugugcuucacaaacguguacgccgacagcuucgugauccggggagaugaagugcggcagauugccccuggacagacaggcaagaucgccgacuacaacuacaagcugcccgacgacuucaccggcugugugauugccuggaacagcaacaaccuggacuccaaagucggcggcaacuacaauuaccuguaccggcuguuccggaaguccaaucugaagcccuucgagcgggacaucuccaccgagaucuaucaggccggcagcaccccuuguaacggcguggaaggcuucaacugcuacuucccacugcaguccuacggcuuucagcccacaaauggcgugggcuaucagcccuacagagugguggugcugagcuucgaacugcugcaugccccugccacagugugcggcccuaagaaaagcaccaaucucgugaagaacaaaugcgugaacuucaacuucaacggccugaccggcaccggcgugcugacagagagcaacaagaaguuccugccauuccagcaguuuggccgggauaucgccgauaccacagacgccguuagagauccccagacacuggaaauccuggacaucaccccuugcagcuucggcggagugucugugaucaccccuggcaccaacaccagcaaucagguggcagugcuguaccaggacgugaacuguaccgaagugcccguggccauucacgccgaucagcugacaccuacauggcggguguacuccaccggcagcaauguguuucagaccagagccggcugucugaucggagccgagcacgugaacaauagcuacgagugcgacauccccaucggcgcuggaaucugcgccagcuaccagacacagacaaacagcccucggagagccagaagcguggccagccagagcaucauugccuacacaaugucucugggcgccgagaacagcguggccuacuccaacaacucuaucgcuauccccaccaacuucaccaucagcgugaccacagagauccugccuguguccaugaccaagaccagcguggacugcaccauguacaucugcggcgauuccaccgagugcuccaaccugcugcugcaguacggcagcuucugcacccagcugaauagagcccugacagggaucgccguggaacaggacaagaacacccaagagguguucgcccaagugaagcagaucuacaagaccccuccuaucaaggacuucggcggcuucaauuucagccagauucugcccgauccuagcaagcccagcaagcggagcuucaucgaggaccugcuguucaacaaagugacacuggccgacgccggcuucaucaagcaguauggcgauugucugggcgacauugccgccagggaucugauuugcgcccagaaguuuaacggacugacagugcugccuccucugcugaccgaugagaugaucgcccaguacacaucugcccugcuggccggcacaaucacaagcggcuggacauuuggagcaggcgccgcucugcagauccccuuugcuaugcagauggccuaccgguucaacggcaucggagugacccagaaugugcuguacgagaaccagaagcugaucgccaaccaguucaacagcgccaucggcaagauccaggacagccugagcagcacagcaagcgcccugggaaagcugcaggacguggucaaccagaaugcccaggcacugaacacccuggucaagcagcuguccuccaacuucggcgccaucagcucugugcugaacgauauccugagcagacuggacaaggucgaggccgaggugcagaucgacagacugaucacaggcagacugcagagccuccagacauacgugacccagcagcugaucagagccgccgagauuagagccucugccaaucuggccgccaccaagaugucugagugugugcugggccagagcaagagaguggacuuuugcggcaagggcuaccaccugaugagcuucccucagucugccccucacggcgugguguuucugcacgugacauaugugcccgcucaagagaagaauuucaccaccgcuccagccaucugccacgacggcaaagcccacuuuccuagagaaggcguguucguguccaacggcacccauugguucgugacacagcggaacuucuacgagccccagaucaucaccaccgacaacaccuucgugucuggcaacugcgacgucgugaucggcauugugaacaauaccguguacgacccucugcagcccgagcuggacagcuucaaagaggaacuggacaaguacuuuaagaaccacacaagccccgacguggaccugggcgauaucagcggaaucaaugccagcgucgugaacauccagaaagagaucgaccggcugaacgagguggccaagaaucugaacgagagccugaucgaccugcaagaacuggggaaguacgagcaguacaucaaguggcccugguacaucuggcugggcuuuaucgccggacugauugccaucgugauggucacaaucaugcuguguugcaugaccagcugcuguagcugccugaagggcuguuguagcuguggcagcugcugcaaguucgacgaggacgauucugagcccgugcugaagggcgugaaacugcacuacacauga

SEQ ID NO: 23060 - RNA, 3822 nt, Artificial Sequence
  SARS-CoV-2/Wuhan/WIV05/2019__EPI_ISL_402128 spike protein CDS gc mod (1-1273)(D614G)
auguucguguuccuggugcugcugccucugguguccagccagugugugaaccugaccaccagaacacagcugccuccagccuacaccaacagcuuuaccagaggcguguacuaccccgacaagguguucagauccagcgugcugcacucuacccaggaccuguuccugccuuucuucagcaacgugaccugguuccacgccauccacguguccggcaccaauggcaccaagagauucgacaaccccgugcugcccuucaacgacgggguguacuuugccagcaccgagaaguccaacaucaucagaggcuggaucuucggcaccacacuggacagcaagacccagagccugcugaucgugaacaacgccaccaacguggucaucaaagugugcgaguuccaguucugcaacgaccccuuccugggcgucuacuaccacaagaacaacaagagcuggauggaaagcgaguuccggguguacagcagcgccaacaacugcaccuucgaguacgugucccagccuuuccugauggaccuggaaggcaagcagggcaacuucaagaaccugcgcgaguucguguuuaagaacaucgacggcuacuucaagaucuacagcaagcacaccccuaucaaccucgugcgggaucugccucagggcuucucugcucuggaaccccugguggaucugcccaucggcaucaacaucacccgguuucagacacugcuggcccugcacagaagcuaccugacaccuggcgauagcagcagcggauggacagcuggugccgccgcuuacuaugugggcuaccugcagccuagaaccuuccugcugaaguacaacgagaacggcaccaucaccgacgccguggauugugcucuggauccucugagcgagacaaagugcacccugaaguccuucaccguggaaaagggcaucuaccagaccagcaacuuccgggugcagcccaccgaauccaucgugcgguuccccaauaucaccaaucugugccccuucggcgagguguucaaugccaccagauucgccucuguguacgccuggaaccggaagcggaucagcaauugcguggccgacuacuccgugcuguacaacuccgccagcuucagcaccuucaagugcuacggcguguccccuaccaagcugaacgaccugugcuucacaaacguguacgccgacagcuucgugauccggggagaugaagugcggcagauugccccuggacagacaggcaagaucgccgacuacaacuacaagcugcccgacgacuucaccggcugugugauugccuggaacagcaacaaccuggacuccaaagucggcggcaacuacaauuaccuguaccggcuguuccggaaguccaaucugaagcccuucgagcgggacaucuccaccgagaucuaucaggccggcagcaccccuuguaacggcguggaaggcuucaacugcuacuucccacugcaguccuacggcuuucagcccacaaauggcgugggcuaucagcccuacagagugguggugcugagcuucgaacugcugcaugccccugccacagugugcggcccuaagaaaagcaccaaucucgugaagaacaaaugcgugaacuucaacuucaacggccugaccggcaccggcgugcugacagagagcaacaagaaguuccugccauuccagcaguuuggccgggauaucgccgauaccacagacgccguuagagauccccagacacuggaaauccuggacaucaccccuugcagcuucggcggagugucugugaucaccccuggcaccaacaccagcaaucagguggcagugcuguaccagggcgugaacuguaccgaagugcccguggccauucacgccgaucagcugacaccuacauggcggguguacuccaccggcagcaauguguuucagaccagagccggcugucugaucggagccgagcacgugaacaauagcuacgagugcgacauccccaucggcgcuggaaucugcgccagcuaccagacacagacaaacagcccucggagagccagaagcguggccagccagagcaucauugccuacacaaugucucugggcgccgagaacagcguggccuacuccaacaacucuaucgcuauccccaccaacuucaccaucagcgugaccacagagauccugccuguguccaugaccaagaccagcguggacugcaccauguacaucugcggcgauuccaccgagugcuccaaccugcugcugcaguacggcagcuucugcacccagcugaauagagcccugacagggaucgccguggaacaggacaagaacacccaagagguguucgcccaagugaagcagaucuacaagaccccuccuaucaaggacuucggcggcuucaauuucagccagauucugcccgauccuagcaagcccagcaagcggagcuucaucgaggaccugcuguucaacaaagugacacuggccgacgccggcuucaucaagcaguauggcgauugucugggcgacauugccgccagggaucugauuugcgcccagaaguuuaacggacugacagugcugccuccucugcugaccgaugagaugaucgcccaguacacaucugcccugcuggccggcacaaucacaagcggcuggacauuuggagcaggcgccgcucugcagauccccuuugcuaugcagauggccuaccgguucaacggcaucggagugacccagaaugugcuguacgagaaccagaagcugaucgccaaccaguucaacagcgccaucggcaagauccaggacagccugagcagcacagcaagcgcccugggaaagcugcaggacguggucaaccagaaugcccaggcacugaacacccuggucaagcagcuguccuccaacuucggcgccaucagcucugugcugaacgauauccugagcagacuggacaaggucgaggccgaggugcagaucgacagacugaucacaggcagacugcagagccuccagacauacgugacccagcagcugaucagagccgccgagauuagagccucugccaaucuggccgccaccaagaugucugagugugugcugggccagagcaagagaguggacuuuugcggcaagggcuaccaccugaugagcuucccucagucugccccucacggcgugguguuucugcacgugacauaugugcccgcucaagagaagaauuucaccaccgcuccagccaucugccacgacggcaaagcccacuuuccuagagaaggcguguucguguccaacggcacccauugguucgugacacagcggaacuucuacgagccccagaucaucaccaccgacaacaccuucgugucuggcaacugcgacgucgugaucggcauugugaacaauaccguguacgacccucugcagcccgagcuggacagcuucaaagaggaacuggacaaguacuuuaagaaccacacaagccccgacguggaccugggcgauaucagcggaaucaaugccagcgucgugaacauccagaaagagaucgaccggcugaacgagguggccaagaaucugaacgagagccugaucgaccugcaagaacuggggaaguacgagcaguacaucaaguggcccugguacaucuggcugggcuuuaucgccggacugauugccaucgugauggucacaaucaugcuguguugcaugaccagcugcuguagcugccugaagggcuguuguagcuguggcagcugcugcaaguucgacgaggacgauucugagcccgugcugaagggcgugaaacugcacuacacauga

SEQ ID NO: 23061 - RNA, 3822 nt, Artificial Sequence
  SARS-CoV-2/Wuhan/WIV05/2019__EPI_ISL_402128 spike protein CDS gc mod (1-1273)(A222V_D614G)
auguucguguuccuggugcugcugccucugguguccagccagugugugaaccugaccaccagaacacagcugccuccagccuacaccaacagcuuuaccagaggcguguacuaccccgacaagguguucagauccagcgugcugcacucuacccaggaccuguuccugccuuucuucagcaacgugaccugguuccacgccauccacguguccggcaccaauggcaccaagagauucgacaaccccgugcugcccuucaacgacgggguguacuuugccagcaccgagaaguccaacaucaucagaggcuggaucuucggcaccacacuggacagcaagacccagagccugcugaucgugaacaacgccaccaacguggucaucaaagugugcgaguuccaguucugcaacgaccccuuccugggcgucuacuaccacaagaacaacaagagcuggauggaaagcgaguuccggguguacagcagcgccaacaacugcaccuucgaguacgugucccagccuuuccugauggaccuggaaggcaagcagggcaacuucaagaaccugcgcgaguucguguuuaagaacaucgacggcuacuucaagaucuacagcaagcacaccccuaucaaccucgugcgggaucugccucagggcuucucugugcuggaaccccugguggaucugcccaucggcaucaacaucacccgguuucagacacugcuggcccugcacagaagcuaccugacaccuggcgauagcagcagcggauggacagcuggugccgccgcuuacuaugugggcuaccugcagccuagaaccuuccugcugaaguacaacgagaacggcaccaucaccgacgccguggauugugcucuggauccucugagcgagacaaagugcacccugaaguccuucaccguggaaaagggcaucuaccagaccagcaacuuccgggugcagcccaccgaauccaucgugcgguuccccaauaucaccaaucugugccccuucggcgagguguucaaugccaccagauucgccucuguguacgccuggaaccggaagcggaucagcaauugcguggccgacuacuccgugcuguacaacuccgccagcuucagcaccuucaagugcuacggcguguccccuaccaagcugaacgaccugugcuucacaaacguguacgccgacagcuucgugauccggggagaugaagugcggcagauugccccuggacagacaggcaagaucgccgacuacaacuacaagcugcccgacgacuucaccggcugugugauugccuggaacagcaacaaccuggacuccaaagucggcggcaacuacaauuaccuguaccggcuguuccggaaguccaaucugaagcccuucgagcgggacaucuccaccgagaucuaucaggccggcagcaccccuuguaacggcguggaaggcuucaacugcuacuucccacugcaguccuacggcuuucagcccacaaauggcgugggcuaucagcccuacagagugguggugcugagcuucgaacugcugcaugccccugccacagugugcggcccuaagaaaagcaccaaucucgugaagaacaaaugcgugaacuucaacuucaacggccugaccggcaccggcgugcugacagagagcaacaagaaguuccugccauuccagcaguuuggccgggauaucgccgauaccacagacgccguuagagauccccagacacuggaaauccuggacaucaccccuugcagcuucggcggagugucugugaucaccccuggcaccaacaccagcaaucagguggcagugcuguaccagggcgugaacuguaccgaagugcccguggccauucacgccgaucagcugacaccuacauggcggguguacuccaccggcagcaauguguuucagaccagagccggcugucugaucggagccgagcacgugaacaauagcuacgagugcgacauccccaucggcgcuggaaucugcgccagcuaccagacacagacaaacagcccucggagagccagaagcguggccagccagagcaucauugccuacacaaugucucugggcgccgagaacagcguggccuacuccaacaacucuaucgcuauccccaccaacuucaccaucagcgugaccacagagauccugccuguguccaugaccaagaccagcguggacugcaccauguacaucugcggcgauuccaccgagugcuccaaccugcugcugcaguacggcagcuucugcacccagcugaauagagcccugacagggaucgccguggaacaggacaagaacacccaagagguguucgcccaagugaagcagaucuacaagaccccuccuaucaaggacuucggcggcuucaauuucagccagauucugcccgauccuagcaagcccagcaagcggagcuucaucgaggaccugcuguucaacaaagugacacuggccgacgccggcuucaucaagcaguauggcgauugucugggcgacauugccgccagggaucugauuugcgcccagaaguuuaacggacugacagugcugccuccucugcugaccgaugagaugaucgcccaguacacaucugcccugcuggccggcacaaucacaagcggcuggacauuuggagcaggcgccgcucugcagauccccuuugcuaugcagauggccuaccgguucaacggcaucggagugacccagaaugugcuguacgagaaccagaagcugaucgccaaccaguucaacagcgccaucggcaagauccaggacagccugagcagcacagcaagcgcccugggaaagcugcaggacguggucaaccagaaugcccaggcacugaacacccuggucaagcagcuguccuccaacuucggcgccaucagcucugugcugaacgauauccugagcagacuggacaaggucgaggccgaggugcagaucgacagacugaucacaggcagacugcagagccuccagacauacgugacccagcagcugaucagagccgccgagauuagagccucugccaaucuggccgccaccaagaugucugagugugugcugggccagagcaagagaguggacuuuugcggcaagggcuaccaccugaugagcuucccucagucugccccucacggcgugguguuucugcacgugacauaugugcccgcucaagagaagaauuucaccaccgcuccagccaucugccacgacggcaaagcccacuuuccuagagaaggcguguucguguccaacggcacccauugguucgugacacagcggaacuucuacgagccccagaucaucaccaccgacaacaccuucgugucuggcaacugcgacgucgugaucggcauugugaacaauaccguguacgacccucugcagcccgagcuggacagcuucaaagaggaacuggacaaguacuuuaagaaccacacaagccccgacguggaccugggcgauaucagcggaaucaaugccagcgucgugaacauccagaaagagaucgaccggcugaacgagguggccaagaaucugaacgagagccugaucgaccugcaagaacuggggaaguacgagcaguacaucaaguggcccugguacaucuggcugggcuuuaucgccggacugauugccaucgugauggucacaaucaugcuguguugcaugaccagcugcuguagcugccugaagggcuguuguagcuguggcagcugcugcaaguucgacgaggacgauucugagcccgugcugaagggcgugaaacugcacuacacauga

SEQ ID NO: 23062 - RNA, 3822 nt, Artificial Sequence
  SARS-CoV-2/Wuhan/WIV05/2019__EPI_ISL_402128 spike protein CDS gc mod (1-1273)(N439K_D614G)
auguucguguuccuggugcugcugccucugguguccagccagugugugaaccugaccaccagaacacagcugccuccagccuacaccaacagcuuuaccagaggcguguacuaccccgacaagguguucagauccagcgugcugcacucuacccaggaccuguuccugccuuucuucagcaacgugaccugguuccacgccauccacguguccggcaccaauggcaccaagagauucgacaaccccgugcugcccuucaacgacgggguguacuuugccagcaccgagaaguccaacaucaucagaggcuggaucuucggcaccacacuggacagcaagacccagagccugcugaucgugaacaacgccaccaacguggucaucaaagugugcgaguuccaguucugcaacgaccccuuccugggcgucuacuaccacaagaacaacaagagcuggauggaaagcgaguuccggguguacagcagcgccaacaacugcaccuucgaguacgugucccagccuuuccugauggaccuggaaggcaagcagggcaacuucaagaaccugcgcgaguucguguuuaagaacaucgacggcuacuucaagaucuacagcaagcacaccccuaucaaccucgugcgggaucugccucagggcuucucugcucuggaaccccugguggaucugcccaucggcaucaacaucacccgguuucagacacugcuggcccugcacagaagcuaccugacaccuggcgauagcagcagcggauggacagcuggugccgccgcuuacuaugugggcuaccugcagccuagaaccuuccugcugaaguacaacgagaacggcaccaucaccgacgccguggauugugcucuggauccucugagcgagacaaagugcacccugaaguccuucaccguggaaaagggcaucuaccagaccagcaacuuccgggugcagcccaccgaauccaucgugcgguuccccaauaucaccaaucugugccccuucggcgagguguucaaugccaccagauucgccucuguguacgccuggaaccggaagcggaucagcaauugcguggccgacuacuccgugcuguacaacuccgccagcuucagcaccuucaagugcuacggcguguccccuaccaagcugaacgaccugugcuucacaaacguguacgccgacagcuucgugauccggggagaugaagugcggcagauugccccuggacagacaggcaagaucgccgacuacaacuacaagcugcccgacgacuucaccggcugugugauugccuggaacagcaagaaccuggacuccaaagucggcggcaacuacaauuaccuguaccggcuguuccggaaguccaaucugaagcccuucgagcgggacaucuccaccgagaucuaucaggccggcagcaccccuuguaacggcguggaaggcuucaacugcuacuucccacugcaguccuacggcuuucagcccacaaauggcgugggcuaucagcccuacagagugguggugcugagcuucgaacugcugcaugccccugccacagugugcggcccuaagaaaagcaccaaucucgugaagaacaaaugcgugaacuucaacuucaacggccugaccggcaccggcgugcugacagagagcaacaagaaguuccugccauuccagcaguuuggccgggauaucgccgauaccacagacgccguuagagauccccagacacuggaaauccuggacaucaccccuugcagcuucggcggagugucugugaucaccccuggcaccaacaccagcaaucagguggcagugcuguaccagggcgugaacuguaccgaagugcccguggccauucacgccgaucagcugacaccuacauggcggguguacuccaccggcagcaauguguuucagaccagagccggcugucugaucggagccgagcacgugaacaauagcuacgagugcgacauccccaucggcgcuggaaucugcgccagcuaccagacacagacaaacagcccucggagagccagaagcguggccagccagagcaucauugccuacacaaugucucugggcgccgagaacagcguggccuacuccaacaacucuaucgcuauccccaccaacuucaccaucagcgugaccacagagauccugccuguguccaugaccaagaccagcguggacugcaccauguacaucugcggcgauuccaccgagugcuccaaccugcugcugcaguacggcagcuucugcacccagcugaauagagcccugacagggaucgccguggaacaggacaagaacacccaagagguguucgcccaagugaagcagaucuacaagaccccuccuaucaaggacuucggcggcuucaauuucagccagauucugcccgauccuagcaagcccagcaagcggagcuucaucgaggaccugcuguucaacaaagugacacuggccgacgccggcuucaucaagcaguauggcgauugucugggcgacauugccgccagggaucugauuugcgcccagaaguuuaacggacugacagugcugccuccucugcugaccgaugagaugaucgcccaguacacaucugcccugcuggccggcacaaucacaagcggcuggacauuuggagcaggcgccgcucugcagauccccuuugcuaugcagauggccuaccgguucaacggcaucggagugacccagaaugugcuguacgagaaccagaagcugaucgccaaccaguucaacagcgccaucggcaagauccaggacagccugagcagcacagcaagcgcccugggaaagcugcaggacguggucaaccagaaugcccaggcacugaacacccuggucaagcagcuguccuccaacuucggcgccaucagcucugugcugaacgauauccugagcagacuggacaaggucgaggccgaggugcagaucgacagacugaucacaggcagacugcagagccuccagacauacgugacccagcagcugaucagagccgccgagauuagagccucugccaaucuggccgccaccaagaugucugagugugugcugggccagagcaagagaguggacuuuugcggcaagggcuaccaccugaugagcuucccucagucugccccucacggcgugguguuucugcacgugacauaugugcccgcucaagagaagaauuucaccaccgcuccagccaucugccacgacggcaaagcccacuuuccuagagaaggcguguucguguccaacggcacccauugguucgugacacagcggaacuucuacgagccccagaucaucaccaccgacaacaccuucgugucuggcaacugcgacgucgugaucggcauugugaacaauaccguguacgacccucugcagcccgagcuggacagcuucaaagaggaacuggacaaguacuuuaagaaccacacaagccccgacguggaccugggcgauaucagcggaaucaaugccagcgucgugaacauccagaaagagaucgaccggcugaacgagguggccaagaaucugaacgagagccugaucgaccugcaagaacuggggaaguacgagcaguacaucaaguggcccugguacaucuggcugggcuuuaucgccggacugauugccaucgugauggucacaaucaugcuguguugcaugaccagcugcuguagcugccugaagggcuguuguagcuguggcagcugcugcaaguucgacgaggacgauucugagcccgugcugaagggcgugaaacugcacuacacauga

SEQ ID NO: 23063 - RNA, 3822 nt, Artificial Sequence
  SARS-CoV-2/Wuhan/WIV05/2019__EPI_ISL_402128 spike protein CDS gc mod (1-1273)(S477N_D614G)
auguucguguuccuggugcugcugccucugguguccagccagugugugaaccugaccaccagaacacagcugccuccagccuacaccaacagcuuuaccagaggcguguacuaccccgacaagguguucagauccagcgugcugcacucuacccaggaccuguuccugccuuucuucagcaacgugaccugguuccacgccauccacguguccggcaccaauggcaccaagagauucgacaaccccgugcugcccuucaacgacgggguguacuuugccagcaccgagaaguccaacaucaucagaggcuggaucuucggcaccacacuggacagcaagacccagagccugcugaucgugaacaacgccaccaacguggucaucaaagugugcgaguuccaguucugcaacgaccccuuccugggcgucuacuaccacaagaacaacaagagcuggauggaaagcgaguuccggguguacagcagcgccaacaacugcaccuucgaguacgugucccagccuuuccugauggaccuggaaggcaagcagggcaacuucaagaaccugcgcgaguucguguuuaagaacaucgacggcuacuucaagaucuacagcaagcacaccccuaucaaccucgugcgggaucugccucagggcuucucugcucuggaaccccugguggaucugcccaucggcaucaacaucacccgguuucagacacugcuggcccugcacagaagcuaccugacaccuggcgauagcagcagcggauggacagcuggugccgccgcuuacuaugugggcuaccugcagccuagaaccuuccugcugaaguacaacgagaacggcaccaucaccgacgccguggauugugcucuggauccucugagcgagacaaagugcacccugaaguccuucaccguggaaaagggcaucuaccagaccagcaacuuccgggugcagcccaccgaauccaucgugcgguuccccaauaucaccaaucugugccccuucggcgagguguucaaugccaccagauucgccucuguguacgccuggaaccggaagcggaucagcaauugcguggccgacuacuccgugcuguacaacuccgccagcuucagcaccuucaagugcuacggcguguccccuaccaagcugaacgaccugugcuucacaaacguguacgccgacagcuucgugauccggggagaugaagugcggcagauugccccuggacagacaggcaagaucgccgacuacaacuacaagcugcccgacgacuucaccggcugugugauugccuggaacagcaacaaccuggacuccaaagucggcggcaacuacaauuaccuguaccggcuguuccggaaguccaaucugaagcccuucgagcgggacaucuccaccgagaucuaucaggccggcaacaccccuuguaacggcguggaaggcuucaacugcuacuucccacugcaguccuacggcuuucagcccacaaauggcgugggcuaucagcccuacagagugguggugcugagcuucgaacugcugcaugccccugccacagugugcggcccuaagaaaagcaccaaucucgugaagaacaaaugcgugaacuucaacuucaacggccugaccggcaccggcgugcugacagagagcaacaagaaguuccugccauuccagcaguuuggccgggauaucgccgauaccacagacgccguuagagauccccagacacuggaaauccuggacaucaccccuugcagcuucggcggagugucugugaucaccccuggcaccaacaccagcaaucagguggcagugcuguaccagggcgugaacuguaccgaagugcccguggccauucacgccgaucagcugacaccuacauggcggguguacuccaccggcagcaauguguuucagaccagagccggcugucugaucggagccgagcacgugaacaauagcuacgagugcgacauccccaucggcgcuggaaucugcgccagcuaccagacacagacaaacagcccucggagagccagaagcguggccagccagagcaucauugccuacacaaugucucugggcgccgagaacagcguggccuacuccaacaacucuaucgcuauccccaccaacuucaccaucagcgugaccacagagauccugccuguguccaugaccaagaccagcguggacugcaccauguacaucugcggcgauuccaccgagugcuccaaccugcugcugcaguacggcagcuucugcacccagcugaauagagcccugacagggaucgccguggaacaggacaagaacacccaagagguguucgcccaagugaagcagaucuacaagaccccuccuaucaaggacuucggcggcuucaauuucagccagauucugcccgauccuagcaagcccagcaagcggagcuucaucgaggaccugcuguucaacaaagugacacuggccgacgccggcuucaucaagcaguauggcgauugucugggcgacauugccgccagggaucugauuugcgcccagaaguuuaacggacugacagugcugccuccucugcugaccgaugagaugaucgcccaguacacaucugcccugcuggccggcacaaucacaagcggcuggacauuuggagcaggcgccgcucugcagauccccuuugcuaugcagauggccuaccgguucaacggcaucggagugacccagaaugugcuguacgagaaccagaagcugaucgccaaccaguucaacagcgccaucggcaagauccaggacagccugagcagcacagcaagcgcccugggaaagcugcaggacguggucaaccagaaugcccaggcacugaacacccuggucaagcagcuguccuccaacuucggcgccaucagcucugugcugaacgauauccugagcagacuggacaaggucgaggccgaggugcagaucgacagacugaucacaggcagacugcagagccuccagacauacgugacccagcagcugaucagagccgccgagauuagagccucugccaaucuggccgccaccaagaugucugagugugugcugggccagagcaagagaguggacuuuugcggcaagggcuaccaccugaugagcuucccucagucugccccucacggcgugguguuucugcacgugacauaugugcccgcucaagagaagaauuucaccaccgcuccagccaucugccacgacggcaaagcccacuuuccuagagaaggcguguucguguccaacggcacccauugguucgugacacagcggaacuucuacgagccccagaucaucaccaccgacaacaccuucgugucuggcaacugcgacgucgugaucggcauugugaacaauaccguguacgacccucugcagcccgagcuggacagcuucaaagaggaacuggacaaguacuuuaagaaccacacaagccccgacguggaccugggcgauaucagcggaaucaaugccagcgucgugaacauccagaaagagaucgaccggcugaacgagguggccaagaaucugaacgagagccugaucgaccugcaagaacuggggaaguacgagcaguacaucaaguggcccugguacaucuggcugggcuuuaucgccggacugauugccaucgugauggucacaaucaugcuguguugcaugaccagcugcuguagcugccugaagggcuguuguagcuguggcagcugcugcaaguucgacgaggacgauucugagcccgugcugaagggcgugaaacugcacuacacauga

SEQ ID NO: 23064 - RNA, 3822 nt, Artificial Sequence
  SARS-CoV-2/Wuhan/WIV05/2019__EPI_ISL_402128 spike protein CDS gc mod (1-1273)(N501Y_D614G)
auguucguguuccuggugcugcugccucugguguccagccagugugugaaccugaccaccagaacacagcugccuccagccuacaccaacagcuuuaccagaggcguguacuaccccgacaagguguucagauccagcgugcugcacucuacccaggaccuguuccugccuuucuucagcaacgugaccugguuccacgccauccacguguccggcaccaauggcaccaagagauucgacaaccccgugcugcccuucaacgacgggguguacuuugccagcaccgagaaguccaacaucaucagaggcuggaucuucggcaccacacuggacagcaagacccagagccugcugaucgugaacaacgccaccaacguggucaucaaagugugcgaguuccaguucugcaacgaccccuuccugggcgucuacuaccacaagaacaacaagagcuggauggaaagcgaguuccggguguacagcagcgccaacaacugcaccuucgaguacgugucccagccuuuccugauggaccuggaaggcaagcagggcaacuucaagaaccugcgcgaguucguguuuaagaacaucgacggcuacuucaagaucuacagcaagcacaccccuaucaaccucgugcgggaucugccucagggcuucucugcucuggaaccccugguggaucugcccaucggcaucaacaucacccgguuucagacacugcuggcccugcacagaagcuaccugacaccuggcgauagcagcagcggauggacagcuggugccgccgcuuacuaugugggcuaccugcagccuagaaccuuccugcugaaguacaacgagaacggcaccaucaccgacgccguggauugugcucuggauccucugagcgagacaaagugcacccugaaguccuucaccguggaaaagggcaucuaccagaccagcaacuuccgggugcagcccaccgaauccaucgugcgguuccccaauaucaccaaucugugccccuucggcgagguguucaaugccaccagauucgccucuguguacgccuggaaccggaagcggaucagcaauugcguggccgacuacuccgugcuguacaacuccgccagcuucagcaccuucaagugcuacggcguguccccuaccaagcugaacgaccugugcuucacaaacguguacgccgacagcuucgugauccggggagaugaagugcggcagauugccccuggacagacaggcaagaucgccgacuacaacuacaagcugcccgacgacuucaccggcugugugauugccuggaacagcaacaaccuggacuccaaagucggcggcaacuacaauuaccuguaccggcuguuccggaaguccaaucugaagcccuucgagcgggacaucuccaccgagaucuaucaggccggcagcaccccuuguaacggcguggaaggcuucaacugcuacuucccacugcaguccuacggcuuucagcccacauacggcgugggcuaucagcccuacagagugguggugcugagcuucgaacugcugcaugccccugccacagugugcggcccuaagaaaagcaccaaucucgugaagaacaaaugcgugaacuucaacuucaacggccugaccggcaccggcgugcugacagagagcaacaagaaguuccugccauuccagcaguuuggccgggauaucgccgauaccacagacgccguuagagauccccagacacuggaaauccuggacaucaccccuugcagcuucggcggagugucugugaucaccccuggcaccaacaccagcaaucagguggcagugcuguaccagggcgugaacuguaccgaagugcccguggccauucacgccgaucagcugacaccuacauggcggguguacuccaccggcagcaauguguuucagaccagagccggcugucugaucggagccgagcacgugaacaauagcuacgagugcgacauccccaucggcgcuggaaucugcgccagcuaccagacacagacaaacagcccucggagagccagaagcguggccagccagagcaucauugccuacacaaugucucugggcgccgagaacagcguggccuacuccaacaacucuaucgcuauccccaccaacuucaccaucagcgugaccacagagauccugccuguguccaugaccaagaccagcguggacugcaccauguacaucugcggcgauuccaccgagugcuccaaccugcugcugcaguacggcagcuucugcacccagcugaauagagcccugacagggaucgccguggaacaggacaagaacacccaagagguguucgcccaagugaagcagaucuacaagaccccuccuaucaaggacuucggcggcuucaauuucagccagauucugcccgauccuagcaagcccagcaagcggagcuucaucgaggaccugcuguucaacaaagugacacuggccgacgccggcuucaucaagcaguauggcgauugucugggcgacauugccgccagggaucugauuugcgcccagaaguuuaacggacugacagugcugccuccucugcugaccgaugagaugaucgcccaguacacaucugcccugcuggccggcacaaucacaagcggcuggacauuuggagcaggcgccgcucugcagauccccuuugcuaugcagauggccuaccgguucaacggcaucggagugacccagaaugugcuguacgagaaccagaagcugaucgccaaccaguucaacagcgccaucggcaagauccaggacagccugagcagcacagcaagcgcccugggaaagcugcaggacguggucaaccagaaugcccaggcacugaacacccuggucaagcagcuguccuccaacuucggcgccaucagcucugugcugaacgauauccugagcagacuggacaaggucgaggccgaggugcagaucgacagacugaucacaggcagacugcagagccuccagacauacgugacccagcagcugaucagagccgccgagauuagagccucugccaaucuggccgccaccaagaugucugagugugugcugggccagagcaagagaguggacuuuugcggcaagggcuaccaccugaugagcuucccucagucugccccucacggcgugguguuucugcacgugacauaugugcccgcucaagagaagaauuucaccaccgcuccagccaucugccacgacggcaaagcccacuuuccuagagaaggcguguucguguccaacggcacccauugguucgugacacagcggaacuucuacgagccccagaucaucaccaccgacaacaccuucgugucuggcaacugcgacgucgugaucggcauugugaacaauaccguguacgacccucugcagcccgagcuggacagcuucaaagaggaacuggacaaguacuuuaagaaccacacaagccccgacguggaccugggcgauaucagcggaaucaaugccagcgucgugaacauccagaaagagaucgaccggcugaacgagguggccaagaaucugaacgagagccugaucgaccugcaagaacuggggaaguacgagcaguacaucaaguggcccugguacaucuggcugggcuuuaucgccggacugauugccaucgugauggucacaaucaugcuguguugcaugaccagcugcuguagcugccugaagggcuguuguagcuguggcagcugcugcaaguucgacgaggacgauucugagcccgugcugaagggcgugaaacugcacuacacauga

SEQ ID NO: 23065 - RNA, 3816 nt, Artificial Sequence
  SARS-CoV-2/Wuhan/WIV05/2019__EPI_ISL_402128 spike protein CDS gc mod (1-1273)(H69del_V70del_D614G)
auguucguguuccuggugcugcugccucugguguccagccagugugugaaccugaccaccagaacacagcugccuccagccuacaccaacagcuuuaccagaggcguguacuaccccgacaagguguucagauccagcgugcugcacucuacccaggaccuguuccugccuuucuucagcaacgugaccugguuccacgccaucuccggcaccaauggcaccaagagauucgacaaccccgugcugcccuucaacgacgggguguacuuugccagcaccgagaaguccaacaucaucagaggcuggaucuucggcaccacacuggacagcaagacccagagccugcugaucgugaacaacgccaccaacguggucaucaaagugugcgaguuccaguucugcaacgaccccuuccugggcgucuacuaccacaagaacaacaagagcuggauggaaagcgaguuccggguguacagcagcgccaacaacugcaccuucgaguacgugucccagccuuuccugauggaccuggaaggcaagcagggcaacuucaagaaccugcgcgaguucguguuuaagaacaucgacggcuacuucaagaucuacagcaagcacaccccuaucaaccucgugcgggaucugccucagggcuucucugcucuggaaccccugguggaucugcccaucggcaucaacaucacccgguuucagacacugcuggcccugcacagaagcuaccugacaccuggcgauagcagcagcggauggacagcuggugccgccgcuuacuaugugggcuaccugcagccuagaaccuuccugcugaaguacaacgagaacggcaccaucaccgacgccguggauugugcucuggauccucugagcgagacaaagugcacccugaaguccuucaccguggaaaagggcaucuaccagaccagcaacuuccgggugcagcccaccgaauccaucgugcgguuccccaauaucaccaaucugugccccuucggcgagguguucaaugccaccagauucgccucuguguacgccuggaaccggaagcggaucagcaauugcguggccgacuacuccgugcuguacaacuccgccagcuucagcaccuucaagugcuacggcguguccccuaccaagcugaacgaccugugcuucacaaacguguacgccgacagcuucgugauccggggagaugaagugcggcagauugccccuggacagacaggcaagaucgccgacuacaacuacaagcugcccgacgacuucaccggcugugugauugccuggaacagcaacaaccuggacuccaaagucggcggcaacuacaauuaccuguaccggcuguuccggaaguccaaucugaagcccuucgagcgggacaucuccaccgagaucuaucaggccggcagcaccccuuguaacggcguggaaggcuucaacugcuacuucccacugcaguccuacggcuuucagcccacaaauggcgugggcuaucagcccuacagagugguggugcugagcuucgaacugcugcaugccccugccacagugugcggcccuaagaaaagcaccaaucucgugaagaacaaaugcgugaacuucaacuucaacggccugaccggcaccggcgugcugacagagagcaacaagaaguuccugccauuccagcaguuuggccgggauaucgccgauaccacagacgccguuagagauccccagacacuggaaauccuggacaucaccccuugcagcuucggcggagugucugugaucaccccuggcaccaacaccagcaaucagguggcagugcuguaccagggcgugaacuguaccgaagugcccguggccauucacgccgaucagcugacaccuacauggcggguguacuccaccggcagcaauguguuucagaccagagccggcugucugaucggagccgagcacgugaacaauagcuacgagugcgacauccccaucggcgcuggaaucugcgccagcuaccagacacagacaaacagcccucggagagccagaagcguggccagccagagcaucauugccuacacaaugucucugggcgccgagaacagcguggccuacuccaacaacucuaucgcuauccccaccaacuucaccaucagcgugaccacagagauccugccuguguccaugaccaagaccagcguggacugcaccauguacaucugcggcgauuccaccgagugcuccaaccugcugcugcaguacggcagcuucugcacccagcugaauagagcccugacagggaucgccguggaacaggacaagaacacccaagagguguucgcccaagugaagcagaucuacaagaccccuccuaucaaggacuucggcggcuucaauuucagccagauucugcccgauccuagcaagcccagcaagcggagcuucaucgaggaccugcuguucaacaaagugacacuggccgacgccggcuucaucaagcaguauggcgauugucugggcgacauugccgccagggaucugauuugcgcccagaaguuuaacggacugacagugcugccuccucugcugaccgaugagaugaucgcccaguacacaucugcccugcuggccggcacaaucacaagcggcuggacauuuggagcaggcgccgcucugcagauccccuuugcuaugcagauggccuaccgguucaacggcaucggagugacccagaaugugcuguacgagaaccagaagcugaucgccaaccaguucaacagcgccaucggcaagauccaggacagccugagcagcacagcaagcgcccugggaaagcugcaggacguggucaaccagaaugcccaggcacugaacacccuggucaagcagcuguccuccaacuucggcgccaucagcucugugcugaacgauauccugagcagacuggacaaggucgaggccgaggugcagaucgacagacugaucacaggcagacugcagagccuccagacauacgugacccagcagcugaucagagccgccgagauuagagccucugccaaucuggccgccaccaagaugucugagugugugcugggccagagcaagagaguggacuuuugcggcaagggcuaccaccugaugagcuucccucagucugccccucacggcgugguguuucugcacgugacauaugugcccgcucaagagaagaauuucaccaccgcuccagccaucugccacgacggcaaagcccacuuuccuagagaaggcguguucguguccaacggcacccauugguucgugacacagcggaacuucuacgagccccagaucaucaccaccgacaacaccuucgugucuggcaacugcgacgucgugaucggcauugugaacaauaccguguacgacccucugcagcccgagcuggacagcuucaaagaggaacuggacaaguacuuuaagaaccacacaagccccgacguggaccugggcgauaucagcggaaucaaugccagcgucgugaacauccagaaagagaucgaccggcugaacgagguggccaagaaucugaacgagagccugaucgaccugcaagaacuggggaaguacgagcaguacaucaaguggcccugguacaucuggcugggcuuuaucgccggacugauugccaucgugauggucacaaucaugcuguguugcaugaccagcugcuguagcugccugaagggcuguuguagcuguggcagcugcugcaaguucgacgaggacgauucugagcccgugcugaagggcgugaaacugcacuacacauga

SEQ ID NO: 23066 - RNA, 3822 nt, Artificial Sequence
  SARS-CoV-2/Wuhan/WIV05/2019__EPI_ISL_402128 spike protein CDS gc mod (1-1273)(Y453F_D614G)
auguucguguuccuggugcugcugccucugguguccagccagugugugaaccugaccaccagaacacagcugccuccagccuacaccaacagcuuuaccagaggcguguacuaccccgacaagguguucagauccagcgugcugcacucuacccaggaccuguuccugccuuucuucagcaacgugaccugguuccacgccauccacguguccggcaccaauggcaccaagagauucgacaaccccgugcugcccuucaacgacgggguguacuuugccagcaccgagaaguccaacaucaucagaggcuggaucuucggcaccacacuggacagcaagacccagagccugcugaucgugaacaacgccaccaacguggucaucaaagugugcgaguuccaguucugcaacgaccccuuccugggcgucuacuaccacaagaacaacaagagcuggauggaaagcgaguuccggguguacagcagcgccaacaacugcaccuucgaguacgugucccagccuuuccugauggaccuggaaggcaagcagggcaacuucaagaaccugcgcgaguucguguuuaagaacaucgacggcuacuucaagaucuacagcaagcacaccccuaucaaccucgugcgggaucugccucagggcuucucugcucuggaaccccugguggaucugcccaucggcaucaacaucacccgguuucagacacugcuggcccugcacagaagcuaccugacaccuggcgauagcagcagcggauggacagcuggugccgccgcuuacuaugugggcuaccugcagccuagaaccuuccugcugaaguacaacgagaacggcaccaucaccgacgccguggauugugcucuggauccucugagcgagacaaagugcacccugaaguccuucaccguggaaaagggcaucuaccagaccagcaacuuccgggugcagcccaccgaauccaucgugcgguuccccaauaucaccaaucugugccccuucggcgagguguucaaugccaccagauucgccucuguguacgccuggaaccggaagcggaucagcaauugcguggccgacuacuccgugcuguacaacuccgccagcuucagcaccuucaagugcuacggcguguccccuaccaagcugaacgaccugugcuucacaaacguguacgccgacagcuucgugauccggggagaugaagugcggcagauugccccuggacagacaggcaagaucgccgacuacaacuacaagcugcccgacgacuucaccggcugugugauugccuggaacagcaacaaccuggacuccaaagucggcggcaacuacaauuaccuguuccggcuguuccggaaguccaaucugaagcccuucgagcgggacaucuccaccgagaucuaucaggccggcagcaccccuuguaacggcguggaaggcuucaacugcuacuucccacugcaguccuacggcuuucagcccacaaauggcgugggcuaucagcccuacagagugguggugcugagcuucgaacugcugcaugccccugccacagugugcggcccuaagaaaagcaccaaucucgugaagaacaaaugcgugaacuucaacuucaacggccugaccggcaccggcgugcugacagagagcaacaagaaguuccugccauuccagcaguuuggccgggauaucgccgauaccacagacgccguuagagauccccagacacuggaaauccuggacaucaccccuugcagcuucggcggagugucugugaucaccccuggcaccaacaccagcaaucagguggcagugcuguaccagggcgugaacuguaccgaagugcccguggccauucacgccgaucagcugacaccuacauggcggguguacuccaccggcagcaauguguuucagaccagagccggcugucugaucggagccgagcacgugaacaauagcuacgagugcgacauccccaucggcgcuggaaucugcgccagcuaccagacacagacaaacagcccucggagagccagaagcguggccagccagagcaucauugccuacacaaugucucugggcgccgagaacagcguggccuacuccaacaacucuaucgcuauccccaccaacuucaccaucagcgugaccacagagauccugccuguguccaugaccaagaccagcguggacugcaccauguacaucugcggcgauuccaccgagugcuccaaccugcugcugcaguacggcagcuucugcacccagcugaauagagcccugacagggaucgccguggaacaggacaagaacacccaagagguguucgcccaagugaagcagaucuacaagaccccuccuaucaaggacuucggcggcuucaauuucagccagauucugcccgauccuagcaagcccagcaagcggagcuucaucgaggaccugcuguucaacaaagugacacuggccgacgccggcuucaucaagcaguauggcgauugucugggcgacauugccgccagggaucugauuugcgcccagaaguuuaacggacugacagugcugccuccucugcugaccgaugagaugaucgcccaguacacaucugcccugcuggccggcacaaucacaagcggcuggacauuuggagcaggcgccgcucugcagauccccuuugcuaugcagauggccuaccgguucaacggcaucggagugacccagaaugugcuguacgagaaccagaagcugaucgccaaccaguucaacagcgccaucggcaagauccaggacagccugagcagcacagcaagcgcccugggaaagcugcaggacguggucaaccagaaugcccaggcacugaacacccuggucaagcagcuguccuccaacuucggcgccaucagcucugugcugaacgauauccugagcagacuggacaaggucgaggccgaggugcagaucgacagacugaucacaggcagacugcagagccuccagacauacgugacccagcagcugaucagagccgccgagauuagagccucugccaaucuggccgccaccaagaugucugagugugugcugggccagagcaagagaguggacuuuugcggcaagggcuaccaccugaugagcuucccucagucugccccucacggcgugguguuucugcacgugacauaugugcccgcucaagagaagaauuucaccaccgcuccagccaucugccacgacggcaaagcccacuuuccuagagaaggcguguucguguccaacggcacccauugguucgugacacagcggaacuucuacgagccccagaucaucaccaccgacaacaccuucgugucuggcaacugcgacgucgugaucggcauugugaacaauaccguguacgacccucugcagcccgagcuggacagcuucaaagaggaacuggacaaguacuuuaagaaccacacaagccccgacguggaccugggcgauaucagcggaaucaaugccagcgucgugaacauccagaaagagaucgaccggcugaacgagguggccaagaaucugaacgagagccugaucgaccugcaagaacuggggaaguacgagcaguacaucaaguggcccugguacaucuggcugggcuuuaucgccggacugauugccaucgugauggucacaaucaugcuguguugcaugaccagcugcuguagcugccugaagggcuguuguagcuguggcagcugcugcaaguucgacgaggacgauucugagcccgugcugaagggcgugaaacugcacuacacauga

SEQ ID NO: 23067 - RNA, 3822 nt, Artificial Sequence
  SARS-CoV-2/Wuhan/WIV05/2019__EPI_ISL_402128 spike protein CDS gc mod (1-1273)(D614G_I692V)
auguucguguuccuggugcugcugccucugguguccagccagugugugaaccugaccaccagaacacagcugccuccagccuacaccaacagcuuuaccagaggcguguacuaccccgacaagguguucagauccagcgugcugcacucuacccaggaccuguuccugccuuucuucagcaacgugaccugguuccacgccauccacguguccggcaccaauggcaccaagagauucgacaaccccgugcugcccuucaacgacgggguguacuuugccagcaccgagaaguccaacaucaucagaggcuggaucuucggcaccacacuggacagcaagacccagagccugcugaucgugaacaacgccaccaacguggucaucaaagugugcgaguuccaguucugcaacgaccccuuccugggcgucuacuaccacaagaacaacaagagcuggauggaaagcgaguuccggguguacagcagcgccaacaacugcaccuucgaguacgugucccagccuuuccugauggaccuggaaggcaagcagggcaacuucaagaaccugcgcgaguucguguuuaagaacaucgacggcuacuucaagaucuacagcaagcacaccccuaucaaccucgugcgggaucugccucagggcuucucugcucuggaaccccugguggaucugcccaucggcaucaacaucacccgguuucagacacugcuggcccugcacagaagcuaccugacaccuggcgauagcagcagcggauggacagcuggugccgccgcuuacuaugugggcuaccugcagccuagaaccuuccugcugaaguacaacgagaacggcaccaucaccgacgccguggauugugcucuggauccucugagcgagacaaagugcacccugaaguccuucaccguggaaaagggcaucuaccagaccagcaacuuccgggugcagcccaccgaauccaucgugcgguuccccaauaucaccaaucugugccccuucggcgagguguucaaugccaccagauucgccucuguguacgccuggaaccggaagcggaucagcaauugcguggccgacuacuccgugcuguacaacuccgccagcuucagcaccuucaagugcuacggcguguccccuaccaagcugaacgaccugugcuucacaaacguguacgccgacagcuucgugauccggggagaugaagugcggcagauugccccuggacagacaggcaagaucgccgacuacaacuacaagcugcccgacgacuucaccggcugugugauugccuggaacagcaacaaccuggacuccaaagucggcggcaacuacaauuaccuguaccggcuguuccggaaguccaaucugaagcccuucgagcgggacaucuccaccgagaucuaucaggccggcagcaccccuuguaacggcguggaaggcuucaacugcuacuucccacugcaguccuacggcuuucagcccacaaauggcgugggcuaucagcccuacagagugguggugcugagcuucgaacugcugcaugccccugccacagugugcggcccuaagaaaagcaccaaucucgugaagaacaaaugcgugaacuucaacuucaacggccugaccggcaccggcgugcugacagagagcaacaagaaguuccugccauuccagcaguuuggccgggauaucgccgauaccacagacgccguuagagauccccagacacuggaaauccuggacaucaccccuugcagcuucggcggagugucugugaucaccccuggcaccaacaccagcaaucagguggcagugcuguaccagggcgugaacuguaccgaagugcccguggccauucacgccgaucagcugacaccuacauggcggguguacuccaccggcagcaauguguuucagaccagagccggcugucugaucggagccgagcacgugaacaauagcuacgagugcgacauccccaucggcgcuggaaucugcgccagcuaccagacacagacaaacagcccucggagagccagaagcguggccagccagagcgugauugccuacacaaugucucugggcgccgagaacagcguggccuacuccaacaacucuaucgcuauccccaccaacuucaccaucagcgugaccacagagauccugccuguguccaugaccaagaccagcguggacugcaccauguacaucugcggcgauuccaccgagugcuccaaccugcugcugcaguacggcagcuucugcacccagcugaauagagcccugacagggaucgccguggaacaggacaagaacacccaagagguguucgcccaagugaagcagaucuacaagaccccuccuaucaaggacuucggcggcuucaauuucagccagauucugcccgauccuagcaagcccagcaagcggagcuucaucgaggaccugcuguucaacaaagugacacuggccgacgccggcuucaucaagcaguauggcgauugucugggcgacauugccgccagggaucugauuugcgcccagaaguuuaacggacugacagugcugccuccucugcugaccgaugagaugaucgcccaguacacaucugcccugcuggccggcacaaucacaagcggcuggacauuuggagcaggcgccgcucugcagauccccuuugcuaugcagauggccuaccgguucaacggcaucggagugacccagaaugugcuguacgagaaccagaagcugaucgccaaccaguucaacagcgccaucggcaagauccaggacagccugagcagcacagcaagcgcccugggaaagcugcaggacguggucaaccagaaugcccaggcacugaacacccuggucaagcagcuguccuccaacuucggcgccaucagcucugugcugaacgauauccugagcagacuggacaaggucgaggccgaggugcagaucgacagacugaucacaggcagacugcagagccuccagacauacgugacccagcagcugaucagagccgccgagauuagagccucugccaaucuggccgccaccaagaugucugagugugugcugggccagagcaagagaguggacuuuugcggcaagggcuaccaccugaugagcuucccucagucugccccucacggcgugguguuucugcacgugacauaugugcccgcucaagagaagaauuucaccaccgcuccagccaucugccacgacggcaaagcccacuuuccuagagaaggcguguucguguccaacggcacccauugguucgugacacagcggaacuucuacgagccccagaucaucaccaccgacaacaccuucgugucuggcaacugcgacgucgugaucggcauugugaacaauaccguguacgacccucugcagcccgagcuggacagcuucaaagaggaacuggacaaguacuuuaagaaccacacaagccccgacguggaccugggcgauaucagcggaaucaaugccagcgucgugaacauccagaaagagaucgaccggcugaacgagguggccaagaaucugaacgagagccugaucgaccugcaagaacuggggaaguacgagcaguacaucaaguggcccugguacaucuggcugggcuuuaucgccggacugauugccaucgugauggucacaaucaugcuguguugcaugaccagcugcuguagcugccugaagggcuguuguagcuguggcagcugcugcaaguucgacgaggacgauucugagcccgugcugaagggcgugaaacugcacuacacauga

SEQ ID NO: 23068 - RNA, 3822 nt, Artificial Sequence
  SARS-CoV-2/Wuhan/WIV05/2019__EPI_ISL_402128 spike protein CDS gc mod (1-1273)(D614G_M1229I)
auguucguguuccuggugcugcugccucugguguccagccagugugugaaccugaccaccagaacacagcugccuccagccuacaccaacagcuuuaccagaggcguguacuaccccgacaagguguucagauccagcgugcugcacucuacccaggaccuguuccugccuuucuucagcaacgugaccugguuccacgccauccacguguccggcaccaauggcaccaagagauucgacaaccccgugcugcccuucaacgacgggguguacuuugccagcaccgagaaguccaacaucaucagaggcuggaucuucggcaccacacuggacagcaagacccagagccugcugaucgugaacaacgccaccaacguggucaucaaagugugcgaguuccaguucugcaacgaccccuuccugggcgucuacuaccacaagaacaacaagagcuggauggaaagcgaguuccggguguacagcagcgccaacaacugcaccuucgaguacgugucccagccuuuccugauggaccuggaaggcaagcagggcaacuucaagaaccugcgcgaguucguguuuaagaacaucgacggcuacuucaagaucuacagcaagcacaccccuaucaaccucgugcgggaucugccucagggcuucucugcucuggaaccccugguggaucugcccaucggcaucaacaucacccgguuucagacacugcuggcccugcacagaagcuaccugacaccuggcgauagcagcagcggauggacagcuggugccgccgcuuacuaugugggcuaccugcagccuagaaccuuccugcugaaguacaacgagaacggcaccaucaccgacgccguggauugugcucuggauccucugagcgagacaaagugcacccugaaguccuucaccguggaaaagggcaucuaccagaccagcaacuuccgggugcagcccaccgaauccaucgugcgguuccccaauaucaccaaucugugccccuucggcgagguguucaaugccaccagauucgccucuguguacgccuggaaccggaagcggaucagcaauugcguggccgacuacuccgugcuguacaacuccgccagcuucagcaccuucaagugcuacggcguguccccuaccaagcugaacgaccugugcuucacaaacguguacgccgacagcuucgugauccggggagaugaagugcggcagauugccccuggacagacaggcaagaucgccgacuacaacuacaagcugcccgacgacuucaccggcugugugauugccuggaacagcaacaaccuggacuccaaagucggcggcaacuacaauuaccuguaccggcuguuccggaaguccaaucugaagcccuucgagcgggacaucuccaccgagaucuaucaggccggcagcaccccuuguaacggcguggaaggcuucaacugcuacuucccacugcaguccuacggcuuucagcccacaaauggcgugggcuaucagcccuacagagugguggugcugagcuucgaacugcugcaugccccugccacagugugcggcccuaagaaaagcaccaaucucgugaagaacaaaugcgugaacuucaacuucaacggccugaccggcaccggcgugcugacagagagcaacaagaaguuccugccauuccagcaguuuggccgggauaucgccgauaccacagacgccguuagagauccccagacacuggaaauccuggacaucaccccuugcagcuucggcggagugucugugaucaccccuggcaccaacaccagcaaucagguggcagugcuguaccagggcgugaacuguaccgaagugcccguggccauucacgccgaucagcugacaccuacauggcggguguacuccaccggcagcaauguguuucagaccagagccggcugucugaucggagccgagcacgugaacaauagcuacgagugcgacauccccaucggcgcuggaaucugcgccagcuaccagacacagacaaacagcccucggagagccagaagcguggccagccagagcaucauugccuacacaaugucucugggcgccgagaacagcguggccuacuccaacaacucuaucgcuauccccaccaacuucaccaucagcgugaccacagagauccugccuguguccaugaccaagaccagcguggacugcaccauguacaucugcggcgauuccaccgagugcuccaaccugcugcugcaguacggcagcuucugcacccagcugaauagagcccugacagggaucgccguggaacaggacaagaacacccaagagguguucgcccaagugaagcagaucuacaagaccccuccuaucaaggacuucggcggcuucaauuucagccagauucugcccgauccuagcaagcccagcaagcggagcuucaucgaggaccugcuguucaacaaagugacacuggccgacgccggcuucaucaagcaguauggcgauugucugggcgacauugccgccagggaucugauuugcgcccagaaguuuaacggacugacagugcugccuccucugcugaccgaugagaugaucgcccaguacacaucugcccugcuggccggcacaaucacaagcggcuggacauuuggagcaggcgccgcucugcagauccccuuugcuaugcagauggccuaccgguucaacggcaucggagugacccagaaugugcuguacgagaaccagaagcugaucgccaaccaguucaacagcgccaucggcaagauccaggacagccugagcagcacagcaagcgcccugggaaagcugcaggacguggucaaccagaaugcccaggcacugaacacccuggucaagcagcuguccuccaacuucggcgccaucagcucugugcugaacgauauccugagcagacuggacaaggucgaggccgaggugcagaucgacagacugaucacaggcagacugcagagccuccagacauacgugacccagcagcugaucagagccgccgagauuagagccucugccaaucuggccgccaccaagaugucugagugugugcugggccagagcaagagaguggacuuuugcggcaagggcuaccaccugaugagcuucccucagucugccccucacggcgugguguuucugcacgugacauaugugcccgcucaagagaagaauuucaccaccgcuccagccaucugccacgacggcaaagcccacuuuccuagagaaggcguguucguguccaacggcacccauugguucgugacacagcggaacuucuacgagccccagaucaucaccaccgacaacaccuucgugucuggcaacugcgacgucgugaucggcauugugaacaauaccguguacgacccucugcagcccgagcuggacagcuucaaagaggaacuggacaaguacuuuaagaaccacacaagccccgacguggaccugggcgauaucagcggaaucaaugccagcgucgugaacauccagaaagagaucgaccggcugaacgagguggccaagaaucugaacgagagccugaucgaccugcaagaacuggggaaguacgagcaguacaucaaguggcccugguacaucuggcugggcuuuaucgccggacugauugccaucgugaucgucacaaucaugcuguguugcaugaccagcugcuguagcugccugaagggcuguuguagcuguggcagcugcugcaaguucgacgaggacgauucugagcccgugcugaagggcgugaaacugcacuacacauga

SEQ ID NO: 23069 - RNA, 3816 nt, Artificial Sequence
  SARS-CoV-2/Wuhan/WIV05/2019__EPI_ISL_402128 spike protein CDS gc mod (1-1273)(H69del_V70del_A222V_Y453F_S477N_D614G_I692V)
auguucguguuccuggugcugcugccucugguguccagccagugugugaaccugaccaccagaacacagcugccuccagccuacaccaacagcuuuaccagaggcguguacuaccccgacaagguguucagauccagcgugcugcacucuacccaggaccuguuccugccuuucuucagcaacgugaccugguuccacgccaucuccggcaccaauggcaccaagagauucgacaaccccgugcugcccuucaacgacgggguguacuuugccagcaccgagaaguccaacaucaucagaggcuggaucuucggcaccacacuggacagcaagacccagagccugcugaucgugaacaacgccaccaacguggucaucaaagugugcgaguuccaguucugcaacgaccccuuccugggcgucuacuaccacaagaacaacaagagcuggauggaaagcgaguuccggguguacagcagcgccaacaacugcaccuucgaguacgugucccagccuuuccugauggaccuggaaggcaagcagggcaacuucaagaaccugcgcgaguucguguuuaagaacaucgacggcuacuucaagaucuacagcaagcacaccccuaucaaccucgugcgggaucugccucagggcuucucugugcuggaaccccugguggaucugcccaucggcaucaacaucacccgguuucagacacugcuggcccugcacagaagcuaccugacaccuggcgauagcagcagcggauggacagcuggugccgccgcuuacuaugugggcuaccugcagccuagaaccuuccugcugaaguacaacgagaacggcaccaucaccgacgccguggauugugcucuggauccucugagcgagacaaagugcacccugaaguccuucaccguggaaaagggcaucuaccagaccagcaacuuccgggugcagcccaccgaauccaucgugcgguuccccaauaucaccaaucugugccccuucggcgagguguucaaugccaccagauucgccucuguguacgccuggaaccggaagcggaucagcaauugcguggccgacuacuccgugcuguacaacuccgccagcuucagcaccuucaagugcuacggcguguccccuaccaagcugaacgaccugugcuucacaaacguguacgccgacagcuucgugauccggggagaugaagugcggcagauugccccuggacagacaggcaagaucgccgacuacaacuacaagcugcccgacgacuucaccggcugugugauugccuggaacagcaacaaccuggacuccaaagucggcggcaacuacaauuaccuguuccggcuguuccggaaguccaaucugaagcccuucgagcgggacaucuccaccgagaucuaucaggccggcaacaccccuuguaacggcguggaaggcuucaacugcuacuucccacugcaguccuacggcuuucagcccacaaauggcgugggcuaucagcccuacagagugguggugcugagcuucgaacugcugcaugccccugccacagugugcggcccuaagaaaagcaccaaucucgugaagaacaaaugcgugaacuucaacuucaacggccugaccggcaccggcgugcugacagagagcaacaagaaguuccugccauuccagcaguuuggccgggauaucgccgauaccacagacgccguuagagauccccagacacuggaaauccuggacaucaccccuugcagcuucggcggagugucugugaucaccccuggcaccaacaccagcaaucagguggcagugcuguaccagggcgugaacuguaccgaagugcccguggccauucacgccgaucagcugacaccuacauggcggguguacuccaccggcagcaauguguuucagaccagagccggcugucugaucggagccgagcacgugaacaauagcuacgagugcgacauccccaucggcgcuggaaucugcgccagcuaccagacacagacaaacagcccucggagagccagaagcguggccagccagagcgugauugccuacacaaugucucugggcgccgagaacagcguggccuacuccaacaacucuaucgcuauccccaccaacuucaccaucagcgugaccacagagauccugccuguguccaugaccaagaccagcguggacugcaccauguacaucugcggcgauuccaccgagugcuccaaccugcugcugcaguacggcagcuucugcacccagcugaauagagcccugacagggaucgccguggaacaggacaagaacacccaagagguguucgcccaagugaagcagaucuacaagaccccuccuaucaaggacuucggcggcuucaauuucagccagauucugcccgauccuagcaagcccagcaagcggagcuucaucgaggaccugcuguucaacaaagugacacuggccgacgccggcuucaucaagcaguauggcgauugucugggcgacauugccgccagggaucugauuugcgcccagaaguuuaacggacugacagugcugccuccucugcugaccgaugagaugaucgcccaguacacaucugcccugcuggccggcacaaucacaagcggcuggacauuuggagcaggcgccgcucugcagauccccuuugcuaugcagauggccuaccgguucaacggcaucggagugacccagaaugugcuguacgagaaccagaagcugaucgccaaccaguucaacagcgccaucggcaagauccaggacagccugagcagcacagcaagcgcccugggaaagcugcaggacguggucaaccagaaugcccaggcacugaacacccuggucaagcagcuguccuccaacuucggcgccaucagcucugugcugaacgauauccugagcagacuggacaaggucgaggccgaggugcagaucgacagacugaucacaggcagacugcagagccuccagacauacgugacccagcagcugaucagagccgccgagauuagagccucugccaaucuggccgccaccaagaugucugagugugugcugggccagagcaagagaguggacuuuugcggcaagggcuaccaccugaugagcuucccucagucugccccucacggcgugguguuucugcacgugacauaugugcccgcucaagagaagaauuucaccaccgcuccagccaucugccacgacggcaaagcccacuuuccuagagaaggcguguucguguccaacggcacccauugguucgugacacagcggaacuucuacgagccccagaucaucaccaccgacaacaccuucgugucuggcaacugcgacgucgugaucggcauugugaacaauaccguguacgacccucugcagcccgagcuggacagcuucaaagaggaacuggacaaguacuuuaagaaccacacaagccccgacguggaccugggcgauaucagcggaaucaaugccagcgucgugaacauccagaaagagaucgaccggcugaacgagguggccaagaaucugaacgagagccugaucgaccugcaagaacuggggaaguacgagcaguacaucaaguggcccugguacaucuggcugggcuuuaucgccggacugauugccaucgugauggucacaaucaugcuguguugcaugaccagcugcuguagcugccugaagggcuguuguagcuguggcagcugcugcaaguucgacgaggacgauucugagcccgugcugaagggcgugaaacugcacuacacauga

SEQ ID NO: 23070 - RNA, 3816 nt, Artificial Sequence
  SARS-CoV-2/Wuhan/WIV05/2019__EPI_ISL_402128 spike protein CDS gc mod (1-1273)(H69del_V70del_Y453F_D614G_I692V_M1229I)
auguucguguuccuggugcugcugccucugguguccagccagugugugaaccugaccaccagaacacagcugccuccagccuacaccaacagcuuuaccagaggcguguacuaccccgacaagguguucagauccagcgugcugcacucuacccaggaccuguuccugccuuucuucagcaacgugaccugguuccacgccaucuccggcaccaauggcaccaagagauucgacaaccccgugcugcccuucaacgacgggguguacuuugccagcaccgagaaguccaacaucaucagaggcuggaucuucggcaccacacuggacagcaagacccagagccugcugaucgugaacaacgccaccaacguggucaucaaagugugcgaguuccaguucugcaacgaccccuuccugggcgucuacuaccacaagaacaacaagagcuggauggaaagcgaguuccggguguacagcagcgccaacaacugcaccuucgaguacgugucccagccuuuccugauggaccuggaaggcaagcagggcaacuucaagaaccugcgcgaguucguguuuaagaacaucgacggcuacuucaagaucuacagcaagcacaccccuaucaaccucgugcgggaucugccucagggcuucucugcucuggaaccccugguggaucugcccaucggcaucaacaucacccgguuucagacacugcuggcccugcacagaagcuaccugacaccuggcgauagcagcagcggauggacagcuggugccgccgcuuacuaugugggcuaccugcagccuagaaccuuccugcugaaguacaacgagaacggcaccaucaccgacgccguggauugugcucuggauccucugagcgagacaaagugcacccugaaguccuucaccguggaaaagggcaucuaccagaccagcaacuuccgggugcagcccaccgaauccaucgugcgguuccccaauaucaccaaucugugccccuucggcgagguguucaaugccaccagauucgccucuguguacgccuggaaccggaagcggaucagcaauugcguggccgacuacuccgugcuguacaacuccgccagcuucagcaccuucaagugcuacggcguguccccuaccaagcugaacgaccugugcuucacaaacguguacgccgacagcuucgugauccggggagaugaagugcggcagauugccccuggacagacaggcaagaucgccgacuacaacuacaagcugcccgacgacuucaccggcugugugauugccuggaacagcaacaaccuggacuccaaagucggcggcaacuacaauuaccuguuccggcuguuccggaaguccaaucugaagcccuucgagcgggacaucuccaccgagaucuaucaggccggcagcaccccuuguaacggcguggaaggcuucaacugcuacuucccacugcaguccuacggcuuucagcccacaaauggcgugggcuaucagcccuacagagugguggugcugagcuucgaacugcugcaugccccugccacagugugcggcccuaagaaaagcaccaaucucgugaagaacaaaugcgugaacuucaacuucaacggccugaccggcaccggcgugcugacagagagcaacaagaaguuccugccauuccagcaguuuggccgggauaucgccgauaccacagacgccguuagagauccccagacacuggaaauccuggacaucaccccuugcagcuucggcggagugucugugaucaccccuggcaccaacaccagcaaucagguggcagugcuguaccagggcgugaacuguaccgaagugcccguggccauucacgccgaucagcugacaccuacauggcggguguacuccaccggcagcaauguguuucagaccagagccggcugucugaucggagccgagcacgugaacaauagcuacgagugcgacauccccaucggcgcuggaaucugcgccagcuaccagacacagacaaacagcccucggagagccagaagcguggccagccagagcgugauugccuacacaaugucucugggcgccgagaacagcguggccuacuccaacaacucuaucgcuauccccaccaacuucaccaucagcgugaccacagagauccugccuguguccaugaccaagaccagcguggacugcaccauguacaucugcggcgauuccaccgagugcuccaaccugcugcugcaguacggcagcuucugcacccagcugaauagagcccugacagggaucgccguggaacaggacaagaacacccaagagguguucgcccaagugaagcagaucuacaagaccccuccuaucaaggacuucggcggcuucaauuucagccagauucugcccgauccuagcaagcccagcaagcggagcuucaucgaggaccugcuguucaacaaagugacacuggccgacgccggcuucaucaagcaguauggcgauugucugggcgacauugccgccagggaucugauuugcgcccagaaguuuaacggacugacagugcugccuccucugcugaccgaugagaugaucgcccaguacacaucugcccugcuggccggcacaaucacaagcggcuggacauuuggagcaggcgccgcucugcagauccccuuugcuaugcagauggccuaccgguucaacggcaucggagugacccagaaugugcuguacgagaaccagaagcugaucgccaaccaguucaacagcgccaucggcaagauccaggacagccugagcagcacagcaagcgcccugggaaagcugcaggacguggucaaccagaaugcccaggcacugaacacccuggucaagcagcuguccuccaacuucggcgccaucagcucugugcugaacgauauccugagcagacuggacaaggucgaggccgaggugcagaucgacagacugaucacaggcagacugcagagccuccagacauacgugacccagcagcugaucagagccgccgagauuagagccucugccaaucuggccgccaccaagaugucugagugugugcugggccagagcaagagaguggacuuuugcggcaagggcuaccaccugaugagcuucccucagucugccccucacggcgugguguuucugcacgugacauaugugcccgcucaagagaagaauuucaccaccgcuccagccaucugccacgacggcaaagcccacuuuccuagagaaggcguguucguguccaacggcacccauugguucgugacacagcggaacuucuacgagccccagaucaucaccaccgacaacaccuucgugucuggcaacugcgacgucgugaucggcauugugaacaauaccguguacgacccucugcagcccgagcuggacagcuucaaagaggaacuggacaaguacuuuaagaaccacacaagccccgacguggaccugggcgauaucagcggaaucaaugccagcgucgugaacauccagaaagagaucgaccggcugaacgagguggccaagaaucugaacgagagccugaucgaccugcaagaacuggggaaguacgagcaguacaucaaguggcccugguacaucuggcugggcuuuaucgccggacugauugccaucgugaucgucacaaucaugcuguguugcaugaccagcugcuguagcugccugaagggcuguuguagcuguggcagcugcugcaaguucgacgaggacgauucugagcccgugcugaagggcgugaaacugcacuacacauga

SEQ ID NO: 23071 - RNA, 3813 nt, Artificial Sequence
  SARS-CoV-2/Wuhan/WIV05/2019__EPI_ISL_402128 spike protein CDS gc mod (1-1273)(H69del_V70del_Y144del_N501Y_A570D_D614G_P681H_T716I_S982 A_D1118H)
auguucguguuccuggugcugcugccucugguguccagccagugugugaaccugaccaccagaacacagcugccuccagccuacaccaacagcuuuaccagaggcguguacuaccccgacaagguguucagauccagcgugcugcacucuacccaggaccuguuccugccuuucuucagcaacgugaccugguuccacgccaucuccggcaccaauggcaccaagagauucgacaaccccgugcugcccuucaacgacgggguguacuuugccagcaccgagaaguccaacaucaucagaggcuggaucuucggcaccacacuggacagcaagacccagagccugcugaucgugaacaacgccaccaacguggucaucaaagugugcgaguuccaguucugcaacgaccccuuccugggcgucuaccacaagaacaacaagagcuggauggaaagcgaguuccggguguacagcagcgccaacaacugcaccuucgaguacgugucccagccuuuccugauggaccuggaaggcaagcagggcaacuucaagaaccugcgcgaguucguguuuaagaacaucgacggcuacuucaagaucuacagcaagcacaccccuaucaaccucgugcgggaucugccucagggcuucucugcucuggaaccccugguggaucugcccaucggcaucaacaucacccgguuucagacacugcuggcccugcacagaagcuaccugacaccuggcgauagcagcagcggauggacagcuggugccgccgcuuacuaugugggcuaccugcagccuagaaccuuccugcugaaguacaacgagaacggcaccaucaccgacgccguggauugugcucuggauccucugagcgagacaaagugcacccugaaguccuucaccguggaaaagggcaucuaccagaccagcaacuuccgggugcagcccaccgaauccaucgugcgguuccccaauaucaccaaucugugccccuucggcgagguguucaaugccaccagauucgccucuguguacgccuggaaccggaagcggaucagcaauugcguggccgacuacuccgugcuguacaacuccgccagcuucagcaccuucaagugcuacggcguguccccuaccaagcugaacgaccugugcuucacaaacguguacgccgacagcuucgugauccggggagaugaagugcggcagauugccccuggacagacaggcaagaucgccgacuacaacuacaagcugcccgacgacuucaccggcugugugauugccuggaacagcaacaaccuggacuccaaagucggcggcaacuacaauuaccuguaccggcuguuccggaaguccaaucugaagcccuucgagcgggacaucuccaccgagaucuaucaggccggcagcaccccuuguaacggcguggaaggcuucaacugcuacuucccacugcaguccuacggcuuucagcccacauacggcgugggcuaucagcccuacagagugguggugcugagcuucgaacugcugcaugccccugccacagugugcggcccuaagaaaagcaccaaucucgugaagaacaaaugcgugaacuucaacuucaacggccugaccggcaccggcgugcugacagagagcaacaagaaguuccugccauuccagcaguuuggccgggauaucgacgauaccacagacgccguuagagauccccagacacuggaaauccuggacaucaccccuugcagcuucggcggagugucugugaucaccccuggcaccaacaccagcaaucagguggcagugcuguaccagggcgugaacuguaccgaagugcccguggccauucacgccgaucagcugacaccuacauggcggguguacuccaccggcagcaauguguuucagaccagagccggcugucugaucggagccgagcacgugaacaauagcuacgagugcgacauccccaucggcgcuggaaucugcgccagcuaccagacacagacaaacagccaccggagagccagaagcguggccagccagagcaucauugccuacacaaugucucugggcgccgagaacagcguggccuacuccaacaacucuaucgcuauccccaucaacuucaccaucagcgugaccacagagauccugccuguguccaugaccaagaccagcguggacugcaccauguacaucugcggcgauuccaccgagugcuccaaccugcugcugcaguacggcagcuucugcacccagcugaauagagcccugacagggaucgccguggaacaggacaagaacacccaagagguguucgcccaagugaagcagaucuacaagaccccuccuaucaaggacuucggcggcuucaauuucagccagauucugcccgauccuagcaagcccagcaagcggagcuucaucgaggaccugcuguucaacaaagugacacuggccgacgccggcuucaucaagcaguauggcgauugucugggcgacauugccgccagggaucugauuugcgcccagaaguuuaacggacugacagugcugccuccucugcugaccgaugagaugaucgcccaguacacaucugcccugcuggccggcacaaucacaagcggcuggacauuuggagcaggcgccgcucugcagauccccuuugcuaugcagauggccuaccgguucaacggcaucggagugacccagaaugugcuguacgagaaccagaagcugaucgccaaccaguucaacagcgccaucggcaagauccaggacagccugagcagcacagcaagcgcccugggaaagcugcaggacguggucaaccagaaugcccaggcacugaacacccuggucaagcagcuguccuccaacuucggcgccaucagcucugugcugaacgauauccuggccagacuggacaaggucgaggccgaggugcagaucgacagacugaucacaggcagacugcagagccuccagacauacgugacccagcagcugaucagagccgccgagauuagagccucugccaaucuggccgccaccaagaugucugagugugugcugggccagagcaagagaguggacuuuugcggcaagggcuaccaccugaugagcuucccucagucugccccucacggcgugguguuucugcacgugacauaugugcccgcucaagagaagaauuucaccaccgcuccagccaucugccacgacggcaaagcccacuuuccuagagaaggcguguucguguccaacggcacccauugguucgugacacagcggaacuucuacgagccccagaucaucaccacccacaacaccuucgugucuggcaacugcgacgucgugaucggcauugugaacaauaccguguacgacccucugcagcccgagcuggacagcuucaaagaggaacuggacaaguacuuuaagaaccacacaagccccgacguggaccugggcgauaucagcggaaucaaugccagcgucgugaacauccagaaagagaucgaccggcugaacgagguggccaagaaucugaacgagagccugaucgaccugcaagaacuggggaaguacgagcaguacaucaaguggcccugguacaucuggcugggcuuuaucgccggacugauugccaucgugauggucacaaucaugcuguguugcaugaccagcugcuguagcugccugaagggcuguuguagcuguggcagcugcugcaaguucgacgaggacgauucugagcccgugcugaagggcgugaaacugcacuacacauga

SEQ ID NO: 23072 - RNA, 3822 nt, Artificial Sequence
  SARS-CoV-2/Wuhan/WIV05/2019__EPI_ISL_402128 spike protein CDS gc mod (1-1273)(K417N_E484K_N501Y_D614G)
auguucguguuccuggugcugcugccucugguguccagccagugugugaaccugaccaccagaacacagcugccuccagccuacaccaacagcuuuaccagaggcguguacuaccccgacaagguguucagauccagcgugcugcacucuacccaggaccuguuccugccuuucuucagcaacgugaccugguuccacgccauccacguguccggcaccaauggcaccaagagauucgacaaccccgugcugcccuucaacgacgggguguacuuugccagcaccgagaaguccaacaucaucagaggcuggaucuucggcaccacacuggacagcaagacccagagccugcugaucgugaacaacgccaccaacguggucaucaaagugugcgaguuccaguucugcaacgaccccuuccugggcgucuacuaccacaagaacaacaagagcuggauggaaagcgaguuccggguguacagcagcgccaacaacugcaccuucgaguacgugucccagccuuuccugauggaccuggaaggcaagcagggcaacuucaagaaccugcgcgaguucguguuuaagaacaucgacggcuacuucaagaucuacagcaagcacaccccuaucaaccucgugcgggaucugccucagggcuucucugcucuggaaccccugguggaucugcccaucggcaucaacaucacccgguuucagacacugcuggcccugcacagaagcuaccugacaccuggcgauagcagcagcggauggacagcuggugccgccgcuuacuaugugggcuaccugcagccuagaaccuuccugcugaaguacaacgagaacggcaccaucaccgacgccguggauugugcucuggauccucugagcgagacaaagugcacccugaaguccuucaccguggaaaagggcaucuaccagaccagcaacuuccgggugcagcccaccgaauccaucgugcgguuccccaauaucaccaaucugugccccuucggcgagguguucaaugccaccagauucgccucuguguacgccuggaaccggaagcggaucagcaauugcguggccgacuacuccgugcuguacaacuccgccagcuucagcaccuucaagugcuacggcguguccccuaccaagcugaacgaccugugcuucacaaacguguacgccgacagcuucgugauccggggagaugaagugcggcagauugccccuggacagacaggcaacaucgccgacuacaacuacaagcugcccgacgacuucaccggcugugugauugccuggaacagcaacaaccuggacuccaaagucggcggcaacuacaauuaccuguaccggcuguuccggaaguccaaucugaagcccuucgagcgggacaucuccaccgagaucuaucaggccggcagcaccccuuguaacggcgugaagggcuucaacugcuacuucccacugcaguccuacggcuuucagcccacauacggcgugggcuaucagcccuacagagugguggugcugagcuucgaacugcugcaugccccugccacagugugcggcccuaagaaaagcaccaaucucgugaagaacaaaugcgugaacuucaacuucaacggccugaccggcaccggcgugcugacagagagcaacaagaaguuccugccauuccagcaguuuggccgggauaucgccgauaccacagacgccguuagagauccccagacacuggaaauccuggacaucaccccuugcagcuucggcggagugucugugaucaccccuggcaccaacaccagcaaucagguggcagugcuguaccagggcgugaacuguaccgaagugcccguggccauucacgccgaucagcugacaccuacauggcggguguacuccaccggcagcaauguguuucagaccagagccggcugucugaucggagccgagcacgugaacaauagcuacgagugcgacauccccaucggcgcuggaaucugcgccagcuaccagacacagacaaacagcccucggagagccagaagcguggccagccagagcaucauugccuacacaaugucucugggcgccgagaacagcguggccuacuccaacaacucuaucgcuauccccaccaacuucaccaucagcgugaccacagagauccugccuguguccaugaccaagaccagcguggacugcaccauguacaucugcggcgauuccaccgagugcuccaaccugcugcugcaguacggcagcuucugcacccagcugaauagagcccugacagggaucgccguggaacaggacaagaacacccaagagguguucgcccaagugaagcagaucuacaagaccccuccuaucaaggacuucggcggcuucaauuucagccagauucugcccgauccuagcaagcccagcaagcggagcuucaucgaggaccugcuguucaacaaagugacacuggccgacgccggcuucaucaagcaguauggcgauugucugggcgacauugccgccagggaucugauuugcgcccagaaguuuaacggacugacagugcugccuccucugcugaccgaugagaugaucgcccaguacacaucugcccugcuggccggcacaaucacaagcggcuggacauuuggagcaggcgccgcucugcagauccccuuugcuaugcagauggccuaccgguucaacggcaucggagugacccagaaugugcuguacgagaaccagaagcugaucgccaaccaguucaacagcgccaucggcaagauccaggacagccugagcagcacagcaagcgcccugggaaagcugcaggacguggucaaccagaaugcccaggcacugaacacccuggucaagcagcuguccuccaacuucggcgccaucagcucugugcugaacgauauccugagcagacuggacaaggucgaggccgaggugcagaucgacagacugaucacaggcagacugcagagccuccagacauacgugacccagcagcugaucagagccgccgagauuagagccucugccaaucuggccgccaccaagaugucugagugugugcugggccagagcaagagaguggacuuuugcggcaagggcuaccaccugaugagcuucccucagucugccccucacggcgugguguuucugcacgugacauaugugcccgcucaagagaagaauuucaccaccgcuccagccaucugccacgacggcaaagcccacuuuccuagagaaggcguguucguguccaacggcacccauugguucgugacacagcggaacuucuacgagccccagaucaucaccaccgacaacaccuucgugucuggcaacugcgacgucgugaucggcauugugaacaauaccguguacgacccucugcagcccgagcuggacagcuucaaagaggaacuggacaaguacuuuaagaaccacacaagccccgacguggaccugggcgauaucagcggaaucaaugccagcgucgugaacauccagaaagagaucgaccggcugaacgagguggccaagaaucugaacgagagccugaucgaccugcaagaacuggggaaguacgagcaguacaucaaguggcccugguacaucuggcugggcuuuaucgccggacugauugccaucgugauggucacaaucaugcuguguugcaugaccagcugcuguagcugccugaagggcuguuguagcuguggcagcugcugcaaguucgacgaggacgauucugagcccgugcugaagggcgugaaacugcacuacacauga

SEQ ID NO: 23073 - RNA, 3813 nt, Artificial Sequence
  SARS-CoV-2/Wuhan/WIV05/2019__EPI_ISL_402128 spike protein CDS gc mod (1-1273)(L18F_D80A_D215G_L242del_A243del_L244del_R246I_K417N_E484 K_N501Y_D614G_A701V)
auguucguguuccuggugcugcugccucugguguccagccagugugugaacuucaccaccagaacacagcugccuccagccuacaccaacagcuuuaccagaggcguguacuaccccgacaagguguucagauccagcgugcugcacucuacccaggaccuguuccugccuuucuucagcaacgugaccugguuccacgccauccacguguccggcaccaauggcaccaagagauucgccaaccccgugcugcccuucaacgacgggguguacuuugccagcaccgagaaguccaacaucaucagaggcuggaucuucggcaccacacuggacagcaagacccagagccugcugaucgugaacaacgccaccaacguggucaucaaagugugcgaguuccaguucugcaacgaccccuuccugggcgucuacuaccacaagaacaacaagagcuggauggaaagcgaguuccggguguacagcagcgccaacaacugcaccuucgaguacgugucccagccuuuccugauggaccuggaaggcaagcagggcaacuucaagaaccugcgcgaguucguguuuaagaacaucgacggcuacuucaagaucuacagcaagcacaccccuaucaaccucgugcggggccugccucagggcuucucugcucuggaaccccugguggaucugcccaucggcaucaacaucacccgguuucagacacugcacaucagcuaccugacaccuggcgauagcagcagcggauggacagcuggugccgccgcuuacuaugugggcuaccugcagccuagaaccuuccugcugaaguacaacgagaacggcaccaucaccgacgccguggauugugcucuggauccucugagcgagacaaagugcacccugaaguccuucaccguggaaaagggcaucuaccagaccagcaacuuccgggugcagcccaccgaauccaucgugcgguuccccaauaucaccaaucugugccccuucggcgagguguucaaugccaccagauucgccucuguguacgccuggaaccggaagcggaucagcaauugcguggccgacuacuccgugcuguacaacuccgccagcuucagcaccuucaagugcuacggcguguccccuaccaagcugaacgaccugugcuucacaaacguguacgccgacagcuucgugauccggggagaugaagugcggcagauugccccuggacagacaggcaacaucgccgacuacaacuacaagcugcccgacgacuucaccggcugugugauugccuggaacagcaacaaccuggacuccaaagucggcggcaacuacaauuaccuguaccggcuguuccggaaguccaaucugaagcccuucgagcgggacaucuccaccgagaucuaucaggccggcagcaccccuuguaacggcgugaagggcuucaacugcuacuucccacugcaguccuacggcuuucagcccacauacggcgugggcuaucagcccuacagagugguggugcugagcuucgaacugcugcaugccccugccacagugugcggcccuaagaaaagcaccaaucucgugaagaacaaaugcgugaacuucaacuucaacggccugaccggcaccggcgugcugacagagagcaacaagaaguuccugccauuccagcaguuuggccgggauaucgccgauaccacagacgccguuagagauccccagacacuggaaauccuggacaucaccccuugcagcuucggcggagugucugugaucaccccuggcaccaacaccagcaaucagguggcagugcuguaccagggcgugaacuguaccgaagugcccguggccauucacgccgaucagcugacaccuacauggcggguguacuccaccggcagcaauguguuucagaccagagccggcugucugaucggagccgagcacgugaacaauagcuacgagugcgacauccccaucggcgcuggaaucugcgccagcuaccagacacagacaaacagcccucggagagccagaagcguggccagccagagcaucauugccuacacaaugucucugggcguggagaacagcguggccuacuccaacaacucuaucgcuauccccaccaacuucaccaucagcgugaccacagagauccugccuguguccaugaccaagaccagcguggacugcaccauguacaucugcggcgauuccaccgagugcuccaaccugcugcugcaguacggcagcuucugcacccagcugaauagagcccugacagggaucgccguggaacaggacaagaacacccaagagguguucgcccaagugaagcagaucuacaagaccccuccuaucaaggacuucggcggcuucaauuucagccagauucugcccgauccuagcaagcccagcaagcggagcuucaucgaggaccugcuguucaacaaagugacacuggccgacgccggcuucaucaagcaguauggcgauugucugggcgacauugccgccagggaucugauuugcgcccagaaguuuaacggacugacagugcugccuccucugcugaccgaugagaugaucgcccaguacacaucugcccugcuggccggcacaaucacaagcggcuggacauuuggagcaggcgccgcucugcagauccccuuugcuaugcagauggccuaccgguucaacggcaucggagugacccagaaugugcuguacgagaaccagaagcugaucgccaaccaguucaacagcgccaucggcaagauccaggacagccugagcagcacagcaagcgcccugggaaagcugcaggacguggucaaccagaaugcccaggcacugaacacccuggucaagcagcuguccuccaacuucggcgccaucagcucugugcugaacgauauccugagcagacuggacaaggucgaggccgaggugcagaucgacagacugaucacaggcagacugcagagccuccagacauacgugacccagcagcugaucagagccgccgagauuagagccucugccaaucuggccgccaccaagaugucugagugugugcugggccagagcaagagaguggacuuuugcggcaagggcuaccaccugaugagcuucccucagucugccccucacggcgugguguuucugcacgugacauaugugcccgcucaagagaagaauuucaccaccgcuccagccaucugccacgacggcaaagcccacuuuccuagagaaggcguguucguguccaacggcacccauugguucgugacacagcggaacuucuacgagccccagaucaucaccaccgacaacaccuucgugucuggcaacugcgacgucgugaucggcauugugaacaauaccguguacgacccucugcagcccgagcuggacagcuucaaagaggaacuggacaaguacuuuaagaaccacacaagccccgacguggaccugggcgauaucagcggaaucaaugccagcgucgugaacauccagaaagagaucgaccggcugaacgagguggccaagaaucugaacgagagccugaucgaccugcaagaacuggggaaguacgagcaguacaucaaguggcccugguacaucuggcugggcuuuaucgccggacugauugccaucgugauggucacaaucaugcuguguugcaugaccagcugcuguagcugccugaagggcuguuguagcuguggcagcugcugcaaguucgacgaggacgauucugagcccgugcugaagggcgugaaacugcacuacacauga

SEQ ID NO: 23074 - RNA, 3822 nt, Artificial Sequence
  SARS-CoV-2/Wuhan/WIV05/2019__EPI_ISL_402128 spike protein CDS gc mod (1-1273)(E484K_D614G)
auguucguguuccuggugcugcugccucugguguccagccagugugugaaccugaccaccagaacacagcugccuccagccuacaccaacagcuuuaccagaggcguguacuaccccgacaagguguucagauccagcgugcugcacucuacccaggaccuguuccugccuuucuucagcaacgugaccugguuccacgccauccacguguccggcaccaauggcaccaagagauucgacaaccccgugcugcccuucaacgacgggguguacuuugccagcaccgagaaguccaacaucaucagaggcuggaucuucggcaccacacuggacagcaagacccagagccugcugaucgugaacaacgccaccaacguggucaucaaagugugcgaguuccaguucugcaacgaccccuuccugggcgucuacuaccacaagaacaacaagagcuggauggaaagcgaguuccggguguacagcagcgccaacaacugcaccuucgaguacgugucccagccuuuccugauggaccuggaaggcaagcagggcaacuucaagaaccugcgcgaguucguguuuaagaacaucgacggcuacuucaagaucuacagcaagcacaccccuaucaaccucgugcgggaucugccucagggcuucucugcucuggaaccccugguggaucugcccaucggcaucaacaucacccgguuucagacacugcuggcccugcacagaagcuaccugacaccuggcgauagcagcagcggauggacagcuggugccgccgcuuacuaugugggcuaccugcagccuagaaccuuccugcugaaguacaacgagaacggcaccaucaccgacgccguggauugugcucuggauccucugagcgagacaaagugcacccugaaguccuucaccguggaaaagggcaucuaccagaccagcaacuuccgggugcagcccaccgaauccaucgugcgguuccccaauaucaccaaucugugccccuucggcgagguguucaaugccaccagauucgccucuguguacgccuggaaccggaagcggaucagcaauugcguggccgacuacuccgugcuguacaacuccgccagcuucagcaccuucaagugcuacggcguguccccuaccaagcugaacgaccugugcuucacaaacguguacgccgacagcuucgugauccggggagaugaagugcggcagauugccccuggacagacaggcaagaucgccgacuacaacuacaagcugcccgacgacuucaccggcugugugauugccuggaacagcaacaaccuggacuccaaagucggcggcaacuacaauuaccuguaccggcuguuccggaaguccaaucugaagcccuucgagcgggacaucuccaccgagaucuaucaggccggcagcaccccuuguaacggcgugaagggcuucaacugcuacuucccacugcaguccuacggcuuucagcccacaaauggcgugggcuaucagcccuacagagugguggugcugagcuucgaacugcugcaugccccugccacagugugcggcccuaagaaaagcaccaaucucgugaagaacaaaugcgugaacuucaacuucaacggccugaccggcaccggcgugcugacagagagcaacaagaaguuccugccauuccagcaguuuggccgggauaucgccgauaccacagacgccguuagagauccccagacacuggaaauccuggacaucaccccuugcagcuucggcggagugucugugaucaccccuggcaccaacaccagcaaucagguggcagugcuguaccagggcgugaacuguaccgaagugcccguggccauucacgccgaucagcugacaccuacauggcggguguacuccaccggcagcaauguguuucagaccagagccggcugucugaucggagccgagcacgugaacaauagcuacgagugcgacauccccaucggcgcuggaaucugcgccagcuaccagacacagacaaacagcccucggagagccagaagcguggccagccagagcaucauugccuacacaaugucucugggcgccgagaacagcguggccuacuccaacaacucuaucgcuauccccaccaacuucaccaucagcgugaccacagagauccugccuguguccaugaccaagaccagcguggacugcaccauguacaucugcggcgauuccaccgagugcuccaaccugcugcugcaguacggcagcuucugcacccagcugaauagagcccugacagggaucgccguggaacaggacaagaacacccaagagguguucgcccaagugaagcagaucuacaagaccccuccuaucaaggacuucggcggcuucaauuucagccagauucugcccgauccuagcaagcccagcaagcggagcuucaucgaggaccugcuguucaacaaagugacacuggccgacgccggcuucaucaagcaguauggcgauugucugggcgacauugccgccagggaucugauuugcgcccagaaguuuaacggacugacagugcugccuccucugcugaccgaugagaugaucgcccaguacacaucugcccugcuggccggcacaaucacaagcggcuggacauuuggagcaggcgccgcucugcagauccccuuugcuaugcagauggccuaccgguucaacggcaucggagugacccagaaugugcuguacgagaaccagaagcugaucgccaaccaguucaacagcgccaucggcaagauccaggacagccugagcagcacagcaagcgcccugggaaagcugcaggacguggucaaccagaaugcccaggcacugaacacccuggucaagcagcuguccuccaacuucggcgccaucagcucugugcugaacgauauccugagcagacuggacaaggucgaggccgaggugcagaucgacagacugaucacaggcagacugcagagccuccagacauacgugacccagcagcugaucagagccgccgagauuagagccucugccaaucuggccgccaccaagaugucugagugugugcugggccagagcaagagaguggacuuuugcggcaagggcuaccaccugaugagcuucccucagucugccccucacggcgugguguuucugcacgugacauaugugcccgcucaagagaagaauuucaccaccgcuccagccaucugccacgacggcaaagcccacuuuccuagagaaggcguguucguguccaacggcacccauugguucgugacacagcggaacuucuacgagccccagaucaucaccaccgacaacaccuucgugucuggcaacugcgacgucgugaucggcauugugaacaauaccguguacgacccucugcagcccgagcuggacagcuucaaagaggaacuggacaaguacuuuaagaaccacacaagccccgacguggaccugggcgauaucagcggaaucaaugccagcgucgugaacauccagaaagagaucgaccggcugaacgagguggccaagaaucugaacgagagccugaucgaccugcaagaacuggggaaguacgagcaguacaucaaguggcccugguacaucuggcugggcuuuaucgccggacugauugccaucgugauggucacaaucaugcuguguugcaugaccagcugcuguagcugccugaagggcuguuguagcuguggcagcugcugcaaguucgacgaggacgauucugagcccgugcugaagggcgugaaacugcacuacacauga

SEQ ID NO: 23075 - RNA, 3822 nt, Artificial Sequence
  SARS-CoV-2/Wuhan/WIV05/2019__EPI_ISL_402128 spike protein CDS gc mod (1-1273)(L18F_T20N_P26S_D138Y_R190S_K417T_E484K_N501Y_D614G_H655Y _T1027I)
auguucguguuccuggugcugcugccucugguguccagccagugugugaacuucaccaacagaacacagcugccuagcgccuacaccaacagcuuuaccagaggcguguacuaccccgacaagguguucagauccagcgugcugcacucuacccaggaccuguuccugccuuucuucagcaacgugaccugguuccacgccauccacguguccggcaccaauggcaccaagagauucgacaaccccgugcugcccuucaacgacgggguguacuuugccagcaccgagaaguccaacaucaucagaggcuggaucuucggcaccacacuggacagcaagacccagagccugcugaucgugaacaacgccaccaacguggucaucaaagugugcgaguuccaguucugcaacuaccccuuccugggcgucuacuaccacaagaacaacaagagcuggauggaaagcgaguuccggguguacagcagcgccaacaacugcaccuucgaguacgugucccagccuuuccugauggaccuggaaggcaagcagggcaacuucaagaaccugagcgaguucguguuuaagaacaucgacggcuacuucaagaucuacagcaagcacaccccuaucaaccucgugcgggaucugccucagggcuucucugcucuggaaccccugguggaucugcccaucggcaucaacaucacccgguuucagacacugcuggcccugcacagaagcuaccugacaccuggcgauagcagcagcggauggacagcuggugccgccgcuuacuaugugggcuaccugcagccuagaaccuuccugcugaaguacaacgagaacggcaccaucaccgacgccguggauugugcucuggauccucugagcgagacaaagugcacccugaaguccuucaccguggaaaagggcaucuaccagaccagcaacuuccgggugcagcccaccgaauccaucgugcgguuccccaauaucaccaaucugugccccuucggcgagguguucaaugccaccagauucgccucuguguacgccuggaaccggaagcggaucagcaauugcguggccgacuacuccgugcuguacaacuccgccagcuucagcaccuucaagugcuacggcguguccccuaccaagcugaacgaccugugcuucacaaacguguacgccgacagcuucgugauccggggagaugaagugcggcagauugccccuggacagacaggcaccaucgccgacuacaacuacaagcugcccgacgacuucaccggcugugugauugccuggaacagcaacaaccuggacuccaaagucggcggcaacuacaauuaccuguaccggcuguuccggaaguccaaucugaagcccuucgagcgggacaucuccaccgagaucuaucaggccggcagcaccccuuguaacggcgugaagggcuucaacugcuacuucccacugcaguccuacggcuuucagcccacauacggcgugggcuaucagcccuacagagugguggugcugagcuucgaacugcugcaugccccugccacagugugcggcccuaagaaaagcaccaaucucgugaagaacaaaugcgugaacuucaacuucaacggccugaccggcaccggcgugcugacagagagcaacaagaaguuccugccauuccagcaguuuggccgggauaucgccgauaccacagacgccguuagagauccccagacacuggaaauccuggacaucaccccuugcagcuucggcggagugucugugaucaccccuggcaccaacaccagcaaucagguggcagugcuguaccagggcgugaacuguaccgaagugcccguggccauucacgccgaucagcugacaccuacauggcggguguacuccaccggcagcaauguguuucagaccagagccggcugucugaucggagccgaguacgugaacaauagcuacgagugcgacauccccaucggcgcuggaaucugcgccagcuaccagacacagacaaacagcccucggagagccagaagcguggccagccagagcaucauugccuacacaaugucucugggcgccgagaacagcguggccuacuccaacaacucuaucgcuauccccaccaacuucaccaucagcgugaccacagagauccugccuguguccaugaccaagaccagcguggacugcaccauguacaucugcggcgauuccaccgagugcuccaaccugcugcugcaguacggcagcuucugcacccagcugaauagagcccugacagggaucgccguggaacaggacaagaacacccaagagguguucgcccaagugaagcagaucuacaagaccccuccuaucaaggacuucggcggcuucaauuucagccagauucugcccgauccuagcaagcccagcaagcggagcuucaucgaggaccugcuguucaacaaagugacacuggccgacgccggcuucaucaagcaguauggcgauugucugggcgacauugccgccagggaucugauuugcgcccagaaguuuaacggacugacagugcugccuccucugcugaccgaugagaugaucgcccaguacacaucugcccugcuggccggcacaaucacaagcggcuggacauuuggagcaggcgccgcucugcagauccccuuugcuaugcagauggccuaccgguucaacggcaucggagugacccagaaugugcuguacgagaaccagaagcugaucgccaaccaguucaacagcgccaucggcaagauccaggacagccugagcagcacagcaagcgcccugggaaagcugcaggacguggucaaccagaaugcccaggcacugaacacccuggucaagcagcuguccuccaacuucggcgccaucagcucugugcugaacgauauccugagcagacuggacaaggucgaggccgaggugcagaucgacagacugaucacaggcagacugcagagccuccagacauacgugacccagcagcugaucagagccgccgagauuagagccucugccaaucuggccgccaucaagaugucugagugugugcugggccagagcaagagaguggacuuuugcggcaagggcuaccaccugaugagcuucccucagucugccccucacggcgugguguuucugcacgugacauaugugcccgcucaagagaagaauuucaccaccgcuccagccaucugccacgacggcaaagcccacuuuccuagagaaggcguguucguguccaacggcacccauugguucgugacacagcggaacuucuacgagccccagaucaucaccaccgacaacaccuucgugucuggcaacugcgacgucgugaucggcauugugaacaauaccguguacgacccucugcagcccgagcuggacagcuucaaagaggaacuggacaaguacuuuaagaaccacacaagccccgacguggaccugggcgauaucagcggaaucaaugccagcgucgugaacauccagaaagagaucgaccggcugaacgagguggccaagaaucugaacgagagccugaucgaccugcaagaacuggggaaguacgagcaguacaucaaguggcccugguacaucuggcugggcuuuaucgccggacugauugccaucgugauggucacaaucaugcuguguugcaugaccagcugcuguagcugccugaagggcuguuguagcuguggcagcugcugcaaguucgacgaggacgauucugagcccgugcugaagggcgugaaacugcacuacacauga

SEQ ID NO: 23076 - RNA, 3822 nt, Artificial Sequence
  SARS-CoV-2/Wuhan/WIV05/2019__EPI_ISL_402128 spike protein CDS gc mod (1-1273)(S13I_W152C_L452R_D614G)
auguucguguuccuggugcugcugccucugguguccauccagugugugaaccugaccaccagaacacagcugccuccagccuacaccaacagcuuuaccagaggcguguacuaccccgacaagguguucagauccagcgugcugcacucuacccaggaccuguuccugccuuucuucagcaacgugaccugguuccacgccauccacguguccggcaccaauggcaccaagagauucgacaaccccgugcugcccuucaacgacgggguguacuuugccagcaccgagaaguccaacaucaucagaggcuggaucuucggcaccacacuggacagcaagacccagagccugcugaucgugaacaacgccaccaacguggucaucaaagugugcgaguuccaguucugcaacgaccccuuccugggcgucuacuaccacaagaacaacaagagcugcauggaaagcgaguuccggguguacagcagcgccaacaacugcaccuucgaguacgugucccagccuuuccugauggaccuggaaggcaagcagggcaacuucaagaaccugcgcgaguucguguuuaagaacaucgacggcuacuucaagaucuacagcaagcacaccccuaucaaccucgugcgggaucugccucagggcuucucugcucuggaaccccugguggaucugcccaucggcaucaacaucacccgguuucagacacugcuggcccugcacagaagcuaccugacaccuggcgauagcagcagcggauggacagcuggugccgccgcuuacuaugugggcuaccugcagccuagaaccuuccugcugaaguacaacgagaacggcaccaucaccgacgccguggauugugcucuggauccucugagcgagacaaagugcacccugaaguccuucaccguggaaaagggcaucuaccagaccagcaacuuccgggugcagcccaccgaauccaucgugcgguuccccaauaucaccaaucugugccccuucggcgagguguucaaugccaccagauucgccucuguguacgccuggaaccggaagcggaucagcaauugcguggccgacuacuccgugcuguacaacuccgccagcuucagcaccuucaagugcuacggcguguccccuaccaagcugaacgaccugugcuucacaaacguguacgccgacagcuucgugauccggggagaugaagugcggcagauugccccuggacagacaggcaagaucgccgacuacaacuacaagcugcccgacgacuucaccggcugugugauugccuggaacagcaacaaccuggacuccaaagucggcggcaacuacaauuaccgcuaccggcuguuccggaaguccaaucugaagcccuucgagcgggacaucuccaccgagaucuaucaggccggcagcaccccuuguaacggcguggaaggcuucaacugcuacuucccacugcaguccuacggcuuucagcccacaaauggcgugggcuaucagcccuacagagugguggugcugagcuucgaacugcugcaugccccugccacagugugcggcccuaagaaaagcaccaaucucgugaagaacaaaugcgugaacuucaacuucaacggccugaccggcaccggcgugcugacagagagcaacaagaaguuccugccauuccagcaguuuggccgggauaucgccgauaccacagacgccguuagagauccccagacacuggaaauccuggacaucaccccuugcagcuucggcggagugucugugaucaccccuggcaccaacaccagcaaucagguggcagugcuguaccagggcgugaacuguaccgaagugcccguggccauucacgccgaucagcugacaccuacauggcggguguacuccaccggcagcaauguguuucagaccagagccggcugucugaucggagccgagcacgugaacaauagcuacgagugcgacauccccaucggcgcuggaaucugcgccagcuaccagacacagacaaacagcccucggagagccagaagcguggccagccagagcaucauugccuacacaaugucucugggcgccgagaacagcguggccuacuccaacaacucuaucgcuauccccaccaacuucaccaucagcgugaccacagagauccugccuguguccaugaccaagaccagcguggacugcaccauguacaucugcggcgauuccaccgagugcuccaaccugcugcugcaguacggcagcuucugcacccagcugaauagagcccugacagggaucgccguggaacaggacaagaacacccaagagguguucgcccaagugaagcagaucuacaagaccccuccuaucaaggacuucggcggcuucaauuucagccagauucugcccgauccuagcaagcccagcaagcggagcuucaucgaggaccugcuguucaacaaagugacacuggccgacgccggcuucaucaagcaguauggcgauugucugggcgacauugccgccagggaucugauuugcgcccagaaguuuaacggacugacagugcugccuccucugcugaccgaugagaugaucgcccaguacacaucugcccugcuggccggcacaaucacaagcggcuggacauuuggagcaggcgccgcucugcagauccccuuugcuaugcagauggccuaccgguucaacggcaucggagugacccagaaugugcuguacgagaaccagaagcugaucgccaaccaguucaacagcgccaucggcaagauccaggacagccugagcagcacagcaagcgcccugggaaagcugcaggacguggucaaccagaaugcccaggcacugaacacccuggucaagcagcuguccuccaacuucggcgccaucagcucugugcugaacgauauccugagcagacuggacaaggucgaggccgaggugcagaucgacagacugaucacaggcagacugcagagccuccagacauacgugacccagcagcugaucagagccgccgagauuagagccucugccaaucuggccgccaccaagaugucugagugugugcugggccagagcaagagaguggacuuuugcggcaagggcuaccaccugaugagcuucccucagucugccccucacggcgugguguuucugcacgugacauaugugcccgcucaagagaagaauuucaccaccgcuccagccaucugccacgacggcaaagcccacuuuccuagagaaggcguguucguguccaacggcacccauugguucgugacacagcggaacuucuacgagccccagaucaucaccaccgacaacaccuucgugucuggcaacugcgacgucgugaucggcauugugaacaauaccguguacgacccucugcagcccgagcuggacagcuucaaagaggaacuggacaaguacuuuaagaaccacacaagccccgacguggaccugggcgauaucagcggaaucaaugccagcgucgugaacauccagaaagagaucgaccggcugaacgagguggccaagaaucugaacgagagccugaucgaccugcaagaacuggggaaguacgagcaguacaucaaguggcccugguacaucuggcugggcuuuaucgccggacugauugccaucgugauggucacaaucaugcuguguugcaugaccagcugcuguagcugccugaagggcuguuguagcuguggcagcugcugcaaguucgacgaggacgauucugagcccgugcugaagggcgugaaacugcacuacacauga

SEQ ID NO: 23077 - RNA, 3822 nt, Artificial Sequence; identical to SEQ ID NO: 137
  SARS-CoV-2/Wuhan/WIV05/2019__EPI_ISL_402128 spike protein CDS gc (1-1273)(K986P_V987P)

SEQ ID NO: 23078 - RNA, 3822 nt, Artificial Sequence; identical to SEQ ID NO: 22765
  SARS-CoV-2/Wuhan/WIV05/2019__EPI_ISL_402128 spike protein CDS gc (1-1273)(K986P_V987P_ D614G)

SEQ ID NO: 23079 - RNA, 3822 nt, Artificial Sequence; identical to SEQ ID NO: 22767
  SARS-CoV-2/Wuhan/WIV05/2019__EPI_ISL_402128 spike protein CDS gc (1-1273)(K986P_V987P_A222V_D614G)

SEQ ID NO: 23080 - RNA, 3822 nt, Artificial Sequence; identical to SEQ ID NO: 22769
  SARS-CoV-2/Wuhan/WIV05/2019__EPI_ISL_402128 spike protein CDS gc (1-1273)(K986P_V987P_N439K_D614G)

SEQ ID NO: 23081 - RNA, 3822 nt, Artificial Sequence; identical to SEQ ID NO: 22771
  SARS-CoV-2/Wuhan/WIV05/2019__EPI_ISL_402128 spike protein CDS gc (1-1273)(K986P_V987P_S477N_D614G)

SEQ ID NO: 23082 - RNA, 3822 nt, Artificial Sequence; identical to SEQ ID NO: 22773
  SARS-CoV-2/Wuhan/WIV05/2019__EPI_ISL_402128 spike protein CDS gc (1-1273)(K986P_V987P_N501Y_D614G)

SEQ ID NO: 23083 - RNA, 3816 nt, Artificial Sequence; identical to SEQ ID NO: 22775
  SARS-CoV-2/Wuhan/WIV05/2019__EPI_ISL_402128 spike protein CDS gc (1-1273)(K986P_V987P_H69del_V70del_D614G)

SEQ ID NO: 23084 - RNA, 3822 nt, Artificial Sequence; identical to SEQ ID NO: 22777
  SARS-CoV-2/Wuhan/WIV05/2019__EPI_ISL_402128 spike protein CDS gc (1-1273)(K986P_V987P_Y453F_D614G)

SEQ ID NO: 23085 - RNA, 3822 nt, Artificial Sequence; identical to SEQ ID NO: 22779
  SARS-CoV-2/Wuhan/WIV05/2019__EPI_ISL_402128 spike protein CDS gc (1-1273)(K986P_V987P_D614G_I692V)

SEQ ID NO: 23086 - RNA, 3822 nt, Artificial Sequence; identical to SEQ ID NO: 22781
  SARS-CoV-2/Wuhan/WIV05/2019__EPI_ISL_402128 spike protein CDS gc (1-1273)(K986P_V987P_D614G_M1229I)

SEQ ID NO: 23087 - RNA, 3816 nt, Artificial Sequence; identical to SEQ ID NO: 22783
  SARS-CoV-2/Wuhan/WIV05/2019__EPI_ISL_402128 spike protein CDS gc (1-1273)(K986P_V987P_H69del_V70del_A222V_Y453F_S477N_D614G_I692V)

SEQ ID NO: 23088 - RNA, 3816 nt, Artificial Sequence; identical to SEQ ID NO: 22785
  SARS-CoV-2/Wuhan/WIV05/2019__EPI_ISL_402128 spike protein CDS gc (1-1273)(K986P_V987P_H69del_V70del_Y453F_D614G_I692V_M1229I)

SEQ ID NO: 23089 - RNA, 3813 nt, Artificial Sequence
  SARS-CoV-2/Wuhan/WIV05/2019__EPI_ISL_402128 spike protein CDS gc (1-1273)(K986P_V987P_K986P_V987P_H69del_V70del_Y144del_N501Y_A570 D_D614G_P681H_T716I_S982A_D1118H)
auguucguguuccugguccuccugccccuggugagcucccagugcgugaaccucaccacccgcacgcagcugccgcccgccuacaccaacagcuucacccggggcgucuacuaccccgacaagguguuccgcuccagcgugcugcacuccacccaggaccucuuccugcccuucuucagcaacgucacgugguuccacgccaucuccgggaccaacggcaccaagcgguucgacaacccggugcugcccuucaacgacggggucuacuucgcgagcaccgagaaguccaacaucauccgcggcuggaucuucgggacgacccucgacagcaagacccagucccugcugaucgugaacaacgccaccaacguggucaucaaggugugcgaguuccaguucugcaacgaccccuuccucggcguguaccacaagaacaacaagagcuggauggaguccgaguuccgggucuacagcuccgccaacaacugcacguucgaguacgugagccagcccuuccugauggaccuggagggcaagcaggggaacuucaagaaccuccgcgaguucguguucaagaacaucgacggcuacuucaagaucuacuccaagcacaccccgaucaaccugguccgggaccugccccagggguucagcgcccucgagccccugguggaccugcccaucggcaucaacaucacccgcuuccagacccuccuggcccugcaccgguccuaccucacgccgggggacagcagcuccggcuggaccgcgggcgccgccgccuacuacgugggguaccugcagccccgcaccuuccugcucaaguacaacgagaacggcaccaucacggacgcggucgacugcgcccuggacccccugagcgagaccaagugcacccucaaguccuucaccguggagaaggggaucuaccagacgagcaacuuccgggugcagcccaccgaguccaucguccgcuucccgaacaucaccaaccugugccccuucggcgagguguucaacgccacccgguucgccagcgucuacgccuggaaccgcaagcggaucuccaacugcguggcggacuacagcgugcuguacaacuccgccagcuucuccacguucaagugcuacggcgucagccccaccaagcucaacgaccugugcuucaccaacguguacgccgacuccuucgugauccgcggggacgagguccggcagaucgcccccggccagaccgggaagaucgccgacuacaacuacaagcugccggacgacuucacgggcugcgugaucgcguggaacagcaacaaccucgacuccaaggucgggggcaacuacaacuaccuguaccgccuguuccgcaagagcaaccucaagcccuucgagcgggacaucuccaccgagaucuaccaggccggcagcacccccugcaacgggguggagggcuucaacugcuacuucccccugcaguccuacggguuccagccgaccuacggcgugggguaccagcccuaccggguggucgugcugagcuucgagcuccugcacgcccccgccacggugugcggccccaagaaguccaccaaccuggucaagaacaagugcgugaacuucaacuucaacggccucaccgggaccggcgugcugaccgagagcaacaagaaguuccugccguuccagcaguucgggcgcgacaucgacgacacgaccgacgcgguccgcgacccccagacccuggagauccucgacaucacccccugcagcuucggcgggguguccgugaucacgccgggcaccaacaccagcaaccaggucgccgugcuguaccagggcgugaacugcaccgagguccccguggccauccacgccgaccagcugacgcccaccuggcggguguacuccaccggcagcaacgucuuccagacccgcgccgggugccucaucggcgcggagcacgugaacaacuccuacgagugcgacauccccaucggggccggcaucugcgccagcuaccagacgcagaccaacucccaccggcgcgcccggagcguggcgucccagagcaucaucgccuacaccaugucccugggcgccgagaacagcgucgccuacuccaacaacagcaucgccauccccaucaacuucacgaucuccgugaccaccgagauccugcccgugagcaugaccaagacgagcgucgacugcaccauguacaucugcggggacuccaccgagugcagcaaccuccugcugcaguacggcuccuucugcacccagcucaaccgcgcgcugacggggaucgccguggagcaggacaagaacacccaggagguguucgcccaggucaagcagaucuacaagacgcccccgaucaaggacuucggcggguucaacuucagccagauccugcccgaccccuccaagcccagcaagcgguccuucaucgaggaccuccuguucaacaaggugacccuggccgacgccggcuucaucaagcaguacggcgacugccucggggacaucgcggcccgcgaccugaucugcgcccagaaguucaacggccugaccgugcucccgccccugcugaccgacgagaugaucgcccaguacaccagcgcccuccuggcggggaccaucacguccggcuggaccuucggggccggcgccgcccugcagauccccuucgcgaugcagauggccuaccgguucaacggcaucggggucacccagaacgugcucuacgagaaccagaagcugaucgccaaccaguucaacagcgccaucggcaagauccaggacucccugagcuccaccgccagcgcgcucgggaagcugcaggacguggucaaccagaacgcccaggcccugaacacgcucgugaagcagcuguccagcaacuucggcgccaucuccagcgugcugaacgacauccucgcccgccuggacccgcccgaggccgaggugcagaucgaccggcugaucaccgggcgccuccagagccugcagaccuacgugacccagcagcugauccgggcggccgagauccgcgccagcgccaaccucgccgcgaccaagauguccgagugcguccugggccagagcaagcggguggacuucugcggcaagggguaccaccugauguccuucccccagagcgccccgcacggcguggucuuccuccacgugacguacguccccgcccaggagaagaacuucaccaccgcccccgcgaucugccacgacgggaaggcccacuucccccgcgagggcguguucguguccaacgggacccacugguucgucacgcagcggaacuucuacgagccgcagaucaucaccacccacaacaccuucgugagcggcaacugcgacguggucaucggcaucgugaacaacacgguguacgacccccugcagcccgagcuggacuccuucaaggaggagcucgacaaguacuucaagaaccacaccagccccgacgucgaccugggggacaucuccggcaucaacgccagcguggugaacauccagaaggagaucgaccgccugaacgaggucgccaagaaccucaacgagucccugaucgaccugcaggagcucgggaaguacgagcaguacaucaaguggccgugguacaucuggcugggcuucaucgccggccugaucgcgaucgugauggugaccaucaugcucugcugcaugaccagcugcugcuccugccugaaggggugcugcagcugcggcuccugcugcaaguucgacgaggacgacagcgagcccguccugaagggggugaagcuccacuacacguga

SEQ ID NO: 23090 - RNA, 3822 nt, Artificial Sequence
  SARS-CoV-2/Wuhan/WIV05/2019__EPI_ISL_402128 spike protein CDS gc (1-1273)(K986P_V987P_K986P_V987P_K417N_E484K_N501Y_D614G)
auguucguguuccugguccuccugccccuggugagcucccagugcgugaaccucaccacccgcacgcagcugccgcccgccuacaccaacagcuucacccggggcgucuacuaccccgacaagguguuccgcuccagcgugcugcacuccacccaggaccucuuccugcccuucuucagcaacgucacgugguuccacgccauccacguguccgggaccaacggcaccaagcgguucgacaacccggugcugcccuucaacgacggggucuacuucgcgagcaccgagaaguccaacaucauccgcggcuggaucuucgggacgacccucgacagcaagacccagucccugcugaucgugaacaacgccaccaacguggucaucaaggugugcgaguuccaguucugcaacgaccccuuccucggcguguacuaccacaagaacaacaagagcuggauggaguccgaguuccgggucuacagcuccgccaacaacugcacguucgaguacgugagccagcccuuccugauggaccuggagggcaagcaggggaacuucaagaaccuccgcgaguucguguucaagaacaucgacggcuacuucaagaucuacuccaagcacaccccgaucaaccugguccgggaccugccccagggguucagcgcccucgagccccugguggaccugcccaucggcaucaacaucacccgcuuccagacccuccuggcccugcaccgguccuaccucacgccgggggacagcagcuccggcuggaccgcgggcgccgccgccuacuacgugggguaccugcagccccgcaccuuccugcucaaguacaacgagaacggcaccaucacggacgcggucgacugcgcccuggacccccugagcgagaccaagugcacccucaaguccuucaccguggagaaggggaucuaccagacgagcaacuuccgggugcagcccaccgaguccaucguccgcuucccgaacaucaccaaccugugccccuucggcgagguguucaacgccacccgguucgccagcgucuacgccuggaaccgcaagcggaucuccaacugcguggcggacuacagcgugcuguacaacuccgccagcuucuccacguucaagugcuacggcgucagccccaccaagcucaacgaccugugcuucaccaacguguacgccgacuccuucgugauccgcggggacgagguccggcagaucgcccccggccagaccgggaacaucgccgacuacaacuacaagcugccggacgacuucacgggcugcgugaucgcguggaacagcaacaaccucgacuccaaggucgggggcaacuacaacuaccuguaccgccuguuccgcaagagcaaccucaagcccuucgagcgggacaucuccaccgagaucuaccaggccggcagcacccccugcaacggggugaagggcuucaacugcuacuucccccugcaguccuacggguuccagccgaccuacggcgugggguaccagcccuaccggguggucgugcugagcuucgagcuccugcacgcccccgccacggugugcggccccaagaaguccaccaaccuggucaagaacaagugcgugaacuucaacuucaacggccucaccgggaccggcgugcugaccgagagcaacaagaaguuccugccguuccagcaguucgggcgcgacaucgccgacacgaccgacgcgguccgcgacccccagacccuggagauccucgacaucacccccugcagcuucggcgggguguccgugaucacgccgggcaccaacaccagcaaccaggucgccgugcuguaccagggcgugaacugcaccgagguccccguggccauccacgccgaccagcugacgcccaccuggcggguguacuccaccggcagcaacgucuuccagacccgcgccgggugccucaucggcgcggagcacgugaacaacuccuacgagugcgacauccccaucggggccggcaucugcgccagcuaccagacgcagaccaacuccccgcggcgcgcccggagcguggcgucccagagcaucaucgccuacaccaugucccugggcgccgagaacagcgucgccuacuccaacaacagcaucgccauccccaccaacuucacgaucuccgugaccaccgagauccugcccgugagcaugaccaagacgagcgucgacugcaccauguacaucugcggggacuccaccgagugcagcaaccuccugcugcaguacggcuccuucugcacccagcucaaccgcgcgcugacggggaucgccguggagcaggacaagaacacccaggagguguucgcccaggucaagcagaucuacaagacgcccccgaucaaggacuucggcggguucaacuucagccagauccugcccgaccccuccaagcccagcaagcgguccuucaucgaggaccuccuguucaacaaggugacccuggccgacgccggcuucaucaagcaguacggcgacugccucggggacaucgcggcccgcgaccugaucugcgcccagaaguucaacggccugaccgugcucccgccccugcugaccgacgagaugaucgcccaguacaccagcgcccuccuggcggggaccaucacguccggcuggaccuucggggccggcgccgcccugcagauccccuucgcgaugcagauggccuaccgguucaacggcaucggggucacccagaacgugcucuacgagaaccagaagcugaucgccaaccaguucaacagcgccaucggcaagauccaggacucccugagcuccaccgccagcgcgcucgggaagcugcaggacguggucaaccagaacgcccaggcccugaacacgcucgugaagcagcuguccagcaacuucggcgccaucuccagcgugcugaacgacauccucucccgccuggacccgcccgaggccgaggugcagaucgaccggcugaucaccgggcgccuccagagccugcagaccuacgugacccagcagcugauccgggcggccgagauccgcgccagcgccaaccucgccgcgaccaagauguccgagugcguccugggccagagcaagcggguggacuucugcggcaagggguaccaccugauguccuucccccagagcgccccgcacggcguggucuuccuccacgugacguacguccccgcccaggagaagaacuucaccaccgcccccgcgaucugccacgacgggaaggcccacuucccccgcgagggcguguucguguccaacgggacccacugguucgucacgcagcggaacuucuacgagccgcagaucaucaccaccgacaacaccuucgugagcggcaacugcgacguggucaucggcaucgugaacaacacgguguacgacccccugcagcccgagcuggacuccuucaaggaggagcucgacaaguacuucaagaaccacaccagccccgacgucgaccugggggacaucuccggcaucaacgccagcguggugaacauccagaaggagaucgaccgccugaacgaggucgccaagaaccucaacgagucccugaucgaccugcaggagcucgggaaguacgagcaguacaucaaguggccgugguacaucuggcugggcuucaucgccggccugaucgcgaucgugauggugaccaucaugcucugcugcaugaccagcugcugcuccugccugaaggggugcugcagcugcggcuccugcugcaaguucgacgaggacgacagcgagcccguccugaagggggugaagcuccacuacacguga

SEQ ID NO: 23091 - RNA, 3813 nt, Artificial Sequence
  SARS-CoV-2/Wuhan/WIV05/2019__EPI_ISL_402128 spike protein CDS gc (1-1273)(K986P_V987P_K986P_V987P_L18F_D80A_D215G_L242del_A243del_ L244del_R246I_K417N_E484K_N501Y_D614G_A701V)
auguucguguuccugguccuccugccccuggugagcucccagugcgugaacuucaccacccgcacgcagcugccgcccgccuacaccaacagcuucacccggggcgucuacuaccccgacaagguguuccgcuccagcgugcugcacuccacccaggaccucuuccugcccuucuucagcaacgucacgugguuccacgccauccacguguccgggaccaacggcaccaagcgguucgccaacccggugcugcccuucaacgacggggucuacuucgcgagcaccgagaaguccaacaucauccgcggcuggaucuucgggacgacccucgacagcaagacccagucccugcugaucgugaacaacgccaccaacguggucaucaaggugugcgaguuccaguucugcaacgaccccuuccucggcguguacuaccacaagaacaacaagagcuggauggaguccgaguuccgggucuacagcuccgccaacaacugcacguucgaguacgugagccagcccuuccugauggaccuggagggcaagcaggggaacuucaagaaccuccgcgaguucguguucaagaacaucgacggcuacuucaagaucuacuccaagcacaccccgaucaaccugguccggggccugccccagggguucagcgcccucgagccccugguggaccugcccaucggcaucaacaucacccgcuuccagacccuccacaucuccuaccucacgccgggggacagcagcuccggcuggaccgcgggcgccgccgccuacuacgugggguaccugcagccccgcaccuuccugcucaaguacaacgagaacggcaccaucacggacgcggucgacugcgcccuggacccccugagcgagaccaagugcacccucaaguccuucaccguggagaaggggaucuaccagacgagcaacuuccgggugcagcccaccgaguccaucguccgcuucccgaacaucaccaaccugugccccuucggcgagguguucaacgccacccgguucgccagcgucuacgccuggaaccgcaagcggaucuccaacugcguggcggacuacagcgugcuguacaacuccgccagcuucuccacguucaagugcuacggcgucagccccaccaagcucaacgaccugugcuucaccaacguguacgccgacuccuucgugauccgcggggacgagguccggcagaucgcccccggccagaccgggaacaucgccgacuacaacuacaagcugccggacgacuucacgggcugcgugaucgcguggaacagcaacaaccucgacuccaaggucgggggcaacuacaacuaccuguaccgccuguuccgcaagagcaaccucaagcccuucgagcgggacaucuccaccgagaucuaccaggccggcagcacccccugcaacggggugaagggcuucaacugcuacuucccccugcaguccuacggguuccagccgaccuacggcgugggguaccagcccuaccggguggucgugcugagcuucgagcuccugcacgcccccgccacggugugcggccccaagaaguccaccaaccuggucaagaacaagugcgugaacuucaacuucaacggccucaccgggaccggcgugcugaccgagagcaacaagaaguuccugccguuccagcaguucgggcgcgacaucgccgacacgaccgacgcgguccgcgacccccagacccuggagauccucgacaucacccccugcagcuucggcgggguguccgugaucacgccgggcaccaacaccagcaaccaggucgccgugcuguaccagggcgugaacugcaccgagguccccguggccauccacgccgaccagcugacgcccaccuggcggguguacuccaccggcagcaacgucuuccagacccgcgccgggugccucaucggcgcggagcacgugaacaacuccuacgagugcgacauccccaucggggccggcaucugcgccagcuaccagacgcagaccaacuccccgcggcgcgcccggagcguggcgucccagagcaucaucgccuacaccaugucccugggcguggagaacagcgucgccuacuccaacaacagcaucgccauccccaccaacuucacgaucuccgugaccaccgagauccugcccgugagcaugaccaagacgagcgucgacugcaccauguacaucugcggggacuccaccgagugcagcaaccuccugcugcaguacggcuccuucugcacccagcucaaccgcgcgcugacggggaucgccguggagcaggacaagaacacccaggagguguucgcccaggucaagcagaucuacaagacgcccccgaucaaggacuucggcggguucaacuucagccagauccugcccgaccccuccaagcccagcaagcgguccuucaucgaggaccuccuguucaacaaggugacccuggccgacgccggcuucaucaagcaguacggcgacugccucggggacaucgcggcccgcgaccugaucugcgcccagaaguucaacggccugaccgugcucccgccccugcugaccgacgagaugaucgcccaguacaccagcgcccuccuggcggggaccaucacguccggcuggaccuucggggccggcgccgcccugcagauccccuucgcgaugcagauggccuaccgguucaacggcaucggggucacccagaacgugcucuacgagaaccagaagcugaucgccaaccaguucaacagcgccaucggcaagauccaggacucccugagcuccaccgccagcgcgcucgggaagcugcaggacguggucaaccagaacgcccaggcccugaacacgcucgugaagcagcuguccagcaacuucggcgccaucuccagcgugcugaacgacauccucucccgccuggacccgcccgaggccgaggugcagaucgaccggcugaucaccgggcgccuccagagccugcagaccuacgugacccagcagcugauccgggcggccgagauccgcgccagcgccaaccucgccgcgaccaagauguccgagugcguccugggccagagcaagcggguggacuucugcggcaagggguaccaccugauguccuucccccagagcgccccgcacggcguggucuuccuccacgugacguacguccccgcccaggagaagaacuucaccaccgcccccgcgaucugccacgacgggaaggcccacuucccccgcgagggcguguucguguccaacgggacccacugguucgucacgcagcggaacuucuacgagccgcagaucaucaccaccgacaacaccuucgugagcggcaacugcgacguggucaucggcaucgugaacaacacgguguacgacccccugcagcccgagcuggacuccuucaaggaggagcucgacaaguacuucaagaaccacaccagccccgacgucgaccugggggacaucuccggcaucaacgccagcguggugaacauccagaaggagaucgaccgccugaacgaggucgccaagaaccucaacgagucccugaucgaccugcaggagcucgggaaguacgagcaguacaucaaguggccgugguacaucuggcugggcuucaucgccggccugaucgcgaucgugauggugaccaucaugcucugcugcaugaccagcugcugcuccugccugaaggggugcugcagcugcggcuccugcugcaaguucgacgaggacgacagcgagcccguccugaagggggugaagcuccacuacacguga

SEQ ID NO: 23092 - RNA, 3822 nt, Artificial Sequence
  SARS-CoV-2/Wuhan/WIV05/2019__EPI_ISL_402128 spike protein CDS gc (1-1273)(K986P_V987P_K986P_V987P_E484K_D614G)
auguucguguuccugguccuccugccccuggugagcucccagugcgugaaccucaccacccgcacgcagcugccgcccgccuacaccaacagcuucacccggggcgucuacuaccccgacaagguguuccgcuccagcgugcugcacuccacccaggaccucuuccugcccuucuucagcaacgucacgugguuccacgccauccacguguccgggaccaacggcaccaagcgguucgacaacccggugcugcccuucaacgacggggucuacuucgcgagcaccgagaaguccaacaucauccgcggcuggaucuucgggacgacccucgacagcaagacccagucccugcugaucgugaacaacgccaccaacguggucaucaaggugugcgaguuccaguucugcaacgaccccuuccucggcguguacuaccacaagaacaacaagagcuggauggaguccgaguuccgggucuacagcuccgccaacaacugcacguucgaguacgugagccagcccuuccugauggaccuggagggcaagcaggggaacuucaagaaccuccgcgaguucguguucaagaacaucgacggcuacuucaagaucuacuccaagcacaccccgaucaaccugguccgggaccugccccagggguucagcgcccucgagccccugguggaccugcccaucggcaucaacaucacccgcuuccagacccuccuggcccugcaccgguccuaccucacgccgggggacagcagcuccggcuggaccgcgggcgccgccgccuacuacgugggguaccugcagccccgcaccuuccugcucaaguacaacgagaacggcaccaucacggacgcggucgacugcgcccuggacccccugagcgagaccaagugcacccucaaguccuucaccguggagaaggggaucuaccagacgagcaacuuccgggugcagcccaccgaguccaucguccgcuucccgaacaucaccaaccugugccccuucggcgagguguucaacgccacccgguucgccagcgucuacgccuggaaccgcaagcggaucuccaacugcguggcggacuacagcgugcuguacaacuccgccagcuucuccacguucaagugcuacggcgucagccccaccaagcucaacgaccugugcuucaccaacguguacgccgacuccuucgugauccgcggggacgagguccggcagaucgcccccggccagaccgggaagaucgccgacuacaacuacaagcugccggacgacuucacgggcugcgugaucgcguggaacagcaacaaccucgacuccaaggucgggggcaacuacaacuaccuguaccgccuguuccgcaagagcaaccucaagcccuucgagcgggacaucuccaccgagaucuaccaggccggcagcacccccugcaacggggugaagggcuucaacugcuacuucccccugcaguccuacggguuccagccgaccaacggcgugggguaccagcccuaccggguggucgugcugagcuucgagcuccugcacgcccccgccacggugugcggccccaagaaguccaccaaccuggucaagaacaagugcgugaacuucaacuucaacggccucaccgggaccggcgugcugaccgagagcaacaagaaguuccugccguuccagcaguucgggcgcgacaucgccgacacgaccgacgcgguccgcgacccccagacccuggagauccucgacaucacccccugcagcuucggcgggguguccgugaucacgccgggcaccaacaccagcaaccaggucgccgugcuguaccagggcgugaacugcaccgagguccccguggccauccacgccgaccagcugacgcccaccuggcggguguacuccaccggcagcaacgucuuccagacccgcgccgggugccucaucggcgcggagcacgugaacaacuccuacgagugcgacauccccaucggggccggcaucugcgccagcuaccagacgcagaccaacuccccgcggcgcgcccggagcguggcgucccagagcaucaucgccuacaccaugucccugggcgccgagaacagcgucgccuacuccaacaacagcaucgccauccccaccaacuucacgaucuccgugaccaccgagauccugcccgugagcaugaccaagacgagcgucgacugcaccauguacaucugcggggacuccaccgagugcagcaaccuccugcugcaguacggcuccuucugcacccagcucaaccgcgcgcugacggggaucgccguggagcaggacaagaacacccaggagguguucgcccaggucaagcagaucuacaagacgcccccgaucaaggacuucggcggguucaacuucagccagauccugcccgaccccuccaagcccagcaagcgguccuucaucgaggaccuccuguucaacaaggugacccuggccgacgccggcuucaucaagcaguacggcgacugccucggggacaucgcggcccgcgaccugaucugcgcccagaaguucaacggccugaccgugcucccgccccugcugaccgacgagaugaucgcccaguacaccagcgcccuccuggcggggaccaucacguccggcuggaccuucggggccggcgccgcccugcagauccccuucgcgaugcagauggccuaccgguucaacggcaucggggucacccagaacgugcucuacgagaaccagaagcugaucgccaaccaguucaacagcgccaucggcaagauccaggacucccugagcuccaccgccagcgcgcucgggaagcugcaggacguggucaaccagaacgcccaggcccugaacacgcucgugaagcagcuguccagcaacuucggcgccaucuccagcgugcugaacgacauccucucccgccuggacccgcccgaggccgaggugcagaucgaccggcugaucaccgggcgccuccagagccugcagaccuacgugacccagcagcugauccgggcggccgagauccgcgccagcgccaaccucgccgcgaccaagauguccgagugcguccugggccagagcaagcggguggacuucugcggcaagggguaccaccugauguccuucccccagagcgccccgcacggcguggucuuccuccacgugacguacguccccgcccaggagaagaacuucaccaccgcccccgcgaucugccacgacgggaaggcccacuucccccgcgagggcguguucguguccaacgggacccacugguucgucacgcagcggaacuucuacgagccgcagaucaucaccaccgacaacaccuucgugagcggcaacugcgacguggucaucggcaucgugaacaacacgguguacgacccccugcagcccgagcuggacuccuucaaggaggagcucgacaaguacuucaagaaccacaccagccccgacgucgaccugggggacaucuccggcaucaacgccagcguggugaacauccagaaggagaucgaccgccugaacgaggucgccaagaaccucaacgagucccugaucgaccugcaggagcucgggaaguacgagcaguacaucaaguggccgugguacaucuggcugggcuucaucgccggccugaucgcgaucgugauggugaccaucaugcucugcugcaugaccagcugcugcuccugccugaaggggugcugcagcugcggcuccugcugcaaguucgacgaggacgacagcgagcccguccugaagggggugaagcuccacuacacguga

SEQ ID NO: 23093 - RNA, 3822 nt, Artificial Sequence
  SARS-CoV-2/Wuhan/WIV05/2019__EPI_ISL_402128 spike protein CDS gc (1-1273)(K986P_V987P_K986P_V987P_L18F_T20N_P26S_D138Y_R190S_K417T _E484K_N501Y_D614G_H655Y_T1027I)
auguucguguuccugguccuccugccccuggugagcucccagugcgugaacuucaccaaccgcacgcagcugccgagcgccuacaccaacagcuucacccggggcgucuacuaccccgacaagguguuccgcuccagcgugcugcacuccacccaggaccucuuccugcccuucuucagcaacgucacgugguuccacgccauccacguguccgggaccaacggcaccaagcgguucgacaacccggugcugcccuucaacgacggggucuacuucgcgagcaccgagaaguccaacaucauccgcggcuggaucuucgggacgacccucgacagcaagacccagucccugcugaucgugaacaacgccaccaacguggucaucaaggugugcgaguuccaguucugcaacuaccccuuccucggcguguacuaccacaagaacaacaagagcuggauggaguccgaguuccgggucuacagcuccgccaacaacugcacguucgaguacgugagccagcccuuccugauggaccuggagggcaagcaggggaacuucaagaaccucagcgaguucguguucaagaacaucgacggcuacuucaagaucuacuccaagcacaccccgaucaaccugguccgggaccugccccagggguucagcgcccucgagccccugguggaccugcccaucggcaucaacaucacccgcuuccagacccuccuggcccugcaccgguccuaccucacgccgggggacagcagcuccggcuggaccgcgggcgccgccgccuacuacgugggguaccugcagccccgcaccuuccugcucaaguacaacgagaacggcaccaucacggacgcggucgacugcgcccuggacccccugagcgagaccaagugcacccucaaguccuucaccguggagaaggggaucuaccagacgagcaacuuccgggugcagcccaccgaguccaucguccgcuucccgaacaucaccaaccugugccccuucggcgagguguucaacgccacccgguucgccagcgucuacgccuggaaccgcaagcggaucuccaacugcguggcggacuacagcgugcuguacaacuccgccagcuucuccacguucaagugcuacggcgucagccccaccaagcucaacgaccugugcuucaccaacguguacgccgacuccuucgugauccgcggggacgagguccggcagaucgcccccggccagaccgggaccaucgccgacuacaacuacaagcugccggacgacuucacgggcugcgugaucgcguggaacagcaacaaccucgacuccaaggucgggggcaacuacaacuaccuguaccgccuguuccgcaagagcaaccucaagcccuucgagcgggacaucuccaccgagaucuaccaggccggcagcacccccugcaacggggugaagggcuucaacugcuacuucccccugcaguccuacggguuccagccgaccuacggcgugggguaccagcccuaccggguggucgugcugagcuucgagcuccugcacgcccccgccacggugugcggccccaagaaguccaccaaccuggucaagaacaagugcgugaacuucaacuucaacggccucaccgggaccggcgugcugaccgagagcaacaagaaguuccugccguuccagcaguucgggcgcgacaucgccgacacgaccgacgcgguccgcgacccccagacccuggagauccucgacaucacccccugcagcuucggcgggguguccgugaucacgccgggcaccaacaccagcaaccaggucgccgugcuguaccagggcgugaacugcaccgagguccccguggccauccacgccgaccagcugacgcccaccuggcggguguacuccaccggcagcaacgucuuccagacccgcgccgggugccucaucggcgcggaguacgugaacaacuccuacgagugcgacauccccaucggggccggcaucugcgccagcuaccagacgcagaccaacuccccgcggcgcgcccggagcguggcgucccagagcaucaucgccuacaccaugucccugggcgccgagaacagcgucgccuacuccaacaacagcaucgccauccccaccaacuucacgaucuccgugaccaccgagauccugcccgugagcaugaccaagacgagcgucgacugcaccauguacaucugcggggacuccaccgagugcagcaaccuccugcugcaguacggcuccuucugcacccagcucaaccgcgcgcugacggggaucgccguggagcaggacaagaacacccaggagguguucgcccaggucaagcagaucuacaagacgcccccgaucaaggacuucggcggguucaacuucagccagauccugcccgaccccuccaagcccagcaagcgguccuucaucgaggaccuccuguucaacaaggugacccuggccgacgccggcuucaucaagcaguacggcgacugccucggggacaucgcggcccgcgaccugaucugcgcccagaaguucaacggccugaccgugcucccgccccugcugaccgacgagaugaucgcccaguacaccagcgcccuccuggcggggaccaucacguccggcuggaccuucggggccggcgccgcccugcagauccccuucgcgaugcagauggccuaccgguucaacggcaucggggucacccagaacgugcucuacgagaaccagaagcugaucgccaaccaguucaacagcgccaucggcaagauccaggacucccugagcuccaccgccagcgcgcucgggaagcugcaggacguggucaaccagaacgcccaggcccugaacacgcucgugaagcagcuguccagcaacuucggcgccaucuccagcgugcugaacgacauccucucccgccuggacccgcccgaggccgaggugcagaucgaccggcugaucaccgggcgccuccagagccugcagaccuacgugacccagcagcugauccgggcggccgagauccgcgccagcgccaaccucgccgcgaucaagauguccgagugcguccugggccagagcaagcggguggacuucugcggcaagggguaccaccugauguccuucccccagagcgccccgcacggcguggucuuccuccacgugacguacguccccgcccaggagaagaacuucaccaccgcccccgcgaucugccacgacgggaaggcccacuucccccgcgagggcguguucguguccaacgggacccacugguucgucacgcagcggaacuucuacgagccgcagaucaucaccaccgacaacaccuucgugagcggcaacugcgacguggucaucggcaucgugaacaacacgguguacgacccccugcagcccgagcuggacuccuucaaggaggagcucgacaaguacuucaagaaccacaccagccccgacgucgaccugggggacaucuccggcaucaacgccagcguggugaacauccagaaggagaucgaccgccugaacgaggucgccaagaaccucaacgagucccugaucgaccugcaggagcucgggaaguacgagcaguacaucaaguggccgugguacaucuggcugggcuucaucgccggccugaucgcgaucgugauggugaccaucaugcucugcugcaugaccagcugcugcuccugccugaaggggugcugcagcugcggcuccugcugcaaguucgacgaggacgacagcgagcccguccugaagggggugaagcuccacuacacguga

SEQ ID NO: 23094 - RNA, 3822 nt, Artificial Sequence
  SARS-CoV-2/Wuhan/WIV05/2019__EPI_ISL_402128 spike protein CDS gc (1-1273)(K986P_V987P_K986P_V987P_S13I_W152C_L452R_D614G)
auguucguguuccugguccuccugccccuggugagcauccagugcgugaaccucaccacccgcacgcagcugccgcccgccuacaccaacagcuucacccggggcgucuacuaccccgacaagguguuccgcuccagcgugcugcacuccacccaggaccucuuccugcccuucuucagcaacgucacgugguuccacgccauccacguguccgggaccaacggcaccaagcgguucgacaacccggugcugcccuucaacgacggggucuacuucgcgagcaccgagaaguccaacaucauccgcggcuggaucuucgggacgacccucgacagcaagacccagucccugcugaucgugaacaacgccaccaacguggucaucaaggugugcgaguuccaguucugcaacgaccccuuccucggcguguacuaccacaagaacaacaagagcugcauggaguccgaguuccgggucuacagcuccgccaacaacugcacguucgaguacgugagccagcccuuccugauggaccuggagggcaagcaggggaacuucaagaaccuccgcgaguucguguucaagaacaucgacggcuacuucaagaucuacuccaagcacaccccgaucaaccugguccgggaccugccccagggguucagcgcccucgagccccugguggaccugcccaucggcaucaacaucacccgcuuccagacccuccuggcccugcaccgguccuaccucacgccgggggacagcagcuccggcuggaccgcgggcgccgccgccuacuacgugggguaccugcagccccgcaccuuccugcucaaguacaacgagaacggcaccaucacggacgcggucgacugcgcccuggacccccugagcgagaccaagugcacccucaaguccuucaccguggagaaggggaucuaccagacgagcaacuuccgggugcagcccaccgaguccaucguccgcuucccgaacaucaccaaccugugccccuucggcgagguguucaacgccacccgguucgccagcgucuacgccuggaaccgcaagcggaucuccaacugcguggcggacuacagcgugcuguacaacuccgccagcuucuccacguucaagugcuacggcgucagccccaccaagcucaacgaccugugcuucaccaacguguacgccgacuccuucgugauccgcggggacgagguccggcagaucgcccccggccagaccgggaagaucgccgacuacaacuacaagcugccggacgacuucacgggcugcgugaucgcguggaacagcaacaaccucgacuccaaggucgggggcaacuacaacuaccgcuaccgccuguuccgcaagagcaaccucaagcccuucgagcgggacaucuccaccgagaucuaccaggccggcagcacccccugcaacgggguggagggcuucaacugcuacuucccccugcaguccuacggguuccagccgaccaacggcgugggguaccagcccuaccggguggucgugcugagcuucgagcuccugcacgcccccgccacggugugcggccccaagaaguccaccaaccuggucaagaacaagugcgugaacuucaacuucaacggccucaccgggaccggcgugcugaccgagagcaacaagaaguuccugccguuccagcaguucgggcgcgacaucgccgacacgaccgacgcgguccgcgacccccagacccuggagauccucgacaucacccccugcagcuucggcgggguguccgugaucacgccgggcaccaacaccagcaaccaggucgccgugcuguaccagggcgugaacugcaccgagguccccguggccauccacgccgaccagcugacgcccaccuggcggguguacuccaccggcagcaacgucuuccagacccgcgccgggugccucaucggcgcggagcacgugaacaacuccuacgagugcgacauccccaucggggccggcaucugcgccagcuaccagacgcagaccaacuccccgcggcgcgcccggagcguggcgucccagagcaucaucgccuacaccaugucccugggcgccgagaacagcgucgccuacuccaacaacagcaucgccauccccaccaacuucacgaucuccgugaccaccgagauccugcccgugagcaugaccaagacgagcgucgacugcaccauguacaucugcggggacuccaccgagugcagcaaccuccugcugcaguacggcuccuucugcacccagcucaaccgcgcgcugacggggaucgccguggagcaggacaagaacacccaggagguguucgcccaggucaagcagaucuacaagacgcccccgaucaaggacuucggcggguucaacuucagccagauccugcccgaccccuccaagcccagcaagcgguccuucaucgaggaccuccuguucaacaaggugacccuggccgacgccggcuucaucaagcaguacggcgacugccucggggacaucgcggcccgcgaccugaucugcgcccagaaguucaacggccugaccgugcucccgccccugcugaccgacgagaugaucgcccaguacaccagcgcccuccuggcggggaccaucacguccggcuggaccuucggggccggcgccgcccugcagauccccuucgcgaugcagauggccuaccgguucaacggcaucggggucacccagaacgugcucuacgagaaccagaagcugaucgccaaccaguucaacagcgccaucggcaagauccaggacucccugagcuccaccgccagcgcgcucgggaagcugcaggacguggucaaccagaacgcccaggcccugaacacgcucgugaagcagcuguccagcaacuucggcgccaucuccagcgugcugaacgacauccucucccgccuggacccgcccgaggccgaggugcagaucgaccggcugaucaccgggcgccuccagagccugcagaccuacgugacccagcagcugauccgggcggccgagauccgcgccagcgccaaccucgccgcgaccaagauguccgagugcguccugggccagagcaagcggguggacuucugcggcaagggguaccaccugauguccuucccccagagcgccccgcacggcguggucuuccuccacgugacguacguccccgcccaggagaagaacuucaccaccgcccccgcgaucugccacgacgggaaggcccacuucccccgcgagggcguguucguguccaacgggacccacugguucgucacgcagcggaacuucuacgagccgcagaucaucaccaccgacaacaccuucgugagcggcaacugcgacguggucaucggcaucgugaacaacacgguguacgacccccugcagcccgagcuggacuccuucaaggaggagcucgacaaguacuucaagaaccacaccagccccgacgucgaccugggggacaucuccggcaucaacgccagcguggugaacauccagaaggagaucgaccgccugaacgaggucgccaagaaccucaacgagucccugaucgaccugcaggagcucgggaaguacgagcaguacaucaaguggccgugguacaucuggcugggcuucaucgccggccugaucgcgaucgugauggugaccaucaugcucugcugcaugaccagcugcugcuccugccugaaggggugcugcagcugcggcuccugcugcaaguucgacgaggacgacagcgagcccguccugaagggggugaagcuccacuacacguga

SEQ ID NO: 23095 - RNA, 3822 nt, Artificial Sequence
  SARS-CoV-2/Wuhan/WIV05/2019__EPI_ISL_402128 spike protein CDS gc (1-1273)(K986P_V987P)
auguucguguuccugguccuccugccccuggugagcucccagugcgugaaccucaccacccgcacgcagcugccgcccgccuacaccaacagcuucacccggggcgucuacuaccccgacaagguguuccgcuccagcgugcugcacuccacccaggaccucuuccugcccuucuucagcaacgucacgugguuccacgccauccacguguccgggaccaacggcaccaagcgguucgacaacccggugcugcccuucaacgacggggucuacuucgcgagcaccgagaaguccaacaucauccgcggcuggaucuucgggacgacccucgacagcaagacccagucccugcugaucgugaacaacgccaccaacguggucaucaaggugugcgaguuccaguucugcaacgaccccuuccucggcguguacuaccacaagaacaacaagagcuggauggaguccgaguuccgggucuacagcuccgccaacaacugcacguucgaguacgugagccagcccuuccugauggaccuggagggcaagcaggggaacuucaagaaccuccgcgaguucguguucaagaacaucgacggcuacuucaagaucuacuccaagcacaccccgaucaaccugguccgggaccugccccagggguucagcgcccucgagccccugguggaccugcccaucggcaucaacaucacccgcuuccagacccuccuggcccugcaccgguccuaccucacgccgggggacagcagcuccggcuggaccgcgggcgccgccgccuacuacgugggguaccugcagccccgcaccuuccugcucaaguacaacgagaacggcaccaucacggacgcggucgacugcgcccuggacccccugagcgagaccaagugcacccucaaguccuucaccguggagaaggggaucuaccagacgagcaacuuccgggugcagcccaccgaguccaucguccgcuucccgaacaucaccaaccugugccccuucggcgagguguucaacgccacccgguucgccagcgucuacgccuggaaccgcaagcggaucuccaacugcguggcggacuacagcgugcuguacaacuccgccagcuucuccacguucaagugcuacggcgucagccccaccaagcucaacgaccugugcuucaccaacguguacgccgacuccuucgugauccgcggggacgagguccggcagaucgcccccggccagaccgggaagaucgccgacuacaacuacaagcugccggacgacuucacgggcugcgugaucgcguggaacagcaacaaccucgacuccaaggucgggggcaacuacaacuaccuguaccgccuguuccgcaagagcaaccucaagcccuucgagcgggacaucuccaccgagaucuaccaggccggcagcacccccugcaacgggguggagggcuucaacugcuacuucccccugcaguccuacggguuccagccgaccaacggcgugggguaccagcccuaccggguggucgugcugagcuucgagcuccugcacgcccccgccacggugugcggccccaagaaguccaccaaccuggucaagaacaagugcgugaacuucaacuucaacggccucaccgggaccggcgugcugaccgagagcaacaagaaguuccugccguuccagcaguucgggcgcgacaucgccgacacgaccgacgcgguccgcgacccccagacccuggagauccucgacaucacccccugcagcuucggcgggguguccgugaucacgccgggcaccaacaccagcaaccaggucgccgugcuguaccaggacgugaacugcaccgagguccccguggccauccacgccgaccagcugacgcccaccuggcggguguacuccaccggcagcaacgucuuccagacccgcgccgggugccucaucggcgcggagcacgugaacaacuccuacgagugcgacauccccaucggggccggcaucugcgccagcuaccagacgcagaccaacuccccgcggcgcgcccggagcguggcgucccagagcaucaucgccuacaccaugucccugggcgccgagaacagcgucgccuacuccaacaacagcaucgccauccccaccaacuucacgaucuccgugaccaccgagauccugcccgugagcaugaccaagacgagcgucgacugcaccauguacaucugcggggacuccaccgagugcagcaaccuccugcugcaguacggcuccuucugcacccagcucaaccgcgcgcugacggggaucgccguggagcaggacaagaacacccaggagguguucgcccaggucaagcagaucuacaagacgcccccgaucaaggacuucggcggguucaacuucagccagauccugcccgaccccuccaagcccagcaagcgguccuucaucgaggaccuccuguucaacaaggugacccuggccgacgccggcuucaucaagcaguacggcgacugccucggggacaucgcggcccgcgaccugaucugcgcccagaaguucaacggccugaccgugcucccgccccugcugaccgacgagaugaucgcccaguacaccagcgcccuccuggcggggaccaucacguccggcuggaccuucggggccggcgccgcccugcagauccccuucgcgaugcagauggccuaccgguucaacggcaucggggucacccagaacgugcucuacgagaaccagaagcugaucgccaaccaguucaacagcgccaucggcaagauccaggacucccugagcuccaccgccagcgcgcucgggaagcugcaggacguggucaaccagaacgcccaggcccugaacacgcucgugaagcagcuguccagcaacuucggcgccaucuccagcgugcugaacgacauccucucccgccuggacccgcccgaggccgagguccagaucgaccggcugaucaccgggcgccuccagagccugcagaccuacgugacccagcagcugauccgggcggccgagauccgcgccagcgccaaccucgccgcgaccaagauguccgagugcgugcugggccagagcaagcgggucgacuucugcggcaagggguaccaccugauguccuucccccagagcgcgccccacggcgugguguuccuccacgucacguacgugcccgcccaggagaagaacuucaccaccgccccggccaucugccacgacgggaaggcccacuucccccgcgagggcgucuucguguccaacgggacccacugguucgugacgcagcggaacuucuacgagccccagaucaucaccaccgacaacaccuucgucagcggcaacugcgacguggugaucggcaucgucaacaacacgguguacgacccccugcagccggagcuggacuccuucaaggaggagcucgacaaguacuucaagaaccacaccagccccgacguggaccugggggacaucuccggcaucaacgccagcgucgugaacauccagaaggagaucgaccgccugaacgagguggccaagaaccucaacgagucccugaucgaccugcaggagcucgggaaguacgagcaguacaucaaguggcccugguacaucuggcugggcuucaucgccggccugaucgcgaucgucauggugaccaucaugcucugcugcaugaccagcugcugcuccugccugaaggggugcugcagcugcggcuccugcugcaaguucgacgaggacgacagcgagccggugcugaagggggucaagcuccacuacacguga

SEQ ID NO: 23096 - RNA, 3822 nt, Artificial Sequence
  SARS-CoV-2/Wuhan/WIV05/2019__EPI_ISL_402128 spike protein CDS gc (1-1273)(K986P_V987P_ D614G)
auguucguguuccugguccuccugccccuggugagcucccagugcgugaaccucaccacccgcacgcagcugccgcccgccuacaccaacagcuucacccggggcgucuacuaccccgacaagguguuccgcuccagcgugcugcacuccacccaggaccucuuccugcccuucuucagcaacgucacgugguuccacgccauccacguguccgggaccaacggcaccaagcgguucgacaacccggugcugcccuucaacgacggggucuacuucgcgagcaccgagaaguccaacaucauccgcggcuggaucuucgggacgacccucgacagcaagacccagucccugcugaucgugaacaacgccaccaacguggucaucaaggugugcgaguuccaguucugcaacgaccccuuccucggcguguacuaccacaagaacaacaagagcuggauggaguccgaguuccgggucuacagcuccgccaacaacugcacguucgaguacgugagccagcccuuccugauggaccuggagggcaagcaggggaacuucaagaaccuccgcgaguucguguucaagaacaucgacggcuacuucaagaucuacuccaagcacaccccgaucaaccugguccgggaccugccccagggguucagcgcccucgagccccugguggaccugcccaucggcaucaacaucacccgcuuccagacccuccuggcccugcaccgguccuaccucacgccgggggacagcagcuccggcuggaccgcgggcgccgccgccuacuacgugggguaccugcagccccgcaccuuccugcucaaguacaacgagaacggcaccaucacggacgcggucgacugcgcccuggacccccugagcgagaccaagugcacccucaaguccuucaccguggagaaggggaucuaccagacgagcaacuuccgggugcagcccaccgaguccaucguccgcuucccgaacaucaccaaccugugccccuucggcgagguguucaacgccacccgguucgccagcgucuacgccuggaaccgcaagcggaucuccaacugcguggcggacuacagcgugcuguacaacuccgccagcuucuccacguucaagugcuacggcgucagccccaccaagcucaacgaccugugcuucaccaacguguacgccgacuccuucgugauccgcggggacgagguccggcagaucgcccccggccagaccgggaagaucgccgacuacaacuacaagcugccggacgacuucacgggcugcgugaucgcguggaacagcaacaaccucgacuccaaggucgggggcaacuacaacuaccuguaccgccuguuccgcaagagcaaccucaagcccuucgagcgggacaucuccaccgagaucuaccaggccggcagcacccccugcaacgggguggagggcuucaacugcuacuucccccugcaguccuacggguuccagccgaccaacggcgugggguaccagcccuaccggguggucgugcugagcuucgagcuccugcacgcccccgccacggugugcggccccaagaaguccaccaaccuggucaagaacaagugcgugaacuucaacuucaacggccucaccgggaccggcgugcugaccgagagcaacaagaaguuccugccguuccagcaguucgggcgcgacaucgccgacacgaccgacgcgguccgcgacccccagacccuggagauccucgacaucacccccugcagcuucggcgggguguccgugaucacgccgggcaccaacaccagcaaccaggucgccgugcuguaccagggcgugaacugcaccgagguccccguggccauccacgccgaccagcugacgcccaccuggcggguguacuccaccgggagcaacgucuuccagacccgcgccggcugccucaucggggcggagcacgugaacaacuccuacgagugcgacauccccaucggcgccggcaucugcgccagcuaccagacgcagaccaacuccccgcggcgcgcccggagcguggcgucccagagcaucaucgccuacaccaugucccugggggccgagaacagcgucgccuacuccaacaacagcaucgccauccccaccaacuucacgaucuccgugaccaccgagauccugcccgugagcaugaccaagacgagcgucgacugcaccauguacaucugcggcgacuccaccgagugcagcaaccuccugcugcaguacggguccuucugcacccagcucaaccgcgcgcugacgggcaucgccguggagcaggacaagaacacccaggagguguucgcccaggucaagcagaucuacaagacgcccccgaucaaggacuucgggggcuucaacuucagccagauccugcccgaccccuccaagcccagcaagcgguccuucaucgaggaccuccuguucaacaaggugacccuggccgacgccggcuucaucaagcaguacggggacugccucggcgacaucgcggcccgcgaccugaucugcgcccagaaguucaacgggcugaccgugcucccgccccugcugaccgacgagaugaucgcccaguacaccagcgcccuccuggcgggcaccaucacguccggguggaccuucggcgccggcgccgcccugcagauccccuucgcgaugcagauggccuaccgguucaacgggaucggcgucacccagaacgugcucuacgagaaccagaagcugaucgccaaccaguucaacagcgccaucgggaagauccaggacucccugagcuccaccgccagcgcgcucggcaagcugcaggacguggucaaccagaacgcccaggcccugaacacgcucgugaagcagcuguccagcaacuucggggccaucuccagcgugcugaacgacauccucucccgccuggacccgcccgaggccgagguccagaucgaccggcugaucaccggccgccuccagagccugcagaccuacgugacccagcagcugauccgggcggccgagauccgcgccagcgccaaccucgccgcgaccaagauguccgagugcgugcugggccagagcaagcgggucgacuucugcgggaagggcuaccaccugauguccuucccccagagcgcgccccacggggugguguuccuccacgucacguacgugcccgcccaggagaagaacuucaccaccgccccggccaucugccacgacggcaaggcccacuucccccgcgagggggucuucguguccaacggcacccacugguucgugacgcagcggaacuucuacgagccccagaucaucaccaccgacaacaccuucgucagcggcaacugcgacguggugaucgggaucgucaacaacacgguguacgacccccugcagccggagcuggacuccuucaaggaggagcucgacaaguacuucaagaaccacaccagccccgacguggaccugggcgacaucuccgggaucaacgccagcgucgugaacauccagaaggagaucgaccgccugaacgagguggccaagaaccucaacgagucccugaucgaccugcaggagcucggcaaguacgagcaguacaucaaguggcccugguacaucuggcugggcuucaucgccgggcugaucgcgaucgucauggugaccaucaugcucugcugcaugaccagcugcugcuccugccugaagggcugcugcagcugcggguccugcugcaaguucgacgaggacgacagcgagccggugcugaagggcgucaagcuccacuacacguga

SEQ ID NO: 23097 - RNA, 3822 nt, Artificial Sequence
  SARS-CoV-2/Wuhan/WIV05/2019__EPI_ISL_402128 spike protein CDS gc (1-1273)(K986P_V987P_A222V_D614G)
auguucguguuccugguccuccugccccuggugagcucccagugcgugaaccucaccacccgcacgcagcugccgcccgccuacaccaacagcuucacccggggcgucuacuaccccgacaagguguuccgcuccagcgugcugcacuccacccaggaccucuuccugcccuucuucagcaacgucacgugguuccacgccauccacguguccgggaccaacggcaccaagcgguucgacaacccggugcugcccuucaacgacggggucuacuucgcgagcaccgagaaguccaacaucauccgcggcuggaucuucgggacgacccucgacagcaagacccagucccugcugaucgugaacaacgccaccaacguggucaucaaggugugcgaguuccaguucugcaacgaccccuuccucggcguguacuaccacaagaacaacaagagcuggauggaguccgaguuccgggucuacagcuccgccaacaacugcacguucgaguacgugagccagcccuuccugauggaccuggagggcaagcaggggaacuucaagaaccuccgcgaguucguguucaagaacaucgacggcuacuucaagaucuacuccaagcacaccccgaucaaccugguccgggaccugccccagggguucagcgugcucgagccccugguggaccugcccaucggcaucaacaucacccgcuuccagacccuccuggcccugcaccgguccuaccucacgccgggggacagcagcuccggcuggaccgccggcgcggccgccuacuacgucggguaccugcagccccgcaccuuccugcucaaguacaacgagaacggcaccaucacggacgccguggacugcgcgcuggacccccugagcgagaccaagugcacccucaaguccuucaccguggagaaggggaucuaccagacgagcaacuuccggguccagcccaccgaguccaucgugcgcuucccgaacaucaccaaccugugccccuucggcgaggucuucaacgccacccgguucgccagcguguacgccuggaaccgcaagcggaucuccaacugcguggccgacuacagcguccuguacaacuccgcgagcuucuccacguucaagugcuacggcgugagccccaccaagcucaacgaccugugcuucaccaacguguacgccgacuccuucgucauccgcggggacgaggugcggcagaucgcccccggccagaccgggaagaucgccgacuacaacuacaagcugccggacgacuucacgggcugcgugaucgccuggaacagcaacaaccucgacuccaaggucgggggcaacuacaacuaccuguaccgccuguuccgcaagagcaaccucaagcccuucgagcgggacaucuccaccgagaucuaccaggcgggcagcacccccugcaacgggguggagggcuucaacugcuacuucccccugcaguccuacggguuccagccgaccaacggcgugggguaccagcccuaccgggucguggugcugagcuucgagcuccugcacgcccccgccacggucugcggccccaagaaguccaccaaccuggugaagaacaagugcgugaacuucaacuucaacggccucaccgggaccggcguccugaccgagagcaacaagaaguuccugccguuccagcaguucgggcgcgacaucgccgacacgaccgacgccgugcgcgacccccagacccuggagauccucgacaucacccccugcagcuucggcgggguguccgucaucacgccgggcaccaacaccagcaaccagguggcggugcuguaccagggcgucaacugcaccgaggugcccguggccauccacgccgaccagcugacgcccaccuggcgggucuacuccaccgggagcaacguguuccagacccgcgccggcugccucaucggggccgagcacgugaacaacuccuacgagugcgacauccccaucggcgcgggcaucugcgccagcuaccagacgcagaccaacuccccgcggcgcgcccggagcgucgccucccagagcaucaucgcguacaccaugucccugggggccgagaacagcguggccuacuccaacaacagcaucgccauccccaccaacuucacgaucuccgugaccaccgagauccugcccgucagcaugaccaagacgagcguggacugcaccauguacaucugcggcgacuccaccgagugcagcaaccuccugcugcaguacggguccuucugcacccagcucaaccgcgcccugacgggcaucgcgguggagcaggacaagaacacccaggaggucuucgcccaggugaagcagaucuacaagacgcccccgaucaaggacuucgggggcuucaacuucagccagauccugcccgaccccuccaagcccagcaagcgguccuucaucgaggaccuccuguucaacaaggugacccuggccgacgccggcuucaucaagcaguacggggacugccucggcgacaucgccgcgcgcgaccugaucugcgcccagaaguucaacgggcugaccguccucccgccccugcugaccgacgagaugaucgcccaguacaccagcgcccuccuggccggcaccaucacguccggguggaccuucggcgcgggcgccgcccugcagauccccuucgccaugcagauggcguaccgguucaacgggaucggcgugacccagaacgugcucuacgagaaccagaagcugaucgccaaccaguucaacagcgccaucgggaagauccaggacucccugagcuccaccgccagcgcccucggcaagcugcaggacgucgugaaccagaacgcgcaggcccugaacacgcucgugaagcagcuguccagcaacuucggggccaucuccagcguccugaacgacauccucucccgccuggacccgcccgaggccgaggugcagaucgaccggcugaucaccggccgccuccagagccugcagaccuacgugacccagcagcugauccgggccgcggagauccgcgccagcgccaaccucgccgccaccaagauguccgagugcguccugggccagagcaagcggguggacuucugcgggaagggcuaccaccugauguccuucccccagagcgcgccccacgggguggucuuccuccacgugacguacguccccgcccaggagaagaacuucaccaccgccccggccaucugccacgacggcaaggcgcacuucccccgcgaggggguguucguguccaacggcacccacugguucgucacgcagcggaacuucuacgagccccagaucaucaccaccgacaacaccuucgugagcggcaacugcgacguggucaucgggaucgugaacaacacgguguacgacccccugcagccggagcuggacuccuucaaggaggagcucgacaaguacuucaagaaccacaccagccccgacgucgaccugggcgacaucuccgggaucaacgccagcguggugaacauccagaaggagaucgaccgccugaacgaggucgccaagaaccucaacgagucccugaucgaccugcaggagcucggcaaguacgagcaguacaucaaguggcccugguacaucuggcugggcuucaucgccgggcugaucgccaucgugauggugaccaucaugcucugcugcaugaccagcugcugcuccugccugaagggcugcugcagcugcggguccugcugcaaguucgacgaggacgacagcgagccgguccugaagggcgugaagcuccacuacacguga

SEQ ID NO: 23098 - RNA, 3822 nt, Artificial Sequence
  SARS-CoV-2/Wuhan/WIV05/2019__EPI_ISL_402128 spike protein CDS gc (1-1273)(K986P_V987P_N439K_D614G)
auguucguguuccugguccuccugccccuggugagcucccagugcgugaaccucaccacccgcacgcagcugccgcccgccuacaccaacagcuucacccggggcgucuacuaccccgacaagguguuccgcuccagcgugcugcacuccacccaggaccucuuccugcccuucuucagcaacgucacgugguuccacgccauccacguguccgggaccaacggcaccaagcgguucgacaacccggugcugcccuucaacgacggggucuacuucgcgagcaccgagaaguccaacaucauccgcggcuggaucuucgggacgacccucgacagcaagacccagucccugcugaucgugaacaacgccaccaacguggucaucaaggugugcgaguuccaguucugcaacgaccccuuccucggcguguacuaccacaagaacaacaagagcuggauggaguccgaguuccgggucuacagcuccgccaacaacugcacguucgaguacgugagccagcccuuccugauggaccuggagggcaagcaggggaacuucaagaaccuccgcgaguucguguucaagaacaucgacggcuacuucaagaucuacuccaagcacaccccgaucaaccugguccgggaccugccccagggguucagcgcccucgagccccugguggaccugcccaucggcaucaacaucacccgcuuccagacccuccuggcccugcaccgguccuaccucacgccgggggacagcagcuccggcuggaccgcgggcgccgccgccuacuacgugggguaccugcagccccgcaccuuccugcucaaguacaacgagaacggcaccaucacggacgcggucgacugcgcccuggacccccugagcgagaccaagugcacccucaaguccuucaccguggagaaggggaucuaccagacgagcaacuuccgggugcagcccaccgaguccaucguccgcuucccgaacaucaccaaccugugccccuucggcgagguguucaacgccacccgguucgccagcgucuacgccuggaaccgcaagcggaucuccaacugcguggcggacuacagcgugcuguacaacuccgccagcuucuccacguucaagugcuacggcgucagccccaccaagcucaacgaccugugcuucaccaacguguacgccgacuccuucgugauccgcggggacgagguccggcagaucgcccccggccagaccgggaagaucgccgacuacaacuacaagcugccggacgacuucacgggcugcgugaucgcguggaacagcaagaaccucgacuccaaggucgggggcaacuacaacuaccuguaccgccuguuccgcaagagcaaccucaagcccuucgagcgggacaucuccaccgagaucuaccaggccggcagcacccccugcaacgggguggagggcuucaacugcuacuucccccugcaguccuacggguuccagccgaccaacggcgugggguaccagcccuaccggguggucgugcugagcuucgagcuccugcacgcccccgccacggugugcggccccaagaaguccaccaaccuggucaagaacaagugcgugaacuucaacuucaacggccucaccgggaccggcgugcugaccgagagcaacaagaaguuccugccguuccagcaguucgggcgcgacaucgccgacacgaccgacgcgguccgcgacccccagacccuggagauccucgacaucacccccugcagcuucggcgggguguccgugaucacgccgggcaccaacaccagcaaccaggucgccgugcuguaccagggcgugaacugcaccgagguccccguggccauccacgccgaccagcugacgcccaccuggcggguguacuccaccgggagcaacgucuuccagacccgcgccggcugccucaucggggcggagcacgugaacaacuccuacgagugcgacauccccaucggcgccggcaucugcgccagcuaccagacgcagaccaacuccccgcggcgcgcccggagcguggcgucccagagcaucaucgccuacaccaugucccugggggccgagaacagcgucgccuacuccaacaacagcaucgccauccccaccaacuucacgaucuccgugaccaccgagauccugcccgugagcaugaccaagacgagcgucgacugcaccauguacaucugcggcgacuccaccgagugcagcaaccuccugcugcaguacggguccuucugcacccagcucaaccgcgcgcugacgggcaucgccguggagcaggacaagaacacccaggagguguucgcccaggucaagcagaucuacaagacgcccccgaucaaggacuucgggggcuucaacuucagccagauccugcccgaccccuccaagcccagcaagcgguccuucaucgaggaccuccuguucaacaaggugacccuggccgacgccggcuucaucaagcaguacggggacugccucggcgacaucgcggcccgcgaccugaucugcgcccagaaguucaacgggcugaccgugcucccgccccugcugaccgacgagaugaucgcccaguacaccagcgcccuccuggcgggcaccaucacguccggguggaccuucggcgccggcgccgcccugcagauccccuucgcgaugcagauggccuaccgguucaacgggaucggcgucacccagaacgugcucuacgagaaccagaagcugaucgccaaccaguucaacagcgccaucgggaagauccaggacucccugagcuccaccgccagcgcgcucggcaagcugcaggacguggucaaccagaacgcccaggcccugaacacgcucgugaagcagcuguccagcaacuucggggccaucuccagcgugcugaacgacauccucucccgccuggacccgcccgaggccgagguccagaucgaccggcugaucaccggccgccuccagagccugcagaccuacgugacccagcagcugauccgggcggccgagauccgcgccagcgccaaccucgccgcgaccaagauguccgagugcgugcugggccagagcaagcgggucgacuucugcgggaagggcuaccaccugauguccuucccccagagcgcgccccacggggugguguuccuccacgucacguacgugcccgcccaggagaagaacuucaccaccgccccggccaucugccacgacggcaaggcccacuucccccgcgagggggucuucguguccaacggcacccacugguucgugacgcagcggaacuucuacgagccccagaucaucaccaccgacaacaccuucgucagcggcaacugcgacguggugaucgggaucgucaacaacacgguguacgacccccugcagccggagcuggacuccuucaaggaggagcucgacaaguacuucaagaaccacaccagccccgacguggaccugggcgacaucuccgggaucaacgccagcgucgugaacauccagaaggagaucgaccgccugaacgagguggccaagaaccucaacgagucccugaucgaccugcaggagcucggcaaguacgagcaguacaucaaguggcccugguacaucuggcugggcuucaucgccgggcugaucgcgaucgucauggugaccaucaugcucugcugcaugaccagcugcugcuccugccugaagggcugcugcagcugcggguccugcugcaaguucgacgaggacgacagcgagccggugcugaagggcgucaagcuccacuacacguga

SEQ ID NO: 23099 - RNA, 3822 nt, Artificial Sequence
  SARS-CoV-2/Wuhan/WIV05/2019__EPI_ISL_402128 spike protein CDS gc (1-1273)(K986P_V987P_S477N_D614G)
auguucguguuccugguccuccugccccuggugagcucccagugcgugaaccucaccacccgcacgcagcugccgcccgccuacaccaacagcuucacccggggcgucuacuaccccgacaagguguuccgcuccagcgugcugcacuccacccaggaccucuuccugcccuucuucagcaacgucacgugguuccacgccauccacguguccgggaccaacggcaccaagcgguucgacaacccggugcugcccuucaacgacggggucuacuucgcgagcaccgagaaguccaacaucauccgcggcuggaucuucgggacgacccucgacagcaagacccagucccugcugaucgugaacaacgccaccaacguggucaucaaggugugcgaguuccaguucugcaacgaccccuuccucggcguguacuaccacaagaacaacaagagcuggauggaguccgaguuccgggucuacagcuccgccaacaacugcacguucgaguacgugagccagcccuuccugauggaccuggagggcaagcaggggaacuucaagaaccuccgcgaguucguguucaagaacaucgacggcuacuucaagaucuacuccaagcacaccccgaucaaccugguccgggaccugccccagggguucagcgcccucgagccccugguggaccugcccaucggcaucaacaucacccgcuuccagacccuccuggcccugcaccgguccuaccucacgccgggggacagcagcuccggcuggaccgcgggcgccgccgccuacuacgugggguaccugcagccccgcaccuuccugcucaaguacaacgagaacggcaccaucacggacgcggucgacugcgcccuggacccccugagcgagaccaagugcacccucaaguccuucaccguggagaaggggaucuaccagacgagcaacuuccgggugcagcccaccgaguccaucguccgcuucccgaacaucaccaaccugugccccuucggcgagguguucaacgccacccgguucgccagcgucuacgccuggaaccgcaagcggaucuccaacugcguggcggacuacagcgugcuguacaacuccgccagcuucuccacguucaagugcuacggcgucagccccaccaagcucaacgaccugugcuucaccaacguguacgccgacuccuucgugauccgcggggacgagguccggcagaucgcccccggccagaccgggaagaucgccgacuacaacuacaagcugccggacgacuucacgggcugcgugaucgcguggaacagcaacaaccucgacuccaaggucgggggcaacuacaacuaccuguaccgccuguuccgcaagagcaaccucaagcccuucgagcgggacaucuccaccgagaucuaccaggccggcaacacccccugcaacgggguggagggcuucaacugcuacuucccccugcagagcuacggguuccagccgaccaacggcgugggguaccagcccuaccggguggucgugcuguccuucgagcuccugcacgcccccgccacggugugcggccccaagaaguccaccaaccuggucaagaacaagugcgugaacuucaacuucaacggccucaccgggaccggcgugcugaccgagagcaacaagaaguuccugccguuccagcaguucgggcgcgacaucgccgacacgaccgacgcgguccgcgacccccagacccuggagauccucgacaucacccccugcagcuucggcggggugagcgugaucacgccgggcaccaacaccuccaaccaggucgccgugcuguaccagggcgugaacugcaccgagguccccguggccauccacgccgaccagcugacgcccaccuggcggguguacagcaccggguccaacgucuuccagacccgcgccggcugccucaucggggcggagcacgugaacaacagcuacgagugcgacauccccaucggcgccggcaucugcgccuccuaccagacgcagaccaacagcccgcggcgcgcccgguccguggcgagccaguccaucaucgccuacaccaugagccugggggccgagaacuccgucgccuacagcaacaacuccaucgccauccccaccaacuucacgaucagcgugaccaccgagauccugcccguguccaugaccaagacgagcgucgacugcaccauguacaucugcggcgacagcaccgagugcuccaaccuccugcugcaguacgggagcuucugcacccagcucaaccgcgcgcugacgggcaucgccguggagcaggacaagaacacccaggagguguucgcccaggucaagcagaucuacaagacgcccccgaucaaggacuucgggggcuucaacuucucccagauccugcccgaccccagcaagcccuccaagcggagcuucaucgaggaccuccuguucaacaaggugacccuggccgacgccggcuucaucaagcaguacggggacugccucggcgacaucgcggcccgcgaccugaucugcgcccagaaguucaacgggcugaccgugcucccgccccugcugaccgacgagaugaucgcccaguacaccuccgcccuccuggcgggcaccaucacgagcggguggaccuucggcgccggcgccgcccugcagauccccuucgcgaugcagauggccuaccgguucaacgggaucggcgucacccagaacgugcucuacgagaaccagaagcugaucgccaaccaguucaacuccgccaucgggaagauccaggacagccuguccagcaccgccuccgcgcucggcaagcugcaggacguggucaaccagaacgcccaggcccugaacacgcucgugaagcagcugagcuccaacuucggggccaucagcuccgugcugaacgacauccucagccgccuggacccgcccgaggccgagguccagaucgaccggcugaucaccggccgccuccagucccugcagaccuacgugacccagcagcugauccgggcggccgagauccgcgccagcgccaaccucgccgcgaccaagaugagcgagugcgugcugggccaguccaagcgggucgacuucugcgggaagggcuaccaccugaugagcuucccccaguccgcgccccacggggugguguuccuccacgucacguacgugcccgcccaggagaagaacuucaccaccgccccggccaucugccacgacggcaaggcccacuucccccgcgagggggucuucgugagcaacggcacccacugguucgugacgcagcggaacuucuacgagccccagaucaucaccaccgacaacaccuucgucuccggcaacugcgacguggugaucgggaucgucaacaacacgguguacgacccccugcagccggagcuggacagcuucaaggaggagcucgacaaguacuucaagaaccacaccucccccgacguggaccugggcgacaucagcgggaucaacgccuccgucgugaacauccagaaggagaucgaccgccugaacgagguggccaagaaccucaacgagagccugaucgaccugcaggagcucggcaaguacgagcaguacaucaaguggcccugguacaucuggcugggcuucaucgccgggcugaucgcgaucgucauggugaccaucaugcucugcugcaugaccuccugcugcagcugccugaagggcugcugcuccugcgggagcugcugcaaguucgacgaggacgacuccgagccggugcugaagggcgucaagcuccacuacacguga

SEQ ID NO: 23100 - RNA, 3822 nt, Artificial Sequence
  SARS-CoV-2/Wuhan/WIV05/2019__EPI_ISL_402128 spike protein CDS gc (1-1273)(K986P_V987P_N501Y_D614G)
auguucguguuccugguccuccugccccuggugagcucccagugcgugaaccucaccacccgcacgcagcugccgcccgccuacaccaacagcuucacccggggcgucuacuaccccgacaagguguuccgcuccagcgugcugcacuccacccaggaccucuuccugcccuucuucagcaacgucacgugguuccacgccauccacguguccgggaccaacggcaccaagcgguucgacaacccggugcugcccuucaacgacggggucuacuucgcgagcaccgagaaguccaacaucauccgcggcuggaucuucgggacgacccucgacagcaagacccagucccugcugaucgugaacaacgccaccaacguggucaucaaggugugcgaguuccaguucugcaacgaccccuuccucggcguguacuaccacaagaacaacaagagcuggauggaguccgaguuccgggucuacagcuccgccaacaacugcacguucgaguacgugagccagcccuuccugauggaccuggagggcaagcaggggaacuucaagaaccuccgcgaguucguguucaagaacaucgacggcuacuucaagaucuacuccaagcacaccccgaucaaccugguccgggaccugccccagggguucagcgcccucgagccccugguggaccugcccaucggcaucaacaucacccgcuuccagacccuccuggcccugcaccgguccuaccucacgccgggggacagcagcuccggcuggaccgcgggcgccgccgccuacuacgugggguaccugcagccccgcaccuuccugcucaaguacaacgagaacggcaccaucacggacgcggucgacugcgcccuggacccccugagcgagaccaagugcacccucaaguccuucaccguggagaaggggaucuaccagacgagcaacuuccgggugcagcccaccgaguccaucguccgcuucccgaacaucaccaaccugugccccuucggcgagguguucaacgccacccgguucgccagcgucuacgccuggaaccgcaagcggaucuccaacugcguggcggacuacagcgugcuguacaacuccgccagcuucuccacguucaagugcuacggcgucagccccaccaagcucaacgaccugugcuucaccaacguguacgccgacuccuucgugauccgcggggacgagguccggcagaucgcccccggccagaccgggaagaucgccgacuacaacuacaagcugccggacgacuucacgggcugcgugaucgcguggaacagcaacaaccucgacuccaaggucgggggcaacuacaacuaccuguaccgccuguuccgcaagagcaaccucaagcccuucgagcgggacaucuccaccgagaucuaccaggccggcagcacccccugcaacgggguggagggcuucaacugcuacuucccccugcaguccuacggguuccagccgaccuacggcgugggguaccagcccuaccggguggucgugcugagcuucgagcuccugcacgcccccgccacggugugcggccccaagaaguccaccaaccuggucaagaacaagugcgugaacuucaacuucaacggccucaccgggaccggcgugcugaccgagagcaacaagaaguuccugccguuccagcaguucgggcgcgacaucgccgacacgaccgacgcgguccgcgacccccagacccuggagauccucgacaucacccccugcagcuucggcgggguguccgugaucacgccgggcaccaacaccagcaaccaggucgccgugcuguaccagggcgugaacugcaccgagguccccguggccauccacgccgaccagcugacgcccaccuggcggguguacuccaccgggagcaacgucuuccagacccgcgccggcugccucaucggggcggagcacgugaacaacuccuacgagugcgacauccccaucggcgccggcaucugcgccagcuaccagacgcagaccaacuccccgcggcgcgcccggagcguggcgucccagagcaucaucgccuacaccaugucccugggggccgagaacagcgucgccuacuccaacaacagcaucgccauccccaccaacuucacgaucuccgugaccaccgagauccugcccgugagcaugaccaagacgagcgucgacugcaccauguacaucugcggcgacuccaccgagugcagcaaccuccugcugcaguacggguccuucugcacccagcucaaccgcgcgcugacgggcaucgccguggagcaggacaagaacacccaggagguguucgcccaggucaagcagaucuacaagacgcccccgaucaaggacuucgggggcuucaacuucagccagauccugcccgaccccuccaagcccagcaagcgguccuucaucgaggaccuccuguucaacaaggugacccuggccgacgccggcuucaucaagcaguacggggacugccucggcgacaucgcggcccgcgaccugaucugcgcccagaaguucaacgggcugaccgugcucccgccccugcugaccgacgagaugaucgcccaguacaccagcgcccuccuggcgggcaccaucacguccggguggaccuucggcgccggcgccgcccugcagauccccuucgcgaugcagauggccuaccgguucaacgggaucggcgucacccagaacgugcucuacgagaaccagaagcugaucgccaaccaguucaacagcgccaucgggaagauccaggacucccugagcuccaccgccagcgcgcucggcaagcugcaggacguggucaaccagaacgcccaggcccugaacacgcucgugaagcagcuguccagcaacuucggggccaucuccagcgugcugaacgacauccucucccgccuggacccgcccgaggccgagguccagaucgaccggcugaucaccggccgccuccagagccugcagaccuacgugacccagcagcugauccgggcggccgagauccgcgccagcgccaaccucgccgcgaccaagauguccgagugcgugcugggccagagcaagcgggucgacuucugcgggaagggcuaccaccugauguccuucccccagagcgcgccccacggggugguguuccuccacgucacguacgugcccgcccaggagaagaacuucaccaccgccccggccaucugccacgacggcaaggcccacuucccccgcgagggggucuucguguccaacggcacccacugguucgugacgcagcggaacuucuacgagccccagaucaucaccaccgacaacaccuucgucagcggcaacugcgacguggugaucgggaucgucaacaacacgguguacgacccccugcagccggagcuggacuccuucaaggaggagcucgacaaguacuucaagaaccacaccagccccgacguggaccugggcgacaucuccgggaucaacgccagcgucgugaacauccagaaggagaucgaccgccugaacgagguggccaagaaccucaacgagucccugaucgaccugcaggagcucggcaaguacgagcaguacaucaaguggcccugguacaucuggcugggcuucaucgccgggcugaucgcgaucgucauggugaccaucaugcucugcugcaugaccagcugcugcuccugccugaagggcugcugcagcugcggguccugcugcaaguucgacgaggacgacagcgagccggugcugaagggcgucaagcuccacuacacguga

SEQ ID NO: 23101 - RNA, 3816 nt, Artificial Sequence
  SARS-CoV-2/Wuhan/WIV05/2019__EPI_ISL_402128 spike protein CDS gc (1-1273)(K986P_V987P_H69del_V70del_D614G)
auguucguguuccugguccuccugccccuggugagcucccagugcgugaaccucaccacccgcacgcagcugccgcccgccuacaccaacagcuucacccggggcgucuacuaccccgacaagguguuccgcuccagcgugcugcacuccacccaggaccucuuccugcccuucuucagcaacgucacgugguuccacgccaucuccgggaccaacggcaccaagcgguucgacaacccggugcugcccuucaacgacgggguguacuucgcgagcaccgagaaguccaacaucauccgcggcuggaucuucgggacgacccucgacagcaagacccagucccugcugaucgucaacaacgccaccaacguggugaucaaggucugcgaguuccaguucugcaacgaccccuuccucggcguguacuaccacaagaacaacaagagcuggauggaguccgaguuccggguguacagcuccgccaacaacugcacguucgaguacgucagccagcccuuccugauggaccuggagggcaagcaggggaacuucaagaaccuccgcgaguucguguucaagaacaucgacggcuacuucaagaucuacuccaagcacaccccgaucaaccuggugcgggaccugccccagggguucagcgcccucgagccccuggucgaccugcccaucggcaucaacaucacccgcuuccagacccuccuggcccugcaccgguccuaccucacgccgggggacagcagcuccggcuggaccgcgggcgccgccgccuacuacgugggguaccugcagccccgcaccuuccugcucaaguacaacgagaacggcaccaucacggacgcgguggacugcgcccuggacccccugagcgagaccaagugcacccucaaguccuucaccgucgagaaggggaucuaccagacgagcaacuuccgggugcagcccaccgaguccaucgugcgcuucccgaacaucaccaaccugugccccuucggcgaggucuucaacgccacccgguucgccagcguguacgccuggaaccgcaagcggaucuccaacugcgucgcggacuacagcgugcuguacaacuccgccagcuucuccacguucaagugcuacggcgugagccccaccaagcucaacgaccugugcuucaccaacgucuacgccgacuccuucgugauccgcggggacgaggugcggcagaucgcccccggccagaccgggaagaucgccgacuacaacuacaagcugccggacgacuucacgggcugcgucaucgcguggaacagcaacaaccucgacuccaaggucgggggcaacuacaacuaccuguaccgccuguuccgcaagagcaaccucaagcccuucgagcgggacaucuccaccgagaucuaccaggccggcagcacccccugcaacgggguggagggcuucaacugcuacuucccccugcaguccuacggguuccagccgaccaacggcgugggguaccagcccuaccggguggugguccugagcuucgagcuccugcacgcccccgccacggugugcggccccaagaaguccaccaaccuggugaagaacaagugcgucaacuucaacuucaacggccucaccgggaccggcgugcugaccgagagcaacaagaaguuccugccguuccagcaguucgggcgcgacaucgccgacacgaccgacgcggugcgcgacccccagacccuggagauccucgacaucacccccugcagcuucggcggggucuccgugaucacgccgggcaccaacaccagcaaccagguggccguccuguaccagggcgugaacugcaccgaggugcccgucgccauccacgccgaccagcugacgcccaccuggcggguguacuccaccgggagcaacguguuccagacccgcgccggcugccucaucggggcggagcacgucaacaacuccuacgagugcgacauccccaucggcgccggcaucugcgccagcuaccagacgcagaccaacuccccgcggcgcgcccggagcguggcgucccagagcaucaucgccuacaccaugucccugggggccgagaacagcguggccuacuccaacaacagcaucgccauccccaccaacuucacgaucuccgucaccaccgagauccugcccgugagcaugaccaagacgagcguggacugcaccauguacaucugcggcgacuccaccgagugcagcaaccuccugcugcaguacggguccuucugcacccagcucaaccgcgcgcugacgggcaucgccgucgagcaggacaagaacacccaggagguguucgcccaggugaagcagaucuacaagacgcccccgaucaaggacuucgggggcuucaacuucagccagauccugcccgaccccuccaagcccagcaagcgguccuucaucgaggaccuccuguucaacaaggucacccuggccgacgccggcuucaucaagcaguacggggacugccucggcgacaucgcggcccgcgaccugaucugcgcccagaaguucaacgggcugaccgugcucccgccccugcugaccgacgagaugaucgcccaguacaccagcgcccuccuggcgggcaccaucacguccggguggaccuucggcgccggcgccgcccugcagauccccuucgcgaugcagauggccuaccgguucaacgggaucggcgugacccagaacguccucuacgagaaccagaagcugaucgccaaccaguucaacagcgccaucgggaagauccaggacucccugagcuccaccgccagcgcgcucggcaagcugcaggacguggugaaccagaacgcccaggcccugaacacgcucgucaagcagcuguccagcaacuucggggccaucuccagcgugcugaacgacauccucucccgccuggacccgcccgaggccgaggugcagaucgaccggcugaucaccggccgccuccagagccugcagaccuacgucacccagcagcugauccgggcggccgagauccgcgccagcgccaaccucgccgcgaccaagauguccgagugcgugcugggccagagcaagcggguggacuucugcgggaagggcuaccaccugauguccuucccccagagcgcgccccacggggucguguuccuccacgugacguacguccccgcccaggagaagaacuucaccaccgccccggccaucugccacgacggcaaggcccacuucccccgcgaggggguguucgucuccaacggcacccacugguucgugacgcagcggaacuucuacgagccccagaucaucaccaccgacaacaccuucgugagcggcaacugcgacgucgugaucgggaucgugaacaacacggucuacgacccccugcagccggagcuggacuccuucaaggaggagcucgacaaguacuucaagaaccacaccagccccgacguggaccugggcgacaucuccgggaucaacgccagcguggucaacauccagaaggagaucgaccgccugaacgagguggccaagaaccucaacgagucccugaucgaccugcaggagcucggcaaguacgagcaguacaucaaguggcccugguacaucuggcugggcuucaucgccgggcugaucgcgaucgugauggucaccaucaugcucugcugcaugaccagcugcugcuccugccugaagggcugcugcagcugcggguccugcugcaaguucgacgaggacgacagcgagccggugcugaagggcgugaagcuccacuacacguga

SEQ ID NO: 23102 - RNA, 3822 nt, Artificial Sequence
  SARS-CoV-2/Wuhan/WIV05/2019__EPI_ISL_402128 spike protein CDS gc (1-1273)(K986P_V987P_Y453F_D614G)
auguucguguuccugguccuccugccccuggugagcucccagugcgugaaccucaccacccgcacgcagcugccgcccgccuacaccaacagcuucacccggggcgucuacuaccccgacaagguguuccgcuccagcgugcugcacuccacccaggaccucuuccugcccuucuucagcaacgucacgugguuccacgccauccacguguccgggaccaacggcaccaagcgguucgacaacccggugcugcccuucaacgacggggucuacuucgcgagcaccgagaaguccaacaucauccgcggcuggaucuucgggacgacccucgacagcaagacccagucccugcugaucgugaacaacgccaccaacguggucaucaaggugugcgaguuccaguucugcaacgaccccuuccucggcguguacuaccacaagaacaacaagagcuggauggaguccgaguuccgggucuacagcuccgccaacaacugcacguucgaguacgugagccagcccuuccugauggaccuggagggcaagcaggggaacuucaagaaccuccgcgaguucguguucaagaacaucgacggcuacuucaagaucuacuccaagcacaccccgaucaaccugguccgggaccugccccagggguucagcgcccucgagccccugguggaccugcccaucggcaucaacaucacccgcuuccagacccuccuggcccugcaccgguccuaccucacgccgggggacagcagcuccggcuggaccgcgggcgccgccgccuacuacgugggguaccugcagccccgcaccuuccugcucaaguacaacgagaacggcaccaucacggacgcggucgacugcgcccuggacccccugagcgagaccaagugcacccucaaguccuucaccguggagaaggggaucuaccagacgagcaacuuccgggugcagcccaccgaguccaucguccgcuucccgaacaucaccaaccugugccccuucggcgagguguucaacgccacccgguucgccagcgucuacgccuggaaccgcaagcggaucuccaacugcguggcggacuacagcgugcuguacaacuccgccagcuucuccacguucaagugcuacggcgucagccccaccaagcucaacgaccugugcuucaccaacguguacgccgacuccuucgugauccgcggggacgagguccggcagaucgcccccggccagaccgggaagaucgccgacuacaacuacaagcugccggacgacuucacgggcugcgugaucgcguggaacagcaacaaccucgacuccaaggucgggggcaacuacaacuaccuguuccgccuguuccgcaagagcaaccucaagcccuucgagcgggacaucuccaccgagaucuaccaggccggcagcacccccugcaacgggguggagggcuucaacugcuacuucccccugcaguccuacggguuccagccgaccaacggcgugggguaccagcccuaccggguggucgugcugagcuucgagcuccugcacgcccccgccacggugugcggccccaagaaguccaccaaccuggucaagaacaagugcgugaacuucaacuucaacggccucaccgggaccggcgugcugaccgagagcaacaagaaguuccugccguuccagcaguucgggcgcgacaucgccgacacgaccgacgcgguccgcgacccccagacccuggagauccucgacaucacccccugcagcuucggcgggguguccgugaucacgccgggcaccaacaccagcaaccaggucgccgugcuguaccagggcgugaacugcaccgagguccccguggccauccacgccgaccagcugacgcccaccuggcggguguacuccaccgggagcaacgucuuccagacccgcgccggcugccucaucggggcggagcacgugaacaacuccuacgagugcgacauccccaucggcgccggcaucugcgccagcuaccagacgcagaccaacuccccgcggcgcgcccggagcguggcgucccagagcaucaucgccuacaccaugucccugggggccgagaacagcgucgccuacuccaacaacagcaucgccauccccaccaacuucacgaucuccgugaccaccgagauccugcccgugagcaugaccaagacgagcgucgacugcaccauguacaucugcggcgacuccaccgagugcagcaaccuccugcugcaguacggguccuucugcacccagcucaaccgcgcgcugacgggcaucgccguggagcaggacaagaacacccaggagguguucgcccaggucaagcagaucuacaagacgcccccgaucaaggacuucgggggcuucaacuucagccagauccugcccgaccccuccaagcccagcaagcgguccuucaucgaggaccuccuguucaacaaggugacccuggccgacgccggcuucaucaagcaguacggggacugccucggcgacaucgcggcccgcgaccugaucugcgcccagaaguucaacgggcugaccgugcucccgccccugcugaccgacgagaugaucgcccaguacaccagcgcccuccuggcgggcaccaucacguccggguggaccuucggcgccggcgccgcccugcagauccccuucgcgaugcagauggccuaccgguucaacgggaucggcgucacccagaacgugcucuacgagaaccagaagcugaucgccaaccaguucaacagcgccaucgggaagauccaggacucccugagcuccaccgccagcgcgcucggcaagcugcaggacguggucaaccagaacgcccaggcccugaacacgcucgugaagcagcuguccagcaacuucggggccaucuccagcgugcugaacgacauccucucccgccuggacccgcccgaggccgagguccagaucgaccggcugaucaccggccgccuccagagccugcagaccuacgugacccagcagcugauccgggcggccgagauccgcgccagcgccaaccucgccgcgaccaagauguccgagugcgugcugggccagagcaagcgggucgacuucugcgggaagggcuaccaccugauguccuucccccagagcgcgccccacggggugguguuccuccacgucacguacgugcccgcccaggagaagaacuucaccaccgccccggccaucugccacgacggcaaggcccacuucccccgcgagggggucuucguguccaacggcacccacugguucgugacgcagcggaacuucuacgagccccagaucaucaccaccgacaacaccuucgucagcggcaacugcgacguggugaucgggaucgucaacaacacgguguacgacccccugcagccggagcuggacuccuucaaggaggagcucgacaaguacuucaagaaccacaccagccccgacguggaccugggcgacaucuccgggaucaacgccagcgucgugaacauccagaaggagaucgaccgccugaacgagguggccaagaaccucaacgagucccugaucgaccugcaggagcucggcaaguacgagcaguacaucaaguggcccugguacaucuggcugggcuucaucgccgggcugaucgcgaucgucauggugaccaucaugcucugcugcaugaccagcugcugcuccugccugaagggcugcugcagcugcggguccugcugcaaguucgacgaggacgacagcgagccggugcugaagggcgucaagcuccacuacacguga

SEQ ID NO: 23103 - RNA, 3822 nt, Artificial Sequence
  SARS-CoV-2/Wuhan/WIV05/2019__EPI_ISL_402128 spike protein CDS gc (1-1273)(K986P_V987P_D614G_I692V)
auguucguguuccugguccuccugccccuggugagcucccagugcgugaaccucaccacccgcacgcagcugccgcccgccuacaccaacagcuucacccggggcgucuacuaccccgacaagguguuccgcuccagcgugcugcacuccacccaggaccucuuccugcccuucuucagcaacgucacgugguuccacgccauccacguguccgggaccaacggcaccaagcgguucgacaacccggugcugcccuucaacgacggggucuacuucgcgagcaccgagaaguccaacaucauccgcggcuggaucuucgggacgacccucgacagcaagacccagucccugcugaucgugaacaacgccaccaacguggucaucaaggugugcgaguuccaguucugcaacgaccccuuccucggcguguacuaccacaagaacaacaagagcuggauggaguccgaguuccgggucuacagcuccgccaacaacugcacguucgaguacgugagccagcccuuccugauggaccuggagggcaagcaggggaacuucaagaaccuccgcgaguucguguucaagaacaucgacggcuacuucaagaucuacuccaagcacaccccgaucaaccugguccgggaccugccccagggguucagcgcccucgagccccugguggaccugcccaucggcaucaacaucacccgcuuccagacccuccuggcccugcaccgguccuaccucacgccgggggacagcagcuccggcuggaccgcgggcgccgccgccuacuacgugggguaccugcagccccgcaccuuccugcucaaguacaacgagaacggcaccaucacggacgcggucgacugcgcccuggacccccugagcgagaccaagugcacccucaaguccuucaccguggagaaggggaucuaccagacgagcaacuuccgggugcagcccaccgaguccaucguccgcuucccgaacaucaccaaccugugccccuucggcgagguguucaacgccacccgguucgccagcgucuacgccuggaaccgcaagcggaucuccaacugcguggcggacuacagcgugcuguacaacuccgccagcuucuccacguucaagugcuacggcgucagccccaccaagcucaacgaccugugcuucaccaacguguacgccgacuccuucgugauccgcggggacgagguccggcagaucgcccccggccagaccgggaagaucgccgacuacaacuacaagcugccggacgacuucacgggcugcgugaucgcguggaacagcaacaaccucgacuccaaggucgggggcaacuacaacuaccuguaccgccuguuccgcaagagcaaccucaagcccuucgagcgggacaucuccaccgagaucuaccaggccggcagcacccccugcaacgggguggagggcuucaacugcuacuucccccugcaguccuacggguuccagccgaccaacggcgugggguaccagcccuaccggguggucgugcugagcuucgagcuccugcacgcccccgccacggugugcggccccaagaaguccaccaaccuggucaagaacaagugcgugaacuucaacuucaacggccucaccgggaccggcgugcugaccgagagcaacaagaaguuccugccguuccagcaguucgggcgcgacaucgccgacacgaccgacgcgguccgcgacccccagacccuggagauccucgacaucacccccugcagcuucggcgggguguccgugaucacgccgggcaccaacaccagcaaccaggucgccgugcuguaccagggcgugaacugcaccgagguccccguggccauccacgccgaccagcugacgcccaccuggcggguguacuccaccgggagcaacgucuuccagacccgcgccggcugccucaucggggcggagcacgugaacaacuccuacgagugcgacauccccaucggcgccggcaucugcgccagcuaccagacgcagaccaacuccccgcggcgcgcccggagcguggcgucccagagcgucaucgccuacaccaugucccugggggccgagaacagcguggccuacuccaacaacagcaucgccauccccaccaacuucacgaucuccgugaccaccgagauccugcccgucagcaugaccaagacgagcguggacugcaccauguacaucugcggcgacuccaccgagugcagcaaccuccugcugcaguacggguccuucugcacccagcucaaccgcgcgcugacgggcaucgccguggagcaggacaagaacacccaggaggucuucgcccaggugaagcagaucuacaagacgcccccgaucaaggacuucgggggcuucaacuucagccagauccugcccgaccccuccaagcccagcaagcgguccuucaucgaggaccuccuguucaacaaggugacccuggccgacgccggcuucaucaagcaguacggggacugccucggcgacaucgcggcccgcgaccugaucugcgcccagaaguucaacgggcugaccguccucccgccccugcugaccgacgagaugaucgcccaguacaccagcgcccuccuggcgggcaccaucacguccggguggaccuucggcgccggcgccgcccugcagauccccuucgcgaugcagauggccuaccgguucaacgggaucggcgugacccagaacgugcucuacgagaaccagaagcugaucgccaaccaguucaacagcgccaucgggaagauccaggacucccugagcuccaccgccagcgcgcucggcaagcugcaggacgucgugaaccagaacgcccaggcccugaacacgcucgugaagcagcuguccagcaacuucggggccaucuccagcguccugaacgacauccucucccgccuggacccgcccgaggccgaggugcagaucgaccggcugaucaccggccgccuccagagccugcagaccuacgugacccagcagcugauccgggcggccgagauccgcgccagcgccaaccucgccgcgaccaagauguccgagugcguccugggccagagcaagcggguggacuucugcgggaagggcuaccaccugauguccuucccccagagcgcgccccacgggguggucuuccuccacgugacguacguccccgcccaggagaagaacuucaccaccgccccggccaucugccacgacggcaaggcccacuucccccgcgaggggguguucguguccaacggcacccacugguucgucacgcagcggaacuucuacgagccccagaucaucaccaccgacaacaccuucgugagcggcaacugcgacguggucaucgggaucgugaacaacacgguguacgacccccugcagccggagcuggacuccuucaaggaggagcucgacaaguacuucaagaaccacaccagccccgacgucgaccugggcgacaucuccgggaucaacgccagcguggugaacauccagaaggagaucgaccgccugaacgaggucgccaagaaccucaacgagucccugaucgaccugcaggagcucggcaaguacgagcaguacaucaaguggcccugguacaucuggcugggcuucaucgccgggcugaucgcgaucgugauggugaccaucaugcucugcugcaugaccagcugcugcuccugccugaagggcugcugcagcugcggguccugcugcaaguucgacgaggacgacagcgagccgguccugaagggcgugaagcuccacuacacguga

SEQ ID NO: 23104 - RNA, 3822 nt, Artificial Sequence
  SARS-CoV-2/Wuhan/WIV05/2019__EPI_ISL_402128 spike protein CDS gc (1-1273)(K986P_V987P_D614G_M1229I)
auguucguguuccugguccuccugccccuggugagcucccagugcgugaaccucaccacccgcacgcagcugccgcccgccuacaccaacagcuucacccggggcgucuacuaccccgacaagguguuccgcuccagcgugcugcacuccacccaggaccucuuccugcccuucuucagcaacgucacgugguuccacgccauccacguguccgggaccaacggcaccaagcgguucgacaacccggugcugcccuucaacgacggggucuacuucgcgagcaccgagaaguccaacaucauccgcggcuggaucuucgggacgacccucgacagcaagacccagucccugcugaucgugaacaacgccaccaacguggucaucaaggugugcgaguuccaguucugcaacgaccccuuccucggcguguacuaccacaagaacaacaagagcuggauggaguccgaguuccgggucuacagcuccgccaacaacugcacguucgaguacgugagccagcccuuccugauggaccuggagggcaagcaggggaacuucaagaaccuccgcgaguucguguucaagaacaucgacggcuacuucaagaucuacuccaagcacaccccgaucaaccugguccgggaccugccccagggguucagcgcccucgagccccugguggaccugcccaucggcaucaacaucacccgcuuccagacccuccuggcccugcaccgguccuaccucacgccgggggacagcagcuccggcuggaccgcgggcgccgccgccuacuacgugggguaccugcagccccgcaccuuccugcucaaguacaacgagaacggcaccaucacggacgcggucgacugcgcccuggacccccugagcgagaccaagugcacccucaaguccuucaccguggagaaggggaucuaccagacgagcaacuuccgggugcagcccaccgaguccaucguccgcuucccgaacaucaccaaccugugccccuucggcgagguguucaacgccacccgguucgccagcgucuacgccuggaaccgcaagcggaucuccaacugcguggcggacuacagcgugcuguacaacuccgccagcuucuccacguucaagugcuacggcgucagccccaccaagcucaacgaccugugcuucaccaacguguacgccgacuccuucgugauccgcggggacgagguccggcagaucgcccccggccagaccgggaagaucgccgacuacaacuacaagcugccggacgacuucacgggcugcgugaucgcguggaacagcaacaaccucgacuccaaggucgggggcaacuacaacuaccuguaccgccuguuccgcaagagcaaccucaagcccuucgagcgggacaucuccaccgagaucuaccaggccggcagcacccccugcaacgggguggagggcuucaacugcuacuucccccugcaguccuacggguuccagccgaccaacggcgugggguaccagcccuaccggguggucgugcugagcuucgagcuccugcacgcccccgccacggugugcggccccaagaaguccaccaaccuggucaagaacaagugcgugaacuucaacuucaacggccucaccgggaccggcgugcugaccgagagcaacaagaaguuccugccguuccagcaguucgggcgcgacaucgccgacacgaccgacgcgguccgcgacccccagacccuggagauccucgacaucacccccugcagcuucggcgggguguccgugaucacgccgggcaccaacaccagcaaccaggucgccgugcuguaccagggcgugaacugcaccgagguccccguggccauccacgccgaccagcugacgcccaccuggcggguguacuccaccgggagcaacgucuuccagacccgcgccggcugccucaucggggcggagcacgugaacaacuccuacgagugcgacauccccaucggcgccggcaucugcgccagcuaccagacgcagaccaacuccccgcggcgcgcccggagcguggcgucccagagcaucaucgccuacaccaugucccugggggccgagaacagcgucgccuacuccaacaacagcaucgccauccccaccaacuucacgaucuccgugaccaccgagauccugcccgugagcaugaccaagacgagcgucgacugcaccauguacaucugcggcgacuccaccgagugcagcaaccuccugcugcaguacggguccuucugcacccagcucaaccgcgcgcugacgggcaucgccguggagcaggacaagaacacccaggagguguucgcccaggucaagcagaucuacaagacgcccccgaucaaggacuucgggggcuucaacuucagccagauccugcccgaccccuccaagcccagcaagcgguccuucaucgaggaccuccuguucaacaaggugacccuggccgacgccggcuucaucaagcaguacggggacugccucggcgacaucgcggcccgcgaccugaucugcgcccagaaguucaacgggcugaccgugcucccgccccugcugaccgacgagaugaucgcccaguacaccagcgcccuccuggcgggcaccaucacguccggguggaccuucggcgccggcgccgcccugcagauccccuucgcgaugcagauggccuaccgguucaacgggaucggcgucacccagaacgugcucuacgagaaccagaagcugaucgccaaccaguucaacagcgccaucgggaagauccaggacucccugagcuccaccgccagcgcgcucggcaagcugcaggacguggucaaccagaacgcccaggcccugaacacgcucgugaagcagcuguccagcaacuucggggccaucuccagcgugcugaacgacauccucucccgccuggacccgcccgaggccgagguccagaucgaccggcugaucaccggccgccuccagagccugcagaccuacgugacccagcagcugauccgggcggccgagauccgcgccagcgccaaccucgccgcgaccaagauguccgagugcgugcugggccagagcaagcgggucgacuucugcgggaagggcuaccaccugauguccuucccccagagcgcgccccacggggugguguuccuccacgucacguacgugcccgcccaggagaagaacuucaccaccgccccggccaucugccacgacggcaaggcccacuucccccgcgagggggucuucguguccaacggcacccacugguucgugacgcagcggaacuucuacgagccccagaucaucaccaccgacaacaccuucgucagcggcaacugcgacguggugaucgggaucgucaacaacacgguguacgacccccugcagccggagcuggacuccuucaaggaggagcucgacaaguacuucaagaaccacaccagccccgacguggaccugggcgacaucuccgggaucaacgccagcgucgugaacauccagaaggagaucgaccgccugaacgagguggccaagaaccucaacgagucccugaucgaccugcaggagcucggcaaguacgagcaguacaucaaguggcccugguacaucuggcugggcuucaucgccgggcugaucgcgaucgucaucgugaccaucaugcucugcugcaugaccagcugcugcuccugccugaagggcugcugcagcugcggguccugcugcaaguucgacgaggacgacagcgagccggugcugaagggcgucaagcuccacuacacguga

SEQ ID NO: 23105 - RNA, 3816 nt, Artificial Sequence
  SARS-CoV-2/Wuhan/WIV05/2019__EPI_ISL_402128 spike protein CDS gc (1-1273)(K986P_V987P_H69del_V70del_A222V_Y453F_S477N_D614G_I692V)
auguucguguuccugguccuccugccccuggugagcucccagugcgugaaccucaccacccgcacgcagcugccgcccgccuacaccaacagcuucacccggggcgucuacuaccccgacaagguguuccgcuccagcgugcugcacuccacccaggaccucuuccugcccuucuucagcaacgucacgugguuccacgccaucuccgggaccaacggcaccaagcgguucgacaacccggugcugcccuucaacgacgggguguacuucgcgagcaccgagaaguccaacaucauccgcggcuggaucuucgggacgacccucgacagcaagacccagucccugcugaucgucaacaacgccaccaacguggugaucaaggucugcgaguuccaguucugcaacgaccccuuccucggcguguacuaccacaagaacaacaagagcuggauggaguccgaguuccggguguacagcuccgccaacaacugcacguucgaguacgucagccagcccuuccugauggaccuggagggcaagcaggggaacuucaagaaccuccgcgaguucguguucaagaacaucgacggcuacuucaagaucuacuccaagcacaccccgaucaaccuggugcgggaccugccccagggguucagcguccucgagccccugguggaccugcccaucggcaucaacaucacccgcuuccagacccuccuggcccugcaccgguccuaccucacgccgggggacagcagcuccggcuggaccgccggcgcggccgccuacuacgugggguaccugcagccccgcaccuuccugcucaaguacaacgagaacggcaccaucacggacgccgucgacugcgcgcuggacccccugagcgagaccaagugcacccucaaguccuucaccguggagaaggggaucuaccagacgagcaacuuccgggugcagcccaccgaguccaucguccgcuucccgaacaucaccaaccugugccccuucggcgagguguucaacgccacccgguucgccagcgucuacgccuggaaccgcaagcggaucuccaacugcguggccgacuacagcgugcuguacaacuccgcgagcuucuccacguucaagugcuacggcgucagccccaccaagcucaacgaccugugcuucaccaacguguacgccgacuccuucgugauccgcggggacgagguccggcagaucgcccccggccagaccgggaagaucgccgacuacaacuacaagcugccggacgacuucacgggcugcgugaucgccuggaacagcaacaaccucgacuccaaggucgggggcaacuacaacuaccuguuccgccuguuccgcaagagcaaccucaagcccuucgagcgggacaucuccaccgagaucuaccaggcgggcaacacccccugcaacgggguggagggcuucaacugcuacuucccccugcagagcuacggguuccagccgaccaacggcgugggguaccagcccuaccggguggucgugcuguccuucgagcuccugcacgcccccgccacggugugcggccccaagaaguccaccaaccuggucaagaacaagugcgugaacuucaacuucaacggccucaccgggaccggcgugcugaccgagagcaacaagaaguuccugccguuccagcaguucgggcgcgacaucgccgacacgaccgacgccguccgcgacccccagacccuggagauccucgacaucacccccugcagcuucggcggggugagcgugaucacgccgggcaccaacaccuccaaccaggucgcggugcuguaccagggcgugaacugcaccgagguccccguggccauccacgccgaccagcugacgcccaccuggcggguguacagcaccggguccaacgucuuccagacccgcgccggcugccucaucggggccgagcacgugaacaacagcuacgagugcgacauccccaucggcgcgggcaucugcgccuccuaccagacgcagaccaacagcccgcggcgcgcccgguccguggccagccaguccgucaucgcguacaccaugagccugggggccgagaacuccguggccuacagcaacaacuccaucgccauccccaccaacuucacgaucagcgugaccaccgagauccugcccgucuccaugaccaagacgagcguggacugcaccauguacaucugcggcgacagcaccgagugcuccaaccuccugcugcaguacgggagcuucugcacccagcucaaccgcgcccugacgggcaucgcgguggagcaggacaagaacacccaggaggucuucgcccaggugaagcagaucuacaagacgcccccgaucaaggacuucgggggcuucaacuucucccagauccugcccgaccccagcaagcccuccaagcggagcuucaucgaggaccuccuguucaacaaggugacccuggccgacgccggcuucaucaagcaguacggggacugccucggcgacaucgccgcgcgcgaccugaucugcgcccagaaguucaacgggcugaccguccucccgccccugcugaccgacgagaugaucgcccaguacaccuccgcccuccuggccggcaccaucacgagcggguggaccuucggcgcgggcgccgcccugcagauccccuucgccaugcagauggcguaccgguucaacgggaucggcgugacccagaacgugcucuacgagaaccagaagcugaucgccaaccaguucaacuccgccaucgggaagauccaggacagccuguccagcaccgccuccgcccucggcaagcugcaggacgucgugaaccagaacgcgcaggcccugaacacgcucgugaagcagcugagcuccaacuucggggccaucagcuccguccugaacgacauccucagccgccuggacccgcccgaggccgaggugcagaucgaccggcugaucaccggccgccuccagucccugcagaccuacgugacccagcagcugauccgggccgcggagauccgcgccagcgccaaccucgccgccaccaagaugagcgagugcguccugggccaguccaagcggguggacuucugcgggaagggcuaccaccugaugagcuucccccaguccgcgccccacgggguggucuuccuccacgugacguacguccccgcccaggagaagaacuucaccaccgccccggccaucugccacgacggcaaggcgcacuucccccgcgaggggguguucgugagcaacggcacccacugguucgucacgcagcggaacuucuacgagccccagaucaucaccaccgacaacaccuucguguccggcaacugcgacguggucaucgggaucgugaacaacacgguguacgacccccugcagccggagcuggacagcuucaaggaggagcucgacaaguacuucaagaaccacaccucccccgacgucgaccugggcgacaucagcgggaucaacgccuccguggugaacauccagaaggagaucgaccgccugaacgaggucgccaagaaccucaacgagagccugaucgaccugcaggagcucggcaaguacgagcaguacaucaaguggcccugguacaucuggcugggcuucaucgccgggcugaucgccaucgugauggugaccaucaugcucugcugcaugaccuccugcugcagcugccugaagggcugcugcuccugcgggagcugcugcaaguucgacgaggacgacuccgagccgguccugaagggcgugaagcuccacuacacguga

SEQ ID NO: 23106 - RNA, 3816 nt, Artificial Sequence
  SARS-CoV-2/Wuhan/WIV05/2019__EPI_ISL_402128 spike protein CDS gc (1-1273)(K986P_V987P_H69del_V70del_Y453F_D614G_I692V_M1229I)
auguucguguuccugguccuccugccccuggugagcucccagugcgugaaccucaccacccgcacgcagcugccgcccgccuacaccaacagcuucacccggggcgucuacuaccccgacaagguguuccgcuccagcgugcugcacuccacccaggaccucuuccugcccuucuucagcaacgucacgugguuccacgccaucuccgggaccaacggcaccaagcgguucgacaacccggugcugcccuucaacgacgggguguacuucgcgagcaccgagaaguccaacaucauccgcggcuggaucuucgggacgacccucgacagcaagacccagucccugcugaucgucaacaacgccaccaacguggugaucaaggucugcgaguuccaguucugcaacgaccccuuccucggcguguacuaccacaagaacaacaagagcuggauggaguccgaguuccggguguacagcuccgccaacaacugcacguucgaguacgucagccagcccuuccugauggaccuggagggcaagcaggggaacuucaagaaccuccgcgaguucguguucaagaacaucgacggcuacuucaagaucuacuccaagcacaccccgaucaaccuggugcgggaccugccccagggguucagcgcccucgagccccuggucgaccugcccaucggcaucaacaucacccgcuuccagacccuccuggcccugcaccgguccuaccucacgccgggggacagcagcuccggcuggaccgcgggcgccgccgccuacuacgugggguaccugcagccccgcaccuuccugcucaaguacaacgagaacggcaccaucacggacgcgguggacugcgcccuggacccccugagcgagaccaagugcacccucaaguccuucaccgucgagaaggggaucuaccagacgagcaacuuccgggugcagcccaccgaguccaucgugcgcuucccgaacaucaccaaccugugccccuucggcgaggucuucaacgccacccgguucgccagcguguacgccuggaaccgcaagcggaucuccaacugcgucgcggacuacagcgugcuguacaacuccgccagcuucuccacguucaagugcuacggcgugagccccaccaagcucaacgaccugugcuucaccaacgucuacgccgacuccuucgugauccgcggggacgaggugcggcagaucgcccccggccagaccgggaagaucgccgacuacaacuacaagcugccggacgacuucacgggcugcgucaucgcguggaacagcaacaaccucgacuccaaggucgggggcaacuacaacuaccuguuccgccuguuccgcaagagcaaccucaagcccuucgagcgggacaucuccaccgagaucuaccaggccggcagcacccccugcaacgggguggagggcuucaacugcuacuucccccugcaguccuacggguuccagccgaccaacggcgugggguaccagcccuaccggguggugguccugagcuucgagcuccugcacgcccccgccacggugugcggccccaagaaguccaccaaccuggugaagaacaagugcgucaacuucaacuucaacggccucaccgggaccggcgugcugaccgagagcaacaagaaguuccugccguuccagcaguucgggcgcgacaucgccgacacgaccgacgcggugcgcgacccccagacccuggagauccucgacaucacccccugcagcuucggcggggucuccgugaucacgccgggcaccaacaccagcaaccagguggccguccuguaccagggcgugaacugcaccgaggugcccgucgccauccacgccgaccagcugacgcccaccuggcggguguacuccaccgggagcaacguguuccagacccgcgccggcugccucaucggggcggagcacgucaacaacuccuacgagugcgacauccccaucggcgccggcaucugcgccagcuaccagacgcagaccaacuccccgcggcgcgcccggagcguggcgucccagagcgugaucgccuacaccaugucccugggggccgagaacagcgucgccuacuccaacaacagcaucgccauccccaccaacuucacgaucuccgugaccaccgagauccugcccgugagcaugaccaagacgagcgucgacugcaccauguacaucugcggcgacuccaccgagugcagcaaccuccugcugcaguacggguccuucugcacccagcucaaccgcgcgcugacgggcaucgccguggagcaggacaagaacacccaggagguguucgcccaggucaagcagaucuacaagacgcccccgaucaaggacuucgggggcuucaacuucagccagauccugcccgaccccuccaagcccagcaagcgguccuucaucgaggaccuccuguucaacaaggugacccuggccgacgccggcuucaucaagcaguacggggacugccucggcgacaucgcggcccgcgaccugaucugcgcccagaaguucaacgggcugaccgugcucccgccccugcugaccgacgagaugaucgcccaguacaccagcgcccuccuggcgggcaccaucacguccggguggaccuucggcgccggcgccgcccugcagauccccuucgcgaugcagauggccuaccgguucaacgggaucggcgucacccagaacgugcucuacgagaaccagaagcugaucgccaaccaguucaacagcgccaucgggaagauccaggacucccugagcuccaccgccagcgcgcucggcaagcugcaggacguggucaaccagaacgcccaggcccugaacacgcucgugaagcagcuguccagcaacuucggggccaucuccagcgugcugaacgacauccucucccgccuggacccgcccgaggccgagguccagaucgaccggcugaucaccggccgccuccagagccugcagaccuacgugacccagcagcugauccgggcggccgagauccgcgccagcgccaaccucgccgcgaccaagauguccgagugcgugcugggccagagcaagcgggucgacuucugcgggaagggcuaccaccugauguccuucccccagagcgcgccccacggggugguguuccuccacgucacguacgugcccgcccaggagaagaacuucaccaccgccccggccaucugccacgacggcaaggcccacuucccccgcgagggggucuucguguccaacggcacccacugguucgugacgcagcggaacuucuacgagccccagaucaucaccaccgacaacaccuucgucagcggcaacugcgacguggugaucgggaucgucaacaacacgguguacgacccccugcagccggagcuggacuccuucaaggaggagcucgacaaguacuucaagaaccacaccagccccgacguggaccugggcgacaucuccgggaucaacgccagcgucgugaacauccagaaggagaucgaccgccugaacgagguggccaagaaccucaacgagucccugaucgaccugcaggagcucggcaaguacgagcaguacaucaaguggcccugguacaucuggcugggcuucaucgccgggcugaucgcgaucgucaucgugaccaucaugcucugcugcaugaccagcugcugcuccugccugaagggcugcugcagcugcggguccugcugcaaguucgacgaggacgacagcgagccggugcugaagggcgucaagcuccacuacacguga

SEQ ID NO: 23107 - RNA, 3813 nt, Artificial Sequence
  SARS-CoV-2/Wuhan/WIV05/2019__EPI_ISL_402128 spike protein CDS gc (1-1273)(K986P_V987P_K986P_V987P_H69del_V70del_Y144del_N501Y_A570 D_D614G_P681H_T716I_S982A_D1118H)
auguucguguuccugguccuccugccccuggugagcucccagugcgugaaccucaccacccgcacgcagcugccgcccgccuacaccaacagcuucacccggggcgucuacuaccccgacaagguguuccgcuccagcgugcugcacuccacccaggaccucuuccugcccuucuucagcaacgucacgugguuccacgccaucuccgggaccaacggcaccaagcgguucgacaacccggugcugcccuucaacgacgggguguacuucgcgagcaccgagaaguccaacaucauccgcggcuggaucuucgggacgacccucgacagcaagacccagucccugcugaucgucaacaacgccaccaacguggugaucaaggucugcgaguuccaguucugcaacgaccccuuccucggcguguaccacaagaacaacaagagcuggauggaguccgaguuccggguguacagcuccgccaacaacugcacguucgaguacgucagccagcccuuccugauggaccuggagggcaagcaggggaacuucaagaaccuccgcgaguucguguucaagaacaucgacggcuacuucaagaucuacuccaagcacaccccgaucaaccuggugcgggaccugccccagggguucagcgcccucgagccccuggucgaccugcccaucggcaucaacaucacccgcuuccagacccuccuggcccugcaccgguccuaccucacgccgggggacagcagcuccggcuggaccgcgggcgccgccgccuacuacgugggguaccugcagccccgcaccuuccugcucaaguacaacgagaacggcaccaucacggacgcgguggacugcgcccuggacccccugagcgagaccaagugcacccucaaguccuucaccgucgagaaggggaucuaccagacgagcaacuuccgggugcagcccaccgaguccaucgugcgcuucccgaacaucaccaaccugugccccuucggcgaggucuucaacgccacccgguucgccagcguguacgccuggaaccgcaagcggaucuccaacugcgucgcggacuacagcgugcuguacaacuccgccagcuucuccacguucaagugcuacggcgugagccccaccaagcucaacgaccugugcuucaccaacgucuacgccgacuccuucgugauccgcggggacgaggugcggcagaucgcccccggccagaccgggaagaucgccgacuacaacuacaagcugccggacgacuucacgggcugcgucaucgcguggaacagcaacaaccucgacuccaaggucgggggcaacuacaacuaccuguaccgccuguuccgcaagagcaaccucaagcccuucgagcgggacaucuccaccgagaucuaccaggccggcagcacccccugcaacgggguggagggcuucaacugcuacuucccccugcaguccuacggguuccagccgaccuacggcgugggguaccagcccuaccggguggugguccugagcuucgagcuccugcacgcccccgccacggugugcggccccaagaaguccaccaaccuggugaagaacaagugcgucaacuucaacuucaacggccucaccgggaccggcgugcugaccgagagcaacaagaaguuccugccguuccagcaguucgggcgcgacaucgacgacacgaccgacgccgugcgcgacccccagacccuggagauccucgacaucacccccugcagcuucggcggggucuccgugaucacgccgggcaccaacaccagcaaccagguggcgguccuguaccagggcgugaacugcaccgaggugcccgucgccauccacgccgaccagcugacgcccaccuggcggguguacuccaccgggagcaacguguuccagacccgcgccggcugccucaucggggccgagcacgucaacaacuccuacgagugcgacauccccaucggcgcgggcaucugcgccagcuaccagacgcagaccaacucccaccggcgcgcccggagcguggccucccagagcaucaucgcguacaccaugucccugggggccgagaacagcguggccuacuccaacaacagcaucgccaucccgaucaacuucaccaucuccgucacgaccgagauccugcccgugagcaugaccaagaccagcguggacugcacgauguacaucugcggcgacuccaccgagugcagcaaccuccugcugcaguacggguccuucugcacccagcucaaccgcgcccugaccggcaucgcggucgagcaggacaagaacacgcaggagguguucgcccaggugaagcagaucuacaagaccccgcccaucaaggacuucgggggcuucaacuucagccagauccugcccgaccccuccaagcccagcaagcgguccuucaucgaggaccuccuguucaacaaggucacccuggccgacgccggcuucaucaagcaguacggggacugccucggcgacaucgccgcgcgcgaccugaucugcgcccagaaguucaacgggcugaccgugcugcccccgcuccugacggacgagaugaucgcccaguacaccagcgcccuccuggccggcaccaucaccuccggguggacguucggcgcgggcgccgcccugcagauccccuucgccaugcagauggcguaccgguucaacgggaucggcgugacccagaacguccucuacgagaaccagaagcugaucgccaaccaguucaacagcgccaucgggaagauccaggacucccugagcuccaccgccagcgcccucggcaagcugcaggacguggugaaccagaacgcgcaggcccugaacacccucgucaagcagcuguccagcaacuucggggccaucuccagcgugcugaacgacauccucgcccgccuggacccgcccgaggccgaggugcagaucgaccggcugaucacgggccgccuccagucccugcagaccuacgucacccagcagcugauccgggcggccgagauccgcgccagcgccaaccucgccgcgaccaagaugagcgagugcgugcugggccaguccaagcggguggacuucugcgggaagggcuaccaccugaugagcuucccccaguccgcgccccacggggucguguuccuccacgugaccuacguccccgcccaggagaagaacuucacgaccgcccccgccaucugccacgacggcaaggcccacuucccgcgcgaggggguguucgucagcaacggcacccacugguucgugacccagcggaacuucuacgagccccagaucaucacgacccacaacaccuucguguccggcaacugcgacgucgugaucgggaucgugaacaacaccgucuacgacccccugcagcccgagcuggacagcuucaaggaggagcucgacaaguacuucaagaaccacacguccccggacguggaccugggcgacaucagcgggaucaacgccuccguggucaacauccagaaggagaucgaccgccugaacgagguggccaagaaccucaacgagagccugaucgaccugcaggagcucggcaaguacgagcaguacaucaaguggcccugguacaucuggcugggcuucaucgccgggcugaucgcgaucgugauggucaccaucaugcucugcugcaugaccuccugcugcagcugccugaagggcugcugcuccugcgggagcugcugcaaguucgacgaggacgacuccgagcccgugcugaagggcgugaagcuccacuacaccuga

SEQ ID NO: 23108 - RNA, 3822 nt, Artificial Sequence
  SARS-CoV-2/Wuhan/WIV05/2019__EPI_ISL_402128 spike protein CDS gc (1-1273)(K986P_V987P_K986P_V987P_K417N_E484K_N501Y_D614G)
auguucguguuccugguccuccugccccuggugagcucccagugcgugaaccucaccacccgcacgcagcugccgcccgccuacaccaacagcuucacccggggcgucuacuaccccgacaagguguuccgcuccagcgugcugcacuccacccaggaccucuuccugcccuucuucagcaacgucacgugguuccacgccauccacguguccgggaccaacggcaccaagcgguucgacaacccggugcugcccuucaacgacggggucuacuucgcgagcaccgagaaguccaacaucauccgcggcuggaucuucgggacgacccucgacagcaagacccagucccugcugaucgugaacaacgccaccaacguggucaucaaggugugcgaguuccaguucugcaacgaccccuuccucggcguguacuaccacaagaacaacaagagcuggauggaguccgaguuccgggucuacagcuccgccaacaacugcacguucgaguacgugagccagcccuuccugauggaccuggagggcaagcaggggaacuucaagaaccuccgcgaguucguguucaagaacaucgacggcuacuucaagaucuacuccaagcacaccccgaucaaccugguccgggaccugccccagggguucagcgcccucgagccccugguggaccugcccaucggcaucaacaucacccgcuuccagacccuccuggcccugcaccgguccuaccucacgccgggggacagcagcuccggcuggaccgcgggcgccgccgccuacuacgugggguaccugcagccccgcaccuuccugcucaaguacaacgagaacggcaccaucacggacgcggucgacugcgcccuggacccccugagcgagaccaagugcacccucaaguccuucaccguggagaaggggaucuaccagacgagcaacuuccgggugcagcccaccgaguccaucguccgcuucccgaacaucaccaaccugugccccuucggcgagguguucaacgccacccgguucgccagcgucuacgccuggaaccgcaagcggaucuccaacugcguggcggacuacagcgugcuguacaacuccgccagcuucuccacguucaagugcuacggcgucagccccaccaagcucaacgaccugugcuucaccaacguguacgccgacuccuucgugauccgcggggacgagguccggcagaucgcccccggccagaccgggaacaucgccgacuacaacuacaagcugccggacgacuucacgggcugcgugaucgcguggaacagcaacaaccucgacuccaaggucgggggcaacuacaacuaccuguaccgccuguuccgcaagagcaaccucaagcccuucgagcgggacaucuccaccgagaucuaccaggccggcagcacccccugcaacggggugaagggcuucaacugcuacuucccccugcaguccuacggguuccagccgaccuacggcgugggguaccagcccuaccggguggucgugcugagcuucgagcuccugcacgcccccgccacggugugcggccccaagaaguccaccaaccuggucaagaacaagugcgugaacuucaacuucaacggccucaccgggaccggcgugcugaccgagagcaacaagaaguuccugccguuccagcaguucgggcgcgacaucgccgacacgaccgacgcgguccgcgacccccagacccuggagauccucgacaucacccccugcagcuucggcgggguguccgugaucacgccgggcaccaacaccagcaaccaggucgccgugcuguaccagggcgugaacugcaccgagguccccguggccauccacgccgaccagcugacgcccaccuggcggguguacuccaccgggagcaacgucuuccagacccgcgccggcugccucaucggggcggagcacgugaacaacuccuacgagugcgacauccccaucggcgccggcaucugcgccagcuaccagacgcagaccaacuccccgcggcgcgcccggagcguggcgucccagagcaucaucgccuacaccaugucccugggggccgagaacagcgucgccuacuccaacaacagcaucgccauccccaccaacuucacgaucuccgugaccaccgagauccugcccgugagcaugaccaagacgagcgucgacugcaccauguacaucugcggcgacuccaccgagugcagcaaccuccugcugcaguacggguccuucugcacccagcucaaccgcgcgcugacgggcaucgccguggagcaggacaagaacacccaggagguguucgcccaggucaagcagaucuacaagacgcccccgaucaaggacuucgggggcuucaacuucagccagauccugcccgaccccuccaagcccagcaagcgguccuucaucgaggaccuccuguucaacaaggugacccuggccgacgccggcuucaucaagcaguacggggacugccucggcgacaucgcggcccgcgaccugaucugcgcccagaaguucaacgggcugaccgugcucccgccccugcugaccgacgagaugaucgcccaguacaccagcgcccuccuggcgggcaccaucacguccggguggaccuucggcgccggcgccgcccugcagauccccuucgcgaugcagauggccuaccgguucaacgggaucggcgucacccagaacgugcucuacgagaaccagaagcugaucgccaaccaguucaacagcgccaucgggaagauccaggacucccugagcuccaccgccagcgcgcucggcaagcugcaggacguggucaaccagaacgcccaggcccugaacacgcucgugaagcagcuguccagcaacuucggggccaucuccagcgugcugaacgacauccucucccgccuggacccgcccgaggccgagguccagaucgaccggcugaucaccggccgccuccagagccugcagaccuacgugacccagcagcugauccgggcggccgagauccgcgccagcgccaaccucgccgcgaccaagauguccgagugcgugcugggccagagcaagcgggucgacuucugcgggaagggcuaccaccugauguccuucccccagagcgcgccccacggggugguguuccuccacgucacguacgugcccgcccaggagaagaacuucaccaccgccccggccaucugccacgacggcaaggcccacuucccccgcgagggggucuucguguccaacggcacccacugguucgugacgcagcggaacuucuacgagccccagaucaucaccaccgacaacaccuucgucagcggcaacugcgacguggugaucgggaucgucaacaacacgguguacgacccccugcagccggagcuggacuccuucaaggaggagcucgacaaguacuucaagaaccacaccagccccgacguggaccugggcgacaucuccgggaucaacgccagcgucgugaacauccagaaggagaucgaccgccugaacgagguggccaagaaccucaacgagucccugaucgaccugcaggagcucggcaaguacgagcaguacaucaaguggcccugguacaucuggcugggcuucaucgccgggcugaucgcgaucgucauggugaccaucaugcucugcugcaugaccagcugcugcuccugccugaagggcugcugcagcugcggguccugcugcaaguucgacgaggacgacagcgagccggugcugaagggcgucaagcuccacuacacguga

SEQ ID NO: 23109 - RNA, 3813 nt, Artificial Sequence
  SARS-CoV-2/Wuhan/WIV05/2019__EPI_ISL_402128 spike protein CDS gc (1-1273)(K986P_V987P_K986P_V987P_L18F_D80A_D215G_L242del_A243del_ L244del_R246I_K417N_E484K_N501Y_D614G_A701V)
auguucguguuccugguccuccugccccuggugagcucccagugcgugaacuucaccacccgcacgcagcucccgcccgccuacaccaacagcuucacccggggcgucuacuaccccgacaagguguuccgcuccagcgugcugcacuccacccaggaccuguuccuccccuucuucagcaacgucacgugguuccacgccauccacguguccgggaccaacggcaccaagcgguucgcgaacccggugcugcccuucaacgacggggucuacuucgccagcaccgagaaguccaacaucauccgcggcuggaucuucgggacgacccuggacagcaagacccagucccuccugaucgugaacaacgccaccaacguggucaucaaggugugcgaguuccaguucugcaacgaccccuuccugggcguguacuaccacaagaacaacaagagcuggauggaguccgaguuccgggucuacagcuccgccaacaacugcacguucgaguacgugagccagcccuuccucauggaccuggagggcaagcaggggaacuucaagaaccugcgcgaguucguguucaagaacaucgacggcuacuucaagaucuacuccaagcacaccccgaucaaccucguccgggggcugccccagggcuucagcgcccuggagccccucguggaccugcccaucgggaucaacaucacccgcuuccagacccugcacaucuccuaccucacgccgggcgacagcagcuccggcuggaccgcgggggccgccgccuacuacgugggcuaccugcagccccggaccuuccugcucaaguacaacgagaacgggaccaucacggacgcggucgacugcgcccuggacccccugagcgagaccaagugcacccucaaguccuucaccguggagaagggcaucuaccagacgagcaacuuccgcgugcagcccaccgaguccaucguccgguucccgaacaucaccaaccugugccccuucggcgagguguucaacgccacccgcuucgccagcgucuacgccuggaaccggaagcgcaucuccaacugcguggcggacuacagcgugcuguacaacuccgccagcuucuccacguucaagugcuacggggucagccccaccaagcucaacgaccugugcuucaccaacguguacgccgacuccuucgugauccggggcgacgagguccgccagaucgcccccgggcagaccggcaacaucgccgacuacaacuacaagcugccggacgacuucacggggugcgugaucgcguggaacagcaacaaccucgacuccaaggugggcggcaacuacaacuaccuguaccggcuguuccgcaagagcaaccucaagcccuucgagcgggacaucuccaccgagaucuaccaggccgggagcacccccugcaacggcgucaagggguucaacugcuacuucccccugcaguccuacggcuuccagccgaccuacggggugggcuaccagcccuaccgcguggucgugcugagcuucgagcuccugcacgcccccgccacggugugcggccccaagaaguccaccaaccuggucaagaacaagugcgugaacuucaacuucaacgggcucaccggcaccggggugcugaccgagagcaacaagaaguuccugccguuccagcaguucggccgggacaucgccgacacgaccgacgcgguccgcgacccccagacccucgagauccuggacaucacccccugcagcuucgggggcguguccgugaucacgccgggcaccaacaccagcaaccaggucgccgugcuguaccagggggugaacugcaccgagguccccguggccauccacgccgaccagcugacgcccaccuggcgcguguacuccaccggcagcaacgucuuccagacccgggccgggugccucaucggcgcggagcacgugaacaacuccuacgagugcgacauccccaucggcgccgggaucugcgccagcuaccagacgcagaccaacuccccgcgccgggcccgcagcguggcgucccagagcaucaucgccuacaccaugucccugggcgucgagaacagcguggccuacuccaacaacagcaucgccauccccaccaacuucacgaucuccgugaccaccgagauccugcccgucagcaugaccaagacgagcguggacugcaccauguacaucugcggggacuccaccgagugcagcaaccuccugcugcaguacggcuccuucugcacccagcucaaccgggcccugacggggaucgcgguggagcaggacaagaacacccaggaggucuucgcccaggugaagcagaucuacaagacgcccccgaucaaggacuucggcggcuucaacuucagccagauccugcccgaccccuccaagcccagcaagcgcuccuucaucgaggaccuccuguucaacaaggugacccuggccgacgccggguucaucaagcaguacggcgacugccucggggacaucgccgcgcgggaccugaucugcgcccagaaguucaacggccugaccguccucccgccccugcugaccgacgagaugaucgcccaguacaccagcgcccuccuggccgggaccaucacguccggcuggaccuucggcgcgggggccgcccugcagauccccuucgccaugcagauggcguaccgcuucaacggcaucggggugacccagaacgugcucuacgagaaccagaagcugaucgccaaccaguucaacagcgccaucggcaagauccaggacucccugagcuccaccgccagcgcccucgggaagcugcaggacgucgugaaccagaacgcgcaggcccugaacacgcucgugaagcagcuguccagcaacuucggcgccaucuccagcguccugaacgacauccucucccggcuggacccgcccgaggccgaggugcagaucgaccgccugaucaccggccggcuccagagccugcagaccuacgugacccagcagcugauccgcgccgcggagauccgggccagcgccaaccucgccgccaccaagauguccgagugcguccuggggcagagcaagcgcguggacuucugcggcaagggguaccaccugauguccuucccccagagcgcgccccacggcguggucuuccuccacgugacguacguccccgcccaggagaagaacuucaccaccgccccggccaucugccacgacgggaaggcgcacuucccccgggagggcguguucguguccaacggcacccacugguucgucacgcagcgcaacuucuacgagccccagaucaucaccaccgacaacaccuucgugagcgggaacugcgacguggucaucggcaucgugaacaacacgguguacgacccccugcagccggagcuggacuccuucaaggaggagcucgacaaguacuucaagaaccacaccagccccgacgucgaccugggggacaucuccggcaucaacgccagcguggugaacauccagaaggagaucgaccggcugaacgaggucgccaagaaccucaacgagucccugaucgaccugcaggagcucggcaaguacgagcaguacaucaaguggcccugguacaucuggcugggguucaucgccggccugaucgccaucgugauggugaccaucaugcucugcugcaugaccagcugcugcuccugccugaaggggugcugcagcugcggcuccugcugcaaguucgacgaggacgacagcgagccgguccugaagggggugaagcuccacuacacguga

SEQ ID NO: 23110 - RNA, 3822 nt, Artificial Sequence
  SARS-CoV-2/Wuhan/WIV05/2019__EPI_ISL_402128 spike protein CDS gc (1-1273)(K986P_V987P_K986P_V987P_E484K_D614G)
auguucguguuccugguccuccugccccuggugagcucccagugcgugaaccucaccacccgcacgcagcugccgcccgccuacaccaacagcuucacccggggcgucuacuaccccgacaagguguuccgcuccagcgugcugcacuccacccaggaccucuuccugcccuucuucagcaacgucacgugguuccacgccauccacguguccgggaccaacggcaccaagcgguucgacaacccggugcugcccuucaacgacggggucuacuucgcgagcaccgagaaguccaacaucauccgcggcuggaucuucgggacgacccucgacagcaagacccagucccugcugaucgugaacaacgccaccaacguggucaucaaggugugcgaguuccaguucugcaacgaccccuuccucggcguguacuaccacaagaacaacaagagcuggauggaguccgaguuccgggucuacagcuccgccaacaacugcacguucgaguacgugagccagcccuuccugauggaccuggagggcaagcaggggaacuucaagaaccuccgcgaguucguguucaagaacaucgacggcuacuucaagaucuacuccaagcacaccccgaucaaccugguccgggaccugccccagggguucagcgcccucgagccccugguggaccugcccaucggcaucaacaucacccgcuuccagacccuccuggcccugcaccgguccuaccucacgccgggggacagcagcuccggcuggaccgcgggcgccgccgccuacuacgugggguaccugcagccccgcaccuuccugcucaaguacaacgagaacggcaccaucacggacgcggucgacugcgcccuggacccccugagcgagaccaagugcacccucaaguccuucaccguggagaaggggaucuaccagacgagcaacuuccgggugcagcccaccgaguccaucguccgcuucccgaacaucaccaaccugugccccuucggcgagguguucaacgccacccgguucgccagcgucuacgccuggaaccgcaagcggaucuccaacugcguggcggacuacagcgugcuguacaacuccgccagcuucuccacguucaagugcuacggcgucagccccaccaagcucaacgaccugugcuucaccaacguguacgccgacuccuucgugauccgcggggacgagguccggcagaucgcccccggccagaccgggaagaucgccgacuacaacuacaagcugccggacgacuucacgggcugcgugaucgcguggaacagcaacaaccucgacuccaaggucgggggcaacuacaacuaccuguaccgccuguuccgcaagagcaaccucaagcccuucgagcgggacaucuccaccgagaucuaccaggccggcagcacccccugcaacggggugaagggcuucaacugcuacuucccccugcaguccuacggguuccagccgaccaacggcgugggguaccagcccuaccggguggucgugcugagcuucgagcuccugcacgcccccgccacggugugcggccccaagaaguccaccaaccuggucaagaacaagugcgugaacuucaacuucaacggccucaccgggaccggcgugcugaccgagagcaacaagaaguuccugccguuccagcaguucgggcgcgacaucgccgacacgaccgacgcgguccgcgacccccagacccuggagauccucgacaucacccccugcagcuucggcgggguguccgugaucacgccgggcaccaacaccagcaaccaggucgccgugcuguaccagggcgugaacugcaccgagguccccguggccauccacgccgaccagcugacgcccaccuggcggguguacuccaccgggagcaacgucuuccagacccgcgccggcugccucaucggggcggagcacgugaacaacuccuacgagugcgacauccccaucggcgccggcaucugcgccagcuaccagacgcagaccaacuccccgcggcgcgcccggagcguggcgucccagagcaucaucgccuacaccaugucccugggggccgagaacagcgucgccuacuccaacaacagcaucgccauccccaccaacuucacgaucuccgugaccaccgagauccugcccgugagcaugaccaagacgagcgucgacugcaccauguacaucugcggcgacuccaccgagugcagcaaccuccugcugcaguacggguccuucugcacccagcucaaccgcgcgcugacgggcaucgccguggagcaggacaagaacacccaggagguguucgcccaggucaagcagaucuacaagacgcccccgaucaaggacuucgggggcuucaacuucagccagauccugcccgaccccuccaagcccagcaagcgguccuucaucgaggaccuccuguucaacaaggugacccuggccgacgccggcuucaucaagcaguacggggacugccucggcgacaucgcggcccgcgaccugaucugcgcccagaaguucaacgggcugaccgugcucccgccccugcugaccgacgagaugaucgcccaguacaccagcgcccuccuggcgggcaccaucacguccggguggaccuucggcgccggcgccgcccugcagauccccuucgcgaugcagauggccuaccgguucaacgggaucggcgucacccagaacgugcucuacgagaaccagaagcugaucgccaaccaguucaacagcgccaucgggaagauccaggacucccugagcuccaccgccagcgcgcucggcaagcugcaggacguggucaaccagaacgcccaggcccugaacacgcucgugaagcagcuguccagcaacuucggggccaucuccagcgugcugaacgacauccucucccgccuggacccgcccgaggccgagguccagaucgaccggcugaucaccggccgccuccagagccugcagaccuacgugacccagcagcugauccgggcggccgagauccgcgccagcgccaaccucgccgcgaccaagauguccgagugcgugcugggccagagcaagcgggucgacuucugcgggaagggcuaccaccugauguccuucccccagagcgcgccccacggggugguguuccuccacgucacguacgugcccgcccaggagaagaacuucaccaccgccccggccaucugccacgacggcaaggcccacuucccccgcgagggggucuucguguccaacggcacccacugguucgugacgcagcggaacuucuacgagccccagaucaucaccaccgacaacaccuucgucagcggcaacugcgacguggugaucgggaucgucaacaacacgguguacgacccccugcagccggagcuggacuccuucaaggaggagcucgacaaguacuucaagaaccacaccagccccgacguggaccugggcgacaucuccgggaucaacgccagcgucgugaacauccagaaggagaucgaccgccugaacgagguggccaagaaccucaacgagucccugaucgaccugcaggagcucggcaaguacgagcaguacaucaaguggcccugguacaucuggcugggcuucaucgccgggcugaucgcgaucgucauggugaccaucaugcucugcugcaugaccagcugcugcuccugccugaagggcugcugcagcugcggguccugcugcaaguucgacgaggacgacagcgagccggugcugaagggcgucaagcuccacuacacguga

SEQ ID NO: 23111 - RNA, 3822 nt, Artificial Sequence
  SARS-CoV-2/Wuhan/WIV05/2019__EPI_ISL_402128 spike protein CDS gc (1-1273)(K986P_V987P_K986P_V987P_L18F_T20N_P26S_D138Y_R190S_K417T _E484K_N501Y_D614G_H655Y_T1027I)
auguucguguuccugguccuccugccccuggugagcucccagugcgugaacuucaccaaccgcacccagcucccgagcgccuacacgaacuccuucacccggggcgucuacuaccccgacaagguguuccgcagcuccgugcugcacagcacccaggaccuguuccuccccuucuucuccaacgucaccugguuccacgccauccacgugagcgggacgaacggcaccaagcgguucgacaaccccgugcugccguucaacgacggggucuacuucgcguccaccgagaaguccaacaucauccgcggcuggaucuucgggaccacgcuggacuccaagacccagagccuccugaucgugaacaacgccaccaacguggucaucaaggugugcgaguuccaguucugcaacuaccccuuccugggcguguacuaccacaagaacaacaaguccuggauggagagcgaguuccgggucuacuccagcgccaacaacugcaccuucgaguacgugucccagcccuuccucauggaccuggagggcaagcaggggaacuucaagaaccugagcgaguucguguucaagaacaucgacggcuacuucaagaucuacuccaagcacacgcccaucaaccucguccgcgaccugccgcagggguucagcgcccuggagccccucguggaccugcccaucggcaucaacaucacccgguuccagacccugcucgcccugcaccgcagcuaccugacccccggggacuccagcuccggcuggacggcgggcgccgccgccuacuacgugggguaccuccagccgcggaccuuccugcugaaguacaacgagaacggcaccaucaccgacgcggucgacugcgcccucgacccccugagcgagacgaagugcacccugaaguccuucaccguggagaaggggaucuaccagaccagcaacuuccgcgugcagcccacggaguccaucguccgguuccccaacaucaccaaccucugcccguucggcgagguguucaacgccacccgcuucgccagcgucuacgccuggaaccggaagcgcaucuccaacugcguggcggacuacagcgugcuguacaacuccgccagcuucuccaccuucaagugcuacggcgucagccccacgaagcugaacgaccucugcuucaccaacguguacgccgacuccuucgugauccgcggggacgagguccggcagaucgcccccggccagaccgggaccaucgccgacuacaacuacaagcugcccgacgacuucacgggcugcgugaucgcguggaacagcaacaaccuggacuccaaggucgggggcaacuacaacuaccucuaccggcuguuccgcaagagcaaccugaagccguucgagcgggacaucuccaccgagaucuaccaggccggcagcacccccugcaacggggugaagggcuucaacugcuacuucccccuccagagcuacggguuccagcccaccuacggcgugggguaccagccguaccgcguggucgugcuguccuucgagcugcuccacgcccccgccacggugugcggccccaagaaguccaccaaccuggucaagaacaagugcgugaacuucaacuucaacggccugaccgggaccggcgugcucaccgagagcaacaagaaguuccugcccuuccagcaguucgggcgggacaucgccgacacgaccgacgcgguccgcgacccgcagacccuggagauccuggacaucacccccugcagcuucggcgggguguccgugaucacgcccggcaccaacaccagcaaccaggucgccgugcucuaccagggcgugaacugcaccgaggucccgguggccauccacgccgaccagcugacgcccaccuggcgcguguacuccaccgggagcaacgucuuccagacccgggccggcugccugaucggggcggaguacgugaacaacuccuacgagugcgacauccccaucggcgccggcaucugcgccagcuaccagacgcagaccaacagcccccgccgggcccgcagcguggcgucccagagcaucaucgccuacaccaugucccucggggccgagaacagcgucgccuacuccaacaacagcaucgccaucccgaccaacuucacgaucagcgugaccaccgagauccugcccguguccaugaccaagacgagcgucgacugcaccauguacaucugcggcgacuccaccgagugcagcaaccugcuccugcaguacggguccuucugcacccagcugaaccgggcgcucacgggcaucgccguggagcaggacaagaacacccaggagguguucgcccaggucaagcagaucuacaagaccccgcccaucaaggacuucgggggcuucaacuucagccagauccugcccgaccccuccaagcccagcaagcgcuccuucaucgaggaccuccuguucaacaaggugacccuggccgacgccggcuucaucaagcaguacggggacugccugggcgacaucgcggcccgggaccucaucugcgcccagaaguucaacgggcugacggugcugcccccgcuccugaccgacgagaugaucgcccaguacaccagcgcccugcucgcgggcaccaucacguccggguggaccuucggcgccggcgccgcccugcagauccccuucgcgaugcagauggccuaccgcuucaacgggaucggcgucacccagaacgugcuguacgagaaccagaagcucaucgccaaccaguucaacagcgccaucgggaagauccaggacucccugagcuccaccgccagcgcgcugggcaagcuccaggacguggucaaccagaacgcccaggcccugaacacgcuggugaagcagcucuccagcaacuucggggccaucuccagcgugcugaacgacauccugagccggcucgacccgcccgaggccgagguccagaucgaccgccugaucaccggccggcugcagucccuccagaccuacgugacccagcagcugauccgcgcggccgagauccgggccagcgccaaccuggccgcgaucaagauguccgagugcgugcucggccagagcaagcgcgucgacuucugcgggaagggcuaccaccugauguccuucccccagagcgcgccccacggggugguguuccugcacgucaccuacgugcccgcccaggagaagaacuucacgaccgcccccgccaucugccacgacggcaaggcccacuucccgcgggagggggucuucguguccaacggcacccacugguucgugacccagcgcaacuucuacgagccccagaucaucacgaccgacaacaccuucgucagcggcaacugcgacguggugaucgggaucgucaacaacaccguguacgacccccuccagcccgagcuggacuccuucaaggaggagcuggacaaguacuucaagaaccacacgagcccggacguggaccucggcgacaucuccgggaucaacgccagcgucgugaacauccagaaggagaucgaccggcugaacgagguggccaagaaccugaacgagucccucaucgaccugcaggagcugggcaaguacgagcaguacaucaaguggcccugguacaucuggcucggcuucaucgccgggcugaucgcgaucgucauggugaccaucaugcugugcugcaugaccagcugcugcuccugccucaagggcugcugcagcugcggguccugcugcaaguucgacgaggacgacagcgagcccgugcugaagggcgucaagcugcacuacaccuga

SEQ ID NO: 23112 - RNA, 3822 nt, Artificial Sequence
  SARS-CoV-2/Wuhan/WIV05/2019__EPI_ISL_402128 spike protein CDS gc (1-1273)(K986P_V987P_K986P_V987P_S13I_W152C_L452R_D614G)
auguucguguuccugguccuccugccccuggugagcauccagugcgugaaccucaccacccgcacgcagcugccgcccgccuacaccaacuccuucacccggggcgucuacuaccccgacaagguguuccgcagcuccgugcugcacagcacccaggaccucuuccugcccuucuucuccaacgucacgugguuccacgccauccacgugagcgggaccaacggcaccaagcgguucgacaacccggugcugcccuucaacgacggggucuacuucgcguccaccgagaaguccaacaucauccgcggcuggaucuucgggacgacccucgacagcaagacccagagccugcugaucgugaacaacgccaccaacguggucaucaaggugugcgaguuccaguucugcaacgaccccuuccucggcguguacuaccacaagaacaacaaguccugcauggagagcgaguuccgggucuacuccagcgccaacaacugcacguucgaguacgugucccagcccuuccugauggaccuggagggcaagcaggggaacuucaagaaccuccgcgaguucguguucaagaacaucgacggcuacuucaagaucuacagcaagcacaccccgaucaaccugguccgggaccugccccagggguucuccgcccucgagccccugguggaccugcccaucggcaucaacaucacccgcuuccagacccuccuggcccugcaccggagcuaccucacgccgggggacuccagcagcggcuggaccgcgggcgccgccgccuacuacgugggguaccugcagccccgcaccuuccugcucaaguacaacgagaacggcaccaucacggacgcggucgacugcgcccuggacccccuguccgagaccaagugcacccucaagagcuucaccguggagaaggggaucuaccagacguccaacuuccgggugcagcccaccgagagcaucguccgcuucccgaacaucaccaaccugugccccuucggcgagguguucaacgccacccgguucgccuccgucuacgccuggaaccgcaagcggaucagcaacugcguggcggacuacuccgugcuguacaacagcgccuccuucagcacguucaagugcuacggcgucucccccaccaagcucaacgaccugugcuucaccaacguguacgccgacagcuucgugauccgcggggacgagguccggcagaucgcccccggccagaccgggaagaucgccgacuacaacuacaagcugccggacgacuucacgggcugcgugaucgcguggaacuccaacaaccucgacagcaaggucgggggcaacuacaacuaccgcuaccggcuguuccgcaaguccaaccugaagcccuucgagcgggacaucagcaccgagaucuaccaggccggcuccacccccugcaacgggguggagggcuucaacugcuacuucccccuccagagcuacggguuccagccgaccaacggcgugggguaccagcccuaccgcguggucgugcuguccuucgagcugcuccacgcccccgccacggugugcggccccaagaaguccaccaaccuggucaagaacaagugcgugaacuucaacuucaacggccugaccgggaccggcgugcucaccgagagcaacaagaaguuccugccguuccagcaguucgggcgcgacaucgccgacacgaccgacgcgguccgggacccccagacccuggagauccuggacaucacccccugcagcuucggcggggugagcgugaucacgccgggcaccaacaccuccaaccaggucgccgugcucuaccagggcgugaacugcaccgagguccccguggccauccacgccgaccagcugacgcccaccuggcgcguguacagcaccggguccaacgucuuccagacccgggccggcugccugaucggggcggagcacgugaacaacagcuacgagugcgacauccccaucggcgccggcaucugcgccuccuaccagacgcagaccaacagcccgcgccgggcccgcuccguggcgagccaguccaucaucgccuacaccaugagccucggggccgagaacuccgucgccuacagcaacaacuccaucgccauccccaccaacuucacgaucagcgugaccaccgagauccugcccguguccaugaccaagacgagcgucgacugcaccauguacaucugcggcgacagcaccgagugcuccaaccugcuccugcaguacgggagcuucugcacccagcugaaccgggcgcucacgggcaucgccguggagcaggacaagaacacccaggagguguucgcccaggucaagcagaucuacaagacgcccccgaucaaggacuucgggggcuucaacuucucccagauccugcccgaccccagcaagcccuccaagcgcagcuucaucgaggaccuccuguucaacaaggugacccuggccgacgccggcuucaucaagcaguacggggacugccugggcgacaucgcggcccgggaccucaucugcgcccagaaguucaacgggcugaccgugcugccgccccuccugaccgacgagaugaucgcccaguacaccuccgcccugcucgcgggcaccaucacgagcggguggaccuucggcgccggcgccgcccugcagauccccuucgcgaugcagauggccuaccgcuucaacgggaucggcgucacccagaacgugcuguacgagaaccagaagcucaucgccaaccaguucaacuccgccaucgggaagauccaggacagccuguccagcaccgccuccgcgcugggcaagcuccaggacguggucaaccagaacgcccaggcccugaacacgcuggugaagcagcucagcuccaacuucggggccaucagcuccgugcugaacgacauccugagccggcucgacccgcccgaggccgagguccagaucgaccgccugaucaccggccggcugcagucccuccagaccuacgugacccagcagcugauccgcgcggccgagauccgggccagcgccaaccuggccgcgaccaagaugagcgagugcgugcucggccaguccaagcgcgucgacuucugcgggaagggcuaccaccugaugagcuucccccaguccgcgccccacggggugguguuccugcacgucacguacgugcccgcccaggagaagaacuucaccaccgccccggccaucugccacgacggcaaggcccacuucccccgggagggggucuucgugagcaacggcacccacugguucgugacgcagcgcaacuucuacgagccccagaucaucaccaccgacaacaccuucgucuccggcaacugcgacguggugaucgggaucgucaacaacacgguguacgacccccuccagccggagcuggacagcuucaaggaggagcuggacaaguacuucaagaaccacaccucccccgacguggaccucggcgacaucagcgggaucaacgccuccgucgugaacauccagaaggagaucgaccggcugaacgagguggccaagaaccugaacgagagccucaucgaccugcaggagcugggcaaguacgagcaguacaucaaguggcccugguacaucuggcucggcuucaucgccgggcugaucgcgaucgucauggugaccaucaugcugugcugcaugaccuccugcugcagcugccucaagggcugcugcuccugcgggagcugcugcaaguucgacgaggacgacuccgagccggugcugaagggcgucaagcugcacuacacguga

SEQ ID NO: 23113 - RNA, 3822 nt, Artificial Sequence
  SARS-CoV-2/Wuhan/WIV05/2019__EPI_ISL_402128 spike protein CDS gc (1-1273)(K986P_V987P)
auguucguguuccuggugcugcugccccuggugagcagccagugcgugaaccugaccacccggacccagcugccaccagccuacaccaacagcuucacccggggcgucuacuaccccgacaagguguuccggagcagcguccugcacagcacccaggaccuguuccugcccuucuucagcaacgugaccugguuccacgccauccacgugagcggcaccaacggcaccaagcgguucgacaaccccgugcugcccuucaacgacggcguguacuucgccagcaccgagaagagcaacaucauccggggcuggaucuucggcaccacccuggacagcaagacccagagccugcugaucgugaauaacgccaccaacguggugaucaaggugugcgaguuccaguucugcaacgaccccuuccugggcguguacuaccacaagaacaacaagagcuggauggagagcgaguuccggguguacagcagcgccaacaacugcaccuucgaguacgugagccagcccuuccugauggaccuggagggcaagcagggcaacuucaagaaccugcgggaguucguguucaagaacaucgacggcuacuucaagaucuacagcaagcacaccccaaucaaccuggugcgggaucugccccagggcuucucagcccuggagccccugguggaccugcccaucggcaucaacaucacccgguuccagacccugcuggcccugcaccggagcuaccugaccccaggcgacagcagcagcggguggacagcaggcgcggcugcuuacuacgugggcuaccugcagccccggaccuuccugcugaaguacaacgagaacggcaccaucaccgacgccguggacugcgcccuggacccucugagcgagaccaagugcacccugaagagcuucaccguggagaagggcaucuaccagaccagcaacuuccgggugcagcccaccgagagcaucgugcgguuccccaacaucaccaaccugugccccuucggcgagguguucaacgccacccgguucgccagcguguacgccuggaaccggaagcggaucagcaacugcguggccgacuacagcgugcuguacaacagcgccagcuucagcaccuucaagugcuacggcgugagccccaccaagcugaacgaccugugcuucaccaacguguacgccgacagcuucgugauccguggcgacgaggugcggcagaucgcacccggccagacaggcaagaucgccgacuacaacuacaagcugcccgacgacuucaccggcugcgugaucgccuggaacagcaacaaccucgacagcaaggugggcggcaacuacaacuaccuguaccggcuguuccggaagagcaaccugaagcccuucgagcgggacaucagcaccgagaucuaccaagccggcuccaccccuugcaacggcguggagggcuucaacugcuacuucccucugcagagcuacggcuuccagcccaccaacggcgugggcuaccagcccuaccgggugguggugcugagcuucgagcugcugcacgccccagccaccguguguggccccaagaagagcaccaaccuggugaagaacaagugcgugaacuucaacuucaacggccuuaccggcaccggcgugcugaccgagagcaacaagaaauuccugcccuuucagcaguucggccgggacaucgccgacaccaccgacgcugugcgggauccccagacccuggagauccuggacaucaccccuugcagcuucggcggcgugagcgugaucaccccaggcaccaacaccagcaaccagguggccgugcuguaccaggacgugaacugcaccgaggugcccguggccauccacgccgaccagcugacacccaccuggcgggucuacagcaccggcagcaacguguuccagacccgggccgguugccugaucggcgccgagcacgugaacaacagcuacgagugcgacauccccaucggcgccggcaucugugccagcuaccagacccagaccaauucaccccggagggcaaggagcguggccagccagagcaucaucgccuacaccaugagccugggcgccgagaacagcguggccuacagcaacaacagcaucgccauccccaccaacuucaccaucagcgugaccaccgagauucugcccgugagcaugaccaagaccagcguggacugcaccauguacaucugcggcgacagcaccgagugcagcaaccugcugcugcaguacggcagcuucugcacccagcugaaccgggcccugaccggcaucgccguggagcaggacaagaacacccaggagguguucgcccaggugaagcagaucuacaagaccccucccaucaaggacuucggcggcuucaacuucagccagauccugcccgaccccagcaagcccagcaagcggagcuucaucgaggaccugcuguucaacaaggugacccuagccgacgccggcuucaucaagcaguacggcgacugccucggcgacauagccgcccgggaccugaucugcgcccagaaguucaacggccugaccgugcugccuccccugcugaccgacgagaugaucgcccaguacaccagcgcccuguuagccggaaccaucaccagcggcuggacuuucggcgcuggagccgcucugcagauccccuucgccaugcagauggccuaccgguucaacggcaucggcgugacccagaacgugcuguacgagaaccagaagcugaucgccaaccaguucaacagcgccaucggcaagauccaggacagccugagcagcaccgcuagcgcccugggcaagcugcaggacguggugaaccagaacgcccaggcccugaacacccuggugaagcagcugagcagcaacuucggcgccaucagcagcgugcugaacgacauccugagccggcuggacccucccgaggccgaggugcagaucgaccggcugaucacuggccggcugcagagccugcagaccuacgugacccagcagcugauccgggccgccgagauucgggccagcgccaaccuggccgccaccaagaugagcgagugcgugcugggccagagcaagcggguggacuucugcggcaagggcuaccaccugaugagcuuuccccagagcgcaccccacggagugguguuccugcacgugaccuacgugcccgcccaggagaagaacuucaccaccgccccagccaucugccacgacggcaaggcccacuuuccccgggagggcguguucgugagcaacggcacccacugguucgugacccagcggaacuucuacgagccccagaucaucaccaccgacaacaccuucgugagcggcaacugcgacguggugaucggcaucgugaacaacaccguguacgauccccugcagcccgagcuggacagcuucaaggaggagcuggacaaguacuucaagaaucacaccagccccgacguggaccugggcgacaucagcggcaucaacgccagcguggugaacauccagaaggagaucgaucggcugaacgagguggccaagaaccugaacgagagccugaucgaccugcaggagcugggcaaguacgagcaguacaucaaguggcccugguacaucuggcugggcuucaucgccggccugaucgccaucgugauggugaccaucaugcugugcugcaugaccagcugcugcagcugccugaagggcuguugcagcugcggcagcugcugcaaguucgacgaggacgacagcgagcccgugcugaagggcgugaagcugcacuacaccuga

SEQ ID NO: 23114 - RNA, 3822 nt, Artificial Sequence
  SARS-CoV-2/Wuhan/WIV05/2019__EPI_ISL_402128 spike protein CDS gc (1-1273)(K986P_V987P_ D614G)
auguucguguuccuggugcugcugccccuggugagcagccagugcgugaaccugaccacccggacccagcugccaccagccuacaccaacagcuucacccggggcgucuacuaccccgacaagguguuccggagcagcguccugcacagcacccaggaccuguuccugcccuucuucagcaacgugaccugguuccacgccauccacgugagcggcaccaacggcaccaagcgguucgacaaccccgugcugcccuucaacgacggcguguacuucgccagcaccgagaagagcaacaucauccggggcuggaucuucggcaccacccuggacagcaagacccagagccugcugaucgugaauaacgccaccaacguggugaucaaggugugcgaguuccaguucugcaacgaccccuuccugggcguguacuaccacaagaacaacaagagcuggauggagagcgaguuccggguguacagcagcgccaacaacugcaccuucgaguacgugagccagcccuuccugauggaccuggagggcaagcagggcaacuucaagaaccugcgggaguucguguucaagaacaucgacggcuacuucaagaucuacagcaagcacaccccaaucaaccuggugcgggaucugccccagggcuucucagcccuggagccccugguggaccugcccaucggcaucaacaucacccgguuccagacccugcuggcccugcaccggagcuaccugaccccaggcgacagcagcagcggguggacagcaggcgcggcugcuuacuacgugggcuaccugcagccccggaccuuccugcugaaguacaacgagaacggcaccaucaccgacgccguggacugcgcccuggacccucugagcgagaccaagugcacccugaagagcuucaccguggagaagggcaucuaccagaccagcaacuuccgggugcagcccaccgagagcaucgugcgguuccccaacaucaccaaccugugccccuucggcgagguguucaacgccacccgguucgccagcguguacgccuggaaccggaagcggaucagcaacugcguggccgacuacagcgugcuguacaacagcgccagcuucagcaccuucaagugcuacggcgugagccccaccaagcugaacgaccugugcuucaccaacguguacgccgacagcuucgugauccguggcgacgaggugcggcagaucgcacccggccagacaggcaagaucgccgacuacaacuacaagcugcccgacgacuucaccggcugcgugaucgccuggaacagcaacaaccucgacagcaaggugggcggcaacuacaacuaccuguaccggcuguuccggaagagcaaccugaagcccuucgagcgggacaucagcaccgagaucuaccaagccggcuccaccccuugcaacggcguggagggcuucaacugcuacuucccucugcagagcuacggcuuccagcccaccaacggcgugggcuaccagcccuaccgggugguggugcugagcuucgagcugcugcacgccccagccaccguguguggccccaagaagagcaccaaccuggugaagaacaagugcgugaacuucaacuucaacggccuuaccggcaccggcgugcugaccgagagcaacaagaaauuccugcccuuucagcaguucggccgggacaucgccgacaccaccgacgcugugcgggauccccagacccuggagauccuggacaucaccccuugcagcuucggcggcgugagcgugaucaccccaggcaccaacaccagcaaccagguggccgugcuguaccagggcgugaacugcaccgaggugcccguggccauccacgccgaccagcugacacccaccuggcgggucuacagcaccggcagcaacguguuccagacccgggccgguugccugaucggcgccgagcacgugaacaacagcuacgagugcgacauccccaucggcgccggcaucugugccagcuaccagacccagaccaauucaccccggagggcaaggagcguggccagccagagcaucaucgccuacaccaugagccugggcgccgagaacagcguggccuacagcaacaacagcaucgccauccccaccaacuucaccaucagcgugaccaccgagauucugcccgugagcaugaccaagaccagcguggacugcaccauguacaucugcggcgacagcaccgagugcagcaaccugcugcugcaguacggcagcuucugcacccagcugaaccgggcccugaccggcaucgccguggagcaggacaagaacacccaggagguguucgcccaggugaagcagaucuacaagaccccucccaucaaggacuucggcggcuucaacuucagccagauccugcccgaccccagcaagcccagcaagcggagcuucaucgaggaccugcuguucaacaaggugacccuagccgacgccggcuucaucaagcaguacggcgacugccucggcgacauagccgcccgggaccugaucugcgcccagaaguucaacggccugaccgugcugccuccccugcugaccgacgagaugaucgcccaguacaccagcgcccuguuagccggaaccaucaccagcggcuggacuuucggcgcuggagccgcucugcagauccccuucgccaugcagauggccuaccgguucaacggcaucggcgugacccagaacgugcuguacgagaaccagaagcugaucgccaaccaguucaacagcgccaucggcaagauccaggacagccugagcagcaccgcuagcgcccugggcaagcugcaggacguggugaaccagaacgcccaggcccugaacacccuggugaagcagcugagcagcaacuucggcgccaucagcagcgugcugaacgacauccugagccggcuggacccucccgaggccgaggugcagaucgaccggcugaucacuggccggcugcagagccugcagaccuacgugacccagcagcugauccgggccgccgagauucgggccagcgccaaccuggccgccaccaagaugagcgagugcgugcugggccagagcaagcggguggacuucugcggcaagggcuaccaccugaugagcuuuccccagagcgcaccccacggagugguguuccugcacgugaccuacgugcccgcccaggagaagaacuucaccaccgccccagccaucugccacgacggcaaggcccacuuuccccgggagggcguguucgugagcaacggcacccacugguucgugacccagcggaacuucuacgagccccagaucaucaccaccgacaacaccuucgugagcggcaacugcgacguggugaucggcaucgugaacaacaccguguacgauccccugcagcccgagcuggacagcuucaaggaggagcuggacaaguacuucaagaaucacaccagccccgacguggaccugggcgacaucagcggcaucaacgccagcguggugaacauccagaaggagaucgaucggcugaacgagguggccaagaaccugaacgagagccugaucgaccugcaggagcugggcaaguacgagcaguacaucaaguggcccugguacaucuggcugggcuucaucgccggccugaucgccaucgugauggugaccaucaugcugugcugcaugaccagcugcugcagcugccugaagggcuguugcagcugcggcagcugcugcaaguucgacgaggacgacagcgagcccgugcugaagggcgugaagcugcacuacaccuga

SEQ ID NO: 23115 - RNA, 3822 nt, Artificial Sequence
  SARS-CoV-2/Wuhan/WIV05/2019__EPI_ISL_402128 spike protein CDS gc (1-1273)(K986P_V987P_A222V_D614G)
auguucguguuccuggugcugcugccccuggugagcagccagugcgugaaccugaccacccggacccagcugccaccagccuacaccaacagcuucacccggggcgucuacuaccccgacaagguguuccggagcagcguccugcacagcacccaggaccuguuccugcccuucuucagcaacgugaccugguuccacgccauccacgugagcggcaccaacggcaccaagcgguucgacaaccccgugcugcccuucaacgacggcguguacuucgccagcaccgagaagagcaacaucauccggggcuggaucuucggcaccacccuggacagcaagacccagagccugcugaucgugaauaacgccaccaacguggugaucaaggugugcgaguuccaguucugcaacgaccccuuccugggcguguacuaccacaagaacaacaagagcuggauggagagcgaguuccggguguacagcagcgccaacaacugcaccuucgaguacgugagccagcccuuccugauggaccuggagggcaagcagggcaacuucaagaaccugcgggaguucguguucaagaacaucgacggcuacuucaagaucuacagcaagcacaccccaaucaaccuggugcgggaucugccccagggcuucucagugcuggagccccugguggaccugcccaucggcaucaacaucacccgguuccagacccugcuggcccugcaccggagcuaccugaccccaggcgacagcagcagcggguggacagcaggcgcggcugcuuacuacgugggcuaccugcagccccggaccuuccugcugaaguacaacgagaacggcaccaucaccgacgccguggacugcgcccuggacccucugagcgagaccaagugcacccugaagagcuucaccguggagaagggcaucuaccagaccagcaacuuccgggugcagcccaccgagagcaucgugcgguuccccaacaucaccaaccugugccccuucggcgagguguucaacgccacccgguucgccagcguguacgccuggaaccggaagcggaucagcaacugcguggccgacuacagcgugcuguacaacagcgccagcuucagcaccuucaagugcuacggcgugagccccaccaagcugaacgaccugugcuucaccaacguguacgccgacagcuucgugauccguggcgacgaggugcggcagaucgcacccggccagacaggcaagaucgccgacuacaacuacaagcugcccgacgacuucaccggcugcgugaucgccuggaacagcaacaaccucgacagcaaggugggcggcaacuacaacuaccuguaccggcuguuccggaagagcaaccugaagcccuucgagcgggacaucagcaccgagaucuaccaagccggcuccaccccuugcaacggcguggagggcuucaacugcuacuucccucugcagagcuacggcuuccagcccaccaacggcgugggcuaccagcccuaccgggugguggugcugagcuucgagcugcugcacgccccagccaccguguguggccccaagaagagcaccaaccuggugaagaacaagugcgugaacuucaacuucaacggccuuaccggcaccggcgugcugaccgagagcaacaagaaauuccugcccuuucagcaguucggccgggacaucgccgacaccaccgacgcugugcgggauccccagacccuggagauccuggacaucaccccuugcagcuucggcggcgugagcgugaucaccccaggcaccaacaccagcaaccagguggccgugcuguaccagggcgugaacugcaccgaggugcccguggccauccacgccgaccagcugacacccaccuggcgggucuacagcaccggcagcaacguguuccagacccgggccgguugccugaucggcgccgagcacgugaacaacagcuacgagugcgacauccccaucggcgccggcaucugugccagcuaccagacccagaccaauucaccccggagggcaaggagcguggccagccagagcaucaucgccuacaccaugagccugggcgccgagaacagcguggccuacagcaacaacagcaucgccauccccaccaacuucaccaucagcgugaccaccgagauucugcccgugagcaugaccaagaccagcguggacugcaccauguacaucugcggcgacagcaccgagugcagcaaccugcugcugcaguacggcagcuucugcacccagcugaaccgggcccugaccggcaucgccguggagcaggacaagaacacccaggagguguucgcccaggugaagcagaucuacaagaccccucccaucaaggacuucggcggcuucaacuucagccagauccugcccgaccccagcaagcccagcaagcggagcuucaucgaggaccugcuguucaacaaggugacccuagccgacgccggcuucaucaagcaguacggcgacugccucggcgacauagccgcccgggaccugaucugcgcccagaaguucaacggccugaccgugcugccuccccugcugaccgacgagaugaucgcccaguacaccagcgcccuguuagccggaaccaucaccagcggcuggacuuucggcgcuggagccgcucugcagauccccuucgccaugcagauggccuaccgguucaacggcaucggcgugacccagaacgugcuguacgagaaccagaagcugaucgccaaccaguucaacagcgccaucggcaagauccaggacagccugagcagcaccgcuagcgcccugggcaagcugcaggacguggugaaccagaacgcccaggcccugaacacccuggugaagcagcugagcagcaacuucggcgccaucagcagcgugcugaacgacauccugagccggcuggacccucccgaggccgaggugcagaucgaccggcugaucacuggccggcugcagagccugcagaccuacgugacccagcagcugauccgggccgccgagauucgggccagcgccaaccuggccgccaccaagaugagcgagugcgugcugggccagagcaagcggguggacuucugcggcaagggcuaccaccugaugagcuuuccccagagcgcaccccacggagugguguuccugcacgugaccuacgugcccgcccaggagaagaacuucaccaccgccccagccaucugccacgacggcaaggcccacuuuccccgggagggcguguucgugagcaacggcacccacugguucgugacccagcggaacuucuacgagccccagaucaucaccaccgacaacaccuucgugagcggcaacugcgacguggugaucggcaucgugaacaacaccguguacgauccccugcagcccgagcuggacagcuucaaggaggagcuggacaaguacuucaagaaucacaccagccccgacguggaccugggcgacaucagcggcaucaacgccagcguggugaacauccagaaggagaucgaucggcugaacgagguggccaagaaccugaacgagagccugaucgaccugcaggagcugggcaaguacgagcaguacaucaaguggcccugguacaucuggcugggcuucaucgccggccugaucgccaucgugauggugaccaucaugcugugcugcaugaccagcugcugcagcugccugaagggcuguugcagcugcggcagcugcugcaaguucgacgaggacgacagcgagcccgugcugaagggcgugaagcugcacuacaccuga

SEQ ID NO: 23116 - RNA, 3822 nt, Artificial Sequence
  SARS-CoV-2/Wuhan/WIV05/2019__EPI_ISL_402128 spike protein CDS gc (1-1273)(K986P_V987P_N439K_D614G)
auguucguguuccuggugcugcugccccuggugagcagccagugcgugaaccugaccacccggacccagcugccaccagccuacaccaacagcuucacccggggcgucuacuaccccgacaagguguuccggagcagcguccugcacagcacccaggaccuguuccugcccuucuucagcaacgugaccugguuccacgccauccacgugagcggcaccaacggcaccaagcgguucgacaaccccgugcugcccuucaacgacggcguguacuucgccagcaccgagaagagcaacaucauccggggcuggaucuucggcaccacccuggacagcaagacccagagccugcugaucgugaauaacgccaccaacguggugaucaaggugugcgaguuccaguucugcaacgaccccuuccugggcguguacuaccacaagaacaacaagagcuggauggagagcgaguuccggguguacagcagcgccaacaacugcaccuucgaguacgugagccagcccuuccugauggaccuggagggcaagcagggcaacuucaagaaccugcgggaguucguguucaagaacaucgacggcuacuucaagaucuacagcaagcacaccccaaucaaccuggugcgggaucugccccagggcuucucagcccuggagccccugguggaccugcccaucggcaucaacaucacccgguuccagacccugcuggcccugcaccggagcuaccugaccccaggcgacagcagcagcggguggacagcaggcgcggcugcuuacuacgugggcuaccugcagccccggaccuuccugcugaaguacaacgagaacggcaccaucaccgacgccguggacugcgcccuggacccucugagcgagaccaagugcacccugaagagcuucaccguggagaagggcaucuaccagaccagcaacuuccgggugcagcccaccgagagcaucgugcgguuccccaacaucaccaaccugugccccuucggcgagguguucaacgccacccgguucgccagcguguacgccuggaaccggaagcggaucagcaacugcguggccgacuacagcgugcuguacaacagcgccagcuucagcaccuucaagugcuacggcgugagccccaccaagcugaacgaccugugcuucaccaacguguacgccgacagcuucgugauccguggcgacgaggugcggcagaucgcacccggccagacaggcaagaucgccgacuacaacuacaagcugcccgacgacuucaccggcugcgugaucgccuggaacagcaagaaccucgacagcaaggugggcggcaacuacaacuaccuguaccggcuguuccggaagagcaaccugaagcccuucgagcgggacaucagcaccgagaucuaccaagccggcuccaccccuugcaacggcguggagggcuucaacugcuacuucccucugcagagcuacggcuuccagcccaccaacggcgugggcuaccagcccuaccgggugguggugcugagcuucgagcugcugcacgccccagccaccguguguggccccaagaagagcaccaaccuggugaagaacaagugcgugaacuucaacuucaacggccuuaccggcaccggcgugcugaccgagagcaacaagaaauuccugcccuuucagcaguucggccgggacaucgccgacaccaccgacgcugugcgggauccccagacccuggagauccuggacaucaccccuugcagcuucggcggcgugagcgugaucaccccaggcaccaacaccagcaaccagguggccgugcuguaccagggcgugaacugcaccgaggugcccguggccauccacgccgaccagcugacacccaccuggcgggucuacagcaccggcagcaacguguuccagacccgggccgguugccugaucggcgccgagcacgugaacaacagcuacgagugcgacauccccaucggcgccggcaucugugccagcuaccagacccagaccaauucaccccggagggcaaggagcguggccagccagagcaucaucgccuacaccaugagccugggcgccgagaacagcguggccuacagcaacaacagcaucgccauccccaccaacuucaccaucagcgugaccaccgagauucugcccgugagcaugaccaagaccagcguggacugcaccauguacaucugcggcgacagcaccgagugcagcaaccugcugcugcaguacggcagcuucugcacccagcugaaccgggcccugaccggcaucgccguggagcaggacaagaacacccaggagguguucgcccaggugaagcagaucuacaagaccccucccaucaaggacuucggcggcuucaacuucagccagauccugcccgaccccagcaagcccagcaagcggagcuucaucgaggaccugcuguucaacaaggugacccuagccgacgccggcuucaucaagcaguacggcgacugccucggcgacauagccgcccgggaccugaucugcgcccagaaguucaacggccugaccgugcugccuccccugcugaccgacgagaugaucgcccaguacaccagcgcccuguuagccggaaccaucaccagcggcuggacuuucggcgcuggagccgcucugcagauccccuucgccaugcagauggccuaccgguucaacggcaucggcgugacccagaacgugcuguacgagaaccagaagcugaucgccaaccaguucaacagcgccaucggcaagauccaggacagccugagcagcaccgcuagcgcccugggcaagcugcaggacguggugaaccagaacgcccaggcccugaacacccuggugaagcagcugagcagcaacuucggcgccaucagcagcgugcugaacgacauccugagccggcuggacccucccgaggccgaggugcagaucgaccggcugaucacuggccggcugcagagccugcagaccuacgugacccagcagcugauccgggccgccgagauucgggccagcgccaaccuggccgccaccaagaugagcgagugcgugcugggccagagcaagcggguggacuucugcggcaagggcuaccaccugaugagcuuuccccagagcgcaccccacggagugguguuccugcacgugaccuacgugcccgcccaggagaagaacuucaccaccgccccagccaucugccacgacggcaaggcccacuuuccccgggagggcguguucgugagcaacggcacccacugguucgugacccagcggaacuucuacgagccccagaucaucaccaccgacaacaccuucgugagcggcaacugcgacguggugaucggcaucgugaacaacaccguguacgauccccugcagcccgagcuggacagcuucaaggaggagcuggacaaguacuucaagaaucacaccagccccgacguggaccugggcgacaucagcggcaucaacgccagcguggugaacauccagaaggagaucgaucggcugaacgagguggccaagaaccugaacgagagccugaucgaccugcaggagcugggcaaguacgagcaguacaucaaguggcccugguacaucuggcugggcuucaucgccggccugaucgccaucgugauggugaccaucaugcugugcugcaugaccagcugcugcagcugccugaagggcuguugcagcugcggcagcugcugcaaguucgacgaggacgacagcgagcccgugcugaagggcgugaagcugcacuacaccuga

SEQ ID NO: 23117 - RNA, 3822 nt, Artificial Sequence
  SARS-CoV-2/Wuhan/WIV05/2019__EPI_ISL_402128 spike protein CDS gc (1-1273)(K986P_V987P_S477N_D614G)
auguucguguuccuggugcugcugccccuggugagcagccagugcgugaaccugaccacccggacccagcugccaccagccuacaccaacagcuucacccggggcgucuacuaccccgacaagguguuccggagcagcguccugcacagcacccaggaccuguuccugcccuucuucagcaacgugaccugguuccacgccauccacgugagcggcaccaacggcaccaagcgguucgacaaccccgugcugcccuucaacgacggcguguacuucgccagcaccgagaagagcaacaucauccggggcuggaucuucggcaccacccuggacagcaagacccagagccugcugaucgugaauaacgccaccaacguggugaucaaggugugcgaguuccaguucugcaacgaccccuuccugggcguguacuaccacaagaacaacaagagcuggauggagagcgaguuccggguguacagcagcgccaacaacugcaccuucgaguacgugagccagcccuuccugauggaccuggagggcaagcagggcaacuucaagaaccugcgggaguucguguucaagaacaucgacggcuacuucaagaucuacagcaagcacaccccaaucaaccuggugcgggaucugccccagggcuucucagcccuggagccccugguggaccugcccaucggcaucaacaucacccgguuccagacccugcuggcccugcaccggagcuaccugaccccaggcgacagcagcagcggguggacagcaggcgcggcugcuuacuacgugggcuaccugcagccccggaccuuccugcugaaguacaacgagaacggcaccaucaccgacgccguggacugcgcccuggacccucugagcgagaccaagugcacccugaagagcuucaccguggagaagggcaucuaccagaccagcaacuuccgggugcagcccaccgagagcaucgugcgguuccccaacaucaccaaccugugccccuucggcgagguguucaacgccacccgguucgccagcguguacgccuggaaccggaagcggaucagcaacugcguggccgacuacagcgugcuguacaacagcgccagcuucagcaccuucaagugcuacggcgugagccccaccaagcugaacgaccugugcuucaccaacguguacgccgacagcuucgugauccguggcgacgaggugcggcagaucgcacccggccagacaggcaagaucgccgacuacaacuacaagcugcccgacgacuucaccggcugcgugaucgccuggaacagcaacaaccucgacagcaaggugggcggcaacuacaacuaccuguaccggcuguuccggaagagcaaccugaagcccuucgagcgggacaucagcaccgagaucuaccaagccggcaacaccccuugcaacggcguggagggcuucaacugcuacuucccucugcagagcuacggcuuccagcccaccaacggcgugggcuaccagcccuaccgggugguggugcugagcuucgagcugcugcacgccccagccaccguguguggccccaagaagagcaccaaccuggugaagaacaagugcgugaacuucaacuucaacggccuuaccggcaccggcgugcugaccgagagcaacaagaaauuccugcccuuucagcaguucggccgggacaucgccgacaccaccgacgcugugcgggauccccagacccuggagauccuggacaucaccccuugcagcuucggcggcgugagcgugaucaccccaggcaccaacaccagcaaccagguggccgugcuguaccagggcgugaacugcaccgaggugcccguggccauccacgccgaccagcugacacccaccuggcgggucuacagcaccggcagcaacguguuccagacccgggccgguugccugaucggcgccgagcacgugaacaacagcuacgagugcgacauccccaucggcgccggcaucugugccagcuaccagacccagaccaauucaccccggagggcaaggagcguggccagccagagcaucaucgccuacaccaugagccugggcgccgagaacagcguggccuacagcaacaacagcaucgccauccccaccaacuucaccaucagcgugaccaccgagauucugcccgugagcaugaccaagaccagcguggacugcaccauguacaucugcggcgacagcaccgagugcagcaaccugcugcugcaguacggcagcuucugcacccagcugaaccgggcccugaccggcaucgccguggagcaggacaagaacacccaggagguguucgcccaggugaagcagaucuacaagaccccucccaucaaggacuucggcggcuucaacuucagccagauccugcccgaccccagcaagcccagcaagcggagcuucaucgaggaccugcuguucaacaaggugacccuagccgacgccggcuucaucaagcaguacggcgacugccucggcgacauagccgcccgggaccugaucugcgcccagaaguucaacggccugaccgugcugccuccccugcugaccgacgagaugaucgcccaguacaccagcgcccuguuagccggaaccaucaccagcggcuggacuuucggcgcuggagccgcucugcagauccccuucgccaugcagauggccuaccgguucaacggcaucggcgugacccagaacgugcuguacgagaaccagaagcugaucgccaaccaguucaacagcgccaucggcaagauccaggacagccugagcagcaccgcuagcgcccugggcaagcugcaggacguggugaaccagaacgcccaggcccugaacacccuggugaagcagcugagcagcaacuucggcgccaucagcagcgugcugaacgacauccugagccggcuggacccucccgaggccgaggugcagaucgaccggcugaucacuggccggcugcagagccugcagaccuacgugacccagcagcugauccgggccgccgagauucgggccagcgccaaccuggccgccaccaagaugagcgagugcgugcugggccagagcaagcggguggacuucugcggcaagggcuaccaccugaugagcuuuccccagagcgcaccccacggagugguguuccugcacgugaccuacgugcccgcccaggagaagaacuucaccaccgccccagccaucugccacgacggcaaggcccacuuuccccgggagggcguguucgugagcaacggcacccacugguucgugacccagcggaacuucuacgagccccagaucaucaccaccgacaacaccuucgugagcggcaacugcgacguggugaucggcaucgugaacaacaccguguacgauccccugcagcccgagcuggacagcuucaaggaggagcuggacaaguacuucaagaaucacaccagccccgacguggaccugggcgacaucagcggcaucaacgccagcguggugaacauccagaaggagaucgaucggcugaacgagguggccaagaaccugaacgagagccugaucgaccugcaggagcugggcaaguacgagcaguacaucaaguggcccugguacaucuggcugggcuucaucgccggccugaucgccaucgugauggugaccaucaugcugugcugcaugaccagcugcugcagcugccugaagggcuguugcagcugcggcagcugcugcaaguucgacgaggacgacagcgagcccgugcugaagggcgugaagcugcacuacaccuga

SEQ ID NO: 23118 - RNA, 3822 nt, Artificial Sequence
  SARS-CoV-2/Wuhan/WIV05/2019__EPI_ISL_402128 spike protein CDS gc (1-1273)(K986P_V987P_N501Y_D614G)
auguucguguuccuggugcugcugccccuggugagcagccagugcgugaaccugaccacccggacccagcugccaccagccuacaccaacagcuucacccggggcgucuacuaccccgacaagguguuccggagcagcguccugcacagcacccaggaccuguuccugcccuucuucagcaacgugaccugguuccacgccauccacgugagcggcaccaacggcaccaagcgguucgacaaccccgugcugcccuucaacgacggcguguacuucgccagcaccgagaagagcaacaucauccggggcuggaucuucggcaccacccuggacagcaagacccagagccugcugaucgugaauaacgccaccaacguggugaucaaggugugcgaguuccaguucugcaacgaccccuuccugggcguguacuaccacaagaacaacaagagcuggauggagagcgaguuccggguguacagcagcgccaacaacugcaccuucgaguacgugagccagcccuuccugauggaccuggagggcaagcagggcaacuucaagaaccugcgggaguucguguucaagaacaucgacggcuacuucaagaucuacagcaagcacaccccaaucaaccuggugcgggaucugccccagggcuucucagcccuggagccccugguggaccugcccaucggcaucaacaucacccgguuccagacccugcuggcccugcaccggagcuaccugaccccaggcgacagcagcagcggguggacagcaggcgcggcugcuuacuacgugggcuaccugcagccccggaccuuccugcugaaguacaacgagaacggcaccaucaccgacgccguggacugcgcccuggacccucugagcgagaccaagugcacccugaagagcuucaccguggagaagggcaucuaccagaccagcaacuuccgggugcagcccaccgagagcaucgugcgguuccccaacaucaccaaccugugccccuucggcgagguguucaacgccacccgguucgccagcguguacgccuggaaccggaagcggaucagcaacugcguggccgacuacagcgugcuguacaacagcgccagcuucagcaccuucaagugcuacggcgugagccccaccaagcugaacgaccugugcuucaccaacguguacgccgacagcuucgugauccguggcgacgaggugcggcagaucgcacccggccagacaggcaagaucgccgacuacaacuacaagcugcccgacgacuucaccggcugcgugaucgccuggaacagcaacaaccucgacagcaaggugggcggcaacuacaacuaccuguaccggcuguuccggaagagcaaccugaagcccuucgagcgggacaucagcaccgagaucuaccaagccggcuccaccccuugcaacggcguggagggcuucaacugcuacuucccucugcagagcuacggcuuccagcccaccuacggcgugggcuaccagcccuaccgggugguggugcugagcuucgagcugcugcacgccccagccaccguguguggccccaagaagagcaccaaccuggugaagaacaagugcgugaacuucaacuucaacggccuuaccggcaccggcgugcugaccgagagcaacaagaaauuccugcccuuucagcaguucggccgggacaucgccgacaccaccgacgcugugcgggauccccagacccuggagauccuggacaucaccccuugcagcuucggcggcgugagcgugaucaccccaggcaccaacaccagcaaccagguggccgugcuguaccagggcgugaacugcaccgaggugcccguggccauccacgccgaccagcugacacccaccuggcgggucuacagcaccggcagcaacguguuccagacccgggccgguugccugaucggcgccgagcacgugaacaacagcuacgagugcgacauccccaucggcgccggcaucugugccagcuaccagacccagaccaauucaccccggagggcaaggagcguggccagccagagcaucaucgccuacaccaugagccugggcgccgagaacagcguggccuacagcaacaacagcaucgccauccccaccaacuucaccaucagcgugaccaccgagauucugcccgugagcaugaccaagaccagcguggacugcaccauguacaucugcggcgacagcaccgagugcagcaaccugcugcugcaguacggcagcuucugcacccagcugaaccgggcccugaccggcaucgccguggagcaggacaagaacacccaggagguguucgcccaggugaagcagaucuacaagaccccucccaucaaggacuucggcggcuucaacuucagccagauccugcccgaccccagcaagcccagcaagcggagcuucaucgaggaccugcuguucaacaaggugacccuagccgacgccggcuucaucaagcaguacggcgacugccucggcgacauagccgcccgggaccugaucugcgcccagaaguucaacggccugaccgugcugccuccccugcugaccgacgagaugaucgcccaguacaccagcgcccuguuagccggaaccaucaccagcggcuggacuuucggcgcuggagccgcucugcagauccccuucgccaugcagauggccuaccgguucaacggcaucggcgugacccagaacgugcuguacgagaaccagaagcugaucgccaaccaguucaacagcgccaucggcaagauccaggacagccugagcagcaccgcuagcgcccugggcaagcugcaggacguggugaaccagaacgcccaggcccugaacacccuggugaagcagcugagcagcaacuucggcgccaucagcagcgugcugaacgacauccugagccggcuggacccucccgaggccgaggugcagaucgaccggcugaucacuggccggcugcagagccugcagaccuacgugacccagcagcugauccgggccgccgagauucgggccagcgccaaccuggccgccaccaagaugagcgagugcgugcugggccagagcaagcggguggacuucugcggcaagggcuaccaccugaugagcuuuccccagagcgcaccccacggagugguguuccugcacgugaccuacgugcccgcccaggagaagaacuucaccaccgccccagccaucugccacgacggcaaggcccacuuuccccgggagggcguguucgugagcaacggcacccacugguucgugacccagcggaacuucuacgagccccagaucaucaccaccgacaacaccuucgugagcggcaacugcgacguggugaucggcaucgugaacaacaccguguacgauccccugcagcccgagcuggacagcuucaaggaggagcuggacaaguacuucaagaaucacaccagccccgacguggaccugggcgacaucagcggcaucaacgccagcguggugaacauccagaaggagaucgaucggcugaacgagguggccaagaaccugaacgagagccugaucgaccugcaggagcugggcaaguacgagcaguacaucaaguggcccugguacaucuggcugggcuucaucgccggccugaucgccaucgugauggugaccaucaugcugugcugcaugaccagcugcugcagcugccugaagggcuguugcagcugcggcagcugcugcaaguucgacgaggacgacagcgagcccgugcugaagggcgugaagcugcacuacaccuga

SEQ ID NO: 23119 - RNA, 3816 nt, Artificial Sequence
  SARS-CoV-2/Wuhan/WIV05/2019__EPI_ISL_402128 spike protein CDS gc (1-1273)(K986P_V987P_H69del_V70del_D614G)
auguucguguuccuggugcugcugccccuggugagcagccagugcgugaaccugaccacccggacccagcugccaccagccuacaccaacagcuucacccggggcgucuacuaccccgacaagguguuccggagcagcguccugcacagcacccaggaccuguuccugcccuucuucagcaacgugaccugguuccacgccaucagcggcaccaacggcaccaagcgguucgacaaccccgugcugcccuucaacgacggcguguacuucgccagcaccgagaagagcaacaucauccggggcuggaucuucggcaccacccuggacagcaagacccagagccugcugaucgugaauaacgccaccaacguggugaucaaggugugcgaguuccaguucugcaacgaccccuuccugggcguguacuaccacaagaacaacaagagcuggauggagagcgaguuccggguguacagcagcgccaacaacugcaccuucgaguacgugagccagcccuuccugauggaccuggagggcaagcagggcaacuucaagaaccugcgggaguucguguucaagaacaucgacggcuacuucaagaucuacagcaagcacaccccaaucaaccuggugcgggaucugccccagggcuucucagcccuggagccccugguggaccugcccaucggcaucaacaucacccgguuccagacccugcuggcccugcaccggagcuaccugaccccaggcgacagcagcagcggguggacagcaggcgcggcugcuuacuacgugggcuaccugcagccccggaccuuccugcugaaguacaacgagaacggcaccaucaccgacgccguggacugcgcccuggacccucugagcgagaccaagugcacccugaagagcuucaccguggagaagggcaucuaccagaccagcaacuuccgggugcagcccaccgagagcaucgugcgguuccccaacaucaccaaccugugccccuucggcgagguguucaacgccacccgguucgccagcguguacgccuggaaccggaagcggaucagcaacugcguggccgacuacagcgugcuguacaacagcgccagcuucagcaccuucaagugcuacggcgugagccccaccaagcugaacgaccugugcuucaccaacguguacgccgacagcuucgugauccguggcgacgaggugcggcagaucgcacccggccagacaggcaagaucgccgacuacaacuacaagcugcccgacgacuucaccggcugcgugaucgccuggaacagcaacaaccucgacagcaaggugggcggcaacuacaacuaccuguaccggcuguuccggaagagcaaccugaagcccuucgagcgggacaucagcaccgagaucuaccaagccggcuccaccccuugcaacggcguggagggcuucaacugcuacuucccucugcagagcuacggcuuccagcccaccaacggcgugggcuaccagcccuaccgggugguggugcugagcuucgagcugcugcacgccccagccaccguguguggccccaagaagagcaccaaccuggugaagaacaagugcgugaacuucaacuucaacggccuuaccggcaccggcgugcugaccgagagcaacaagaaauuccugcccuuucagcaguucggccgggacaucgccgacaccaccgacgcugugcgggauccccagacccuggagauccuggacaucaccccuugcagcuucggcggcgugagcgugaucaccccaggcaccaacaccagcaaccagguggccgugcuguaccagggcgugaacugcaccgaggugcccguggccauccacgccgaccagcugacacccaccuggcgggucuacagcaccggcagcaacguguuccagacccgggccgguugccugaucggcgccgagcacgugaacaacagcuacgagugcgacauccccaucggcgccggcaucugugccagcuaccagacccagaccaauucaccccggagggcaaggagcguggccagccagagcaucaucgccuacaccaugagccugggcgccgagaacagcguggccuacagcaacaacagcaucgccauccccaccaacuucaccaucagcgugaccaccgagauucugcccgugagcaugaccaagaccagcguggacugcaccauguacaucugcggcgacagcaccgagugcagcaaccugcugcugcaguacggcagcuucugcacccagcugaaccgggcccugaccggcaucgccguggagcaggacaagaacacccaggagguguucgcccaggugaagcagaucuacaagaccccucccaucaaggacuucggcggcuucaacuucagccagauccugcccgaccccagcaagcccagcaagcggagcuucaucgaggaccugcuguucaacaaggugacccuagccgacgccggcuucaucaagcaguacggcgacugccucggcgacauagccgcccgggaccugaucugcgcccagaaguucaacggccugaccgugcugccuccccugcugaccgacgagaugaucgcccaguacaccagcgcccuguuagccggaaccaucaccagcggcuggacuuucggcgcuggagccgcucugcagauccccuucgccaugcagauggccuaccgguucaacggcaucggcgugacccagaacgugcuguacgagaaccagaagcugaucgccaaccaguucaacagcgccaucggcaagauccaggacagccugagcagcaccgcuagcgcccugggcaagcugcaggacguggugaaccagaacgcccaggcccugaacacccuggugaagcagcugagcagcaacuucggcgccaucagcagcgugcugaacgacauccugagccggcuggacccucccgaggccgaggugcagaucgaccggcugaucacuggccggcugcagagccugcagaccuacgugacccagcagcugauccgggccgccgagauucgggccagcgccaaccuggccgccaccaagaugagcgagugcgugcugggccagagcaagcggguggacuucugcggcaagggcuaccaccugaugagcuuuccccagagcgcaccccacggagugguguuccugcacgugaccuacgugcccgcccaggagaagaacuucaccaccgccccagccaucugccacgacggcaaggcccacuuuccccgggagggcguguucgugagcaacggcacccacugguucgugacccagcggaacuucuacgagccccagaucaucaccaccgacaacaccuucgugagcggcaacugcgacguggugaucggcaucgugaacaacaccguguacgauccccugcagcccgagcuggacagcuucaaggaggagcuggacaaguacuucaagaaucacaccagccccgacguggaccugggcgacaucagcggcaucaacgccagcguggugaacauccagaaggagaucgaucggcugaacgagguggccaagaaccugaacgagagccugaucgaccugcaggagcugggcaaguacgagcaguacaucaaguggcccugguacaucuggcugggcuucaucgccggccugaucgccaucgugauggugaccaucaugcugugcugcaugaccagcugcugcagcugccugaagggcuguugcagcugcggcagcugcugcaaguucgacgaggacgacagcgagcccgugcugaagggcgugaagcugcacuacaccuga

SEQ ID NO: 23120 - RNA, 3822 nt, Artificial Sequence
  SARS-CoV-2/Wuhan/WIV05/2019__EPI_ISL_402128 spike protein CDS gc (1-1273)(K986P_V987P_Y453F_D614G)
auguucguguuccuggugcugcugccccuggugagcagccagugcgugaaccugaccacccggacccagcugccaccagccuacaccaacagcuucacccggggcgucuacuaccccgacaagguguuccggagcagcguccugcacagcacccaggaccuguuccugcccuucuucagcaacgugaccugguuccacgccauccacgugagcggcaccaacggcaccaagcgguucgacaaccccgugcugcccuucaacgacggcguguacuucgccagcaccgagaagagcaacaucauccggggcuggaucuucggcaccacccuggacagcaagacccagagccugcugaucgugaauaacgccaccaacguggugaucaaggugugcgaguuccaguucugcaacgaccccuuccugggcguguacuaccacaagaacaacaagagcuggauggagagcgaguuccggguguacagcagcgccaacaacugcaccuucgaguacgugagccagcccuuccugauggaccuggagggcaagcagggcaacuucaagaaccugcgggaguucguguucaagaacaucgacggcuacuucaagaucuacagcaagcacaccccaaucaaccuggugcgggaucugccccagggcuucucagcccuggagccccugguggaccugcccaucggcaucaacaucacccgguuccagacccugcuggcccugcaccggagcuaccugaccccaggcgacagcagcagcggguggacagcaggcgcggcugcuuacuacgugggcuaccugcagccccggaccuuccugcugaaguacaacgagaacggcaccaucaccgacgccguggacugcgcccuggacccucugagcgagaccaagugcacccugaagagcuucaccguggagaagggcaucuaccagaccagcaacuuccgggugcagcccaccgagagcaucgugcgguuccccaacaucaccaaccugugccccuucggcgagguguucaacgccacccgguucgccagcguguacgccuggaaccggaagcggaucagcaacugcguggccgacuacagcgugcuguacaacagcgccagcuucagcaccuucaagugcuacggcgugagccccaccaagcugaacgaccugugcuucaccaacguguacgccgacagcuucgugauccguggcgacgaggugcggcagaucgcacccggccagacaggcaagaucgccgacuacaacuacaagcugcccgacgacuucaccggcugcgugaucgccuggaacagcaacaaccucgacagcaaggugggcggcaacuacaacuaccuguuccggcuguuccggaagagcaaccugaagcccuucgagcgggacaucagcaccgagaucuaccaagccggcuccaccccuugcaacggcguggagggcuucaacugcuacuucccucugcagagcuacggcuuccagcccaccaacggcgugggcuaccagcccuaccgggugguggugcugagcuucgagcugcugcacgccccagccaccguguguggccccaagaagagcaccaaccuggugaagaacaagugcgugaacuucaacuucaacggccuuaccggcaccggcgugcugaccgagagcaacaagaaauuccugcccuuucagcaguucggccgggacaucgccgacaccaccgacgcugugcgggauccccagacccuggagauccuggacaucaccccuugcagcuucggcggcgugagcgugaucaccccaggcaccaacaccagcaaccagguggccgugcuguaccagggcgugaacugcaccgaggugcccguggccauccacgccgaccagcugacacccaccuggcgggucuacagcaccggcagcaacguguuccagacccgggccgguugccugaucggcgccgagcacgugaacaacagcuacgagugcgacauccccaucggcgccggcaucugugccagcuaccagacccagaccaauucaccccggagggcaaggagcguggccagccagagcaucaucgccuacaccaugagccugggcgccgagaacagcguggccuacagcaacaacagcaucgccauccccaccaacuucaccaucagcgugaccaccgagauucugcccgugagcaugaccaagaccagcguggacugcaccauguacaucugcggcgacagcaccgagugcagcaaccugcugcugcaguacggcagcuucugcacccagcugaaccgggcccugaccggcaucgccguggagcaggacaagaacacccaggagguguucgcccaggugaagcagaucuacaagaccccucccaucaaggacuucggcggcuucaacuucagccagauccugcccgaccccagcaagcccagcaagcggagcuucaucgaggaccugcuguucaacaaggugacccuagccgacgccggcuucaucaagcaguacggcgacugccucggcgacauagccgcccgggaccugaucugcgcccagaaguucaacggccugaccgugcugccuccccugcugaccgacgagaugaucgcccaguacaccagcgcccuguuagccggaaccaucaccagcggcuggacuuucggcgcuggagccgcucugcagauccccuucgccaugcagauggccuaccgguucaacggcaucggcgugacccagaacgugcuguacgagaaccagaagcugaucgccaaccaguucaacagcgccaucggcaagauccaggacagccugagcagcaccgcuagcgcccugggcaagcugcaggacguggugaaccagaacgcccaggcccugaacacccuggugaagcagcugagcagcaacuucggcgccaucagcagcgugcugaacgacauccugagccggcuggacccucccgaggccgaggugcagaucgaccggcugaucacuggccggcugcagagccugcagaccuacgugacccagcagcugauccgggccgccgagauucgggccagcgccaaccuggccgccaccaagaugagcgagugcgugcugggccagagcaagcggguggacuucugcggcaagggcuaccaccugaugagcuuuccccagagcgcaccccacggagugguguuccugcacgugaccuacgugcccgcccaggagaagaacuucaccaccgccccagccaucugccacgacggcaaggcccacuuuccccgggagggcguguucgugagcaacggcacccacugguucgugacccagcggaacuucuacgagccccagaucaucaccaccgacaacaccuucgugagcggcaacugcgacguggugaucggcaucgugaacaacaccguguacgauccccugcagcccgagcuggacagcuucaaggaggagcuggacaaguacuucaagaaucacaccagccccgacguggaccugggcgacaucagcggcaucaacgccagcguggugaacauccagaaggagaucgaucggcugaacgagguggccaagaaccugaacgagagccugaucgaccugcaggagcugggcaaguacgagcaguacaucaaguggcccugguacaucuggcugggcuucaucgccggccugaucgccaucgugauggugaccaucaugcugugcugcaugaccagcugcugcagcugccugaagggcuguugcagcugcggcagcugcugcaaguucgacgaggacgacagcgagcccgugcugaagggcgugaagcugcacuacaccuga

SEQ ID NO: 23121 - RNA, 3822 nt, Artificial Sequence
  SARS-CoV-2/Wuhan/WIV05/2019__EPI_ISL_402128 spike protein CDS gc (1-1273)(K986P_V987P_D614G_I692V)
auguucguguuccuggugcugcugccccuggugagcagccagugcgugaaccugaccacccggacccagcugccaccagccuacaccaacagcuucacccggggcgucuacuaccccgacaagguguuccggagcagcguccugcacagcacccaggaccuguuccugcccuucuucagcaacgugaccugguuccacgccauccacgugagcggcaccaacggcaccaagcgguucgacaaccccgugcugcccuucaacgacggcguguacuucgccagcaccgagaagagcaacaucauccggggcuggaucuucggcaccacccuggacagcaagacccagagccugcugaucgugaauaacgccaccaacguggugaucaaggugugcgaguuccaguucugcaacgaccccuuccugggcguguacuaccacaagaacaacaagagcuggauggagagcgaguuccggguguacagcagcgccaacaacugcaccuucgaguacgugagccagcccuuccugauggaccuggagggcaagcagggcaacuucaagaaccugcgggaguucguguucaagaacaucgacggcuacuucaagaucuacagcaagcacaccccaaucaaccuggugcgggaucugccccagggcuucucagcccuggagccccugguggaccugcccaucggcaucaacaucacccgguuccagacccugcuggcccugcaccggagcuaccugaccccaggcgacagcagcagcggguggacagcaggcgcggcugcuuacuacgugggcuaccugcagccccggaccuuccugcugaaguacaacgagaacggcaccaucaccgacgccguggacugcgcccuggacccucugagcgagaccaagugcacccugaagagcuucaccguggagaagggcaucuaccagaccagcaacuuccgggugcagcccaccgagagcaucgugcgguuccccaacaucaccaaccugugccccuucggcgagguguucaacgccacccgguucgccagcguguacgccuggaaccggaagcggaucagcaacugcguggccgacuacagcgugcuguacaacagcgccagcuucagcaccuucaagugcuacggcgugagccccaccaagcugaacgaccugugcuucaccaacguguacgccgacagcuucgugauccguggcgacgaggugcggcagaucgcacccggccagacaggcaagaucgccgacuacaacuacaagcugcccgacgacuucaccggcugcgugaucgccuggaacagcaacaaccucgacagcaaggugggcggcaacuacaacuaccuguaccggcuguuccggaagagcaaccugaagcccuucgagcgggacaucagcaccgagaucuaccaagccggcuccaccccuugcaacggcguggagggcuucaacugcuacuucccucugcagagcuacggcuuccagcccaccaacggcgugggcuaccagcccuaccgggugguggugcugagcuucgagcugcugcacgccccagccaccguguguggccccaagaagagcaccaaccuggugaagaacaagugcgugaacuucaacuucaacggccuuaccggcaccggcgugcugaccgagagcaacaagaaauuccugcccuuucagcaguucggccgggacaucgccgacaccaccgacgcugugcgggauccccagacccuggagauccuggacaucaccccuugcagcuucggcggcgugagcgugaucaccccaggcaccaacaccagcaaccagguggccgugcuguaccagggcgugaacugcaccgaggugcccguggccauccacgccgaccagcugacacccaccuggcgggucuacagcaccggcagcaacguguuccagacccgggccgguugccugaucggcgccgagcacgugaacaacagcuacgagugcgacauccccaucggcgccggcaucugugccagcuaccagacccagaccaauucaccccggagggcaaggagcguggccagccagagcgugaucgccuacaccaugagccugggcgccgagaacagcguggccuacagcaacaacagcaucgccauccccaccaacuucaccaucagcgugaccaccgagauucugcccgugagcaugaccaagaccagcguggacugcaccauguacaucugcggcgacagcaccgagugcagcaaccugcugcugcaguacggcagcuucugcacccagcugaaccgggcccugaccggcaucgccguggagcaggacaagaacacccaggagguguucgcccaggugaagcagaucuacaagaccccucccaucaaggacuucggcggcuucaacuucagccagauccugcccgaccccagcaagcccagcaagcggagcuucaucgaggaccugcuguucaacaaggugacccuagccgacgccggcuucaucaagcaguacggcgacugccucggcgacauagccgcccgggaccugaucugcgcccagaaguucaacggccugaccgugcugccuccccugcugaccgacgagaugaucgcccaguacaccagcgcccuguuagccggaaccaucaccagcggcuggacuuucggcgcuggagccgcucugcagauccccuucgccaugcagauggccuaccgguucaacggcaucggcgugacccagaacgugcuguacgagaaccagaagcugaucgccaaccaguucaacagcgccaucggcaagauccaggacagccugagcagcaccgcuagcgcccugggcaagcugcaggacguggugaaccagaacgcccaggcccugaacacccuggugaagcagcugagcagcaacuucggcgccaucagcagcgugcugaacgacauccugagccggcuggacccucccgaggccgaggugcagaucgaccggcugaucacuggccggcugcagagccugcagaccuacgugacccagcagcugauccgggccgccgagauucgggccagcgccaaccuggccgccaccaagaugagcgagugcgugcugggccagagcaagcggguggacuucugcggcaagggcuaccaccugaugagcuuuccccagagcgcaccccacggagugguguuccugcacgugaccuacgugcccgcccaggagaagaacuucaccaccgccccagccaucugccacgacggcaaggcccacuuuccccgggagggcguguucgugagcaacggcacccacugguucgugacccagcggaacuucuacgagccccagaucaucaccaccgacaacaccuucgugagcggcaacugcgacguggugaucggcaucgugaacaacaccguguacgauccccugcagcccgagcuggacagcuucaaggaggagcuggacaaguacuucaagaaucacaccagccccgacguggaccugggcgacaucagcggcaucaacgccagcguggugaacauccagaaggagaucgaucggcugaacgagguggccaagaaccugaacgagagccugaucgaccugcaggagcugggcaaguacgagcaguacaucaaguggcccugguacaucuggcugggcuucaucgccggccugaucgccaucgugauggugaccaucaugcugugcugcaugaccagcugcugcagcugccugaagggcuguugcagcugcggcagcugcugcaaguucgacgaggacgacagcgagcccgugcugaagggcgugaagcugcacuacaccuga

SEQ ID NO: 23122 - RNA, 3822 nt, Artificial Sequence
  SARS-CoV-2/Wuhan/WIV05/2019__EPI_ISL_402128 spike protein CDS gc (1-1273)(K986P_V987P_D614G_M1229I)
auguucguguuccuggugcugcugccccuggugagcagccagugcgugaaccugaccacccggacccagcugccaccagccuacaccaacagcuucacccggggcgucuacuaccccgacaagguguuccggagcagcguccugcacagcacccaggaccuguuccugcccuucuucagcaacgugaccugguuccacgccauccacgugagcggcaccaacggcaccaagcgguucgacaaccccgugcugcccuucaacgacggcguguacuucgccagcaccgagaagagcaacaucauccggggcuggaucuucggcaccacccuggacagcaagacccagagccugcugaucgugaauaacgccaccaacguggugaucaaggugugcgaguuccaguucugcaacgaccccuuccugggcguguacuaccacaagaacaacaagagcuggauggagagcgaguuccggguguacagcagcgccaacaacugcaccuucgaguacgugagccagcccuuccugauggaccuggagggcaagcagggcaacuucaagaaccugcgggaguucguguucaagaacaucgacggcuacuucaagaucuacagcaagcacaccccaaucaaccuggugcgggaucugccccagggcuucucagcccuggagccccugguggaccugcccaucggcaucaacaucacccgguuccagacccugcuggcccugcaccggagcuaccugaccccaggcgacagcagcagcggguggacagcaggcgcggcugcuuacuacgugggcuaccugcagccccggaccuuccugcugaaguacaacgagaacggcaccaucaccgacgccguggacugcgcccuggacccucugagcgagaccaagugcacccugaagagcuucaccguggagaagggcaucuaccagaccagcaacuuccgggugcagcccaccgagagcaucgugcgguuccccaacaucaccaaccugugccccuucggcgagguguucaacgccacccgguucgccagcguguacgccuggaaccggaagcggaucagcaacugcguggccgacuacagcgugcuguacaacagcgccagcuucagcaccuucaagugcuacggcgugagccccaccaagcugaacgaccugugcuucaccaacguguacgccgacagcuucgugauccguggcgacgaggugcggcagaucgcacccggccagacaggcaagaucgccgacuacaacuacaagcugcccgacgacuucaccggcugcgugaucgccuggaacagcaacaaccucgacagcaaggugggcggcaacuacaacuaccuguaccggcuguuccggaagagcaaccugaagcccuucgagcgggacaucagcaccgagaucuaccaagccggcuccaccccuugcaacggcguggagggcuucaacugcuacuucccucugcagagcuacggcuuccagcccaccaacggcgugggcuaccagcccuaccgggugguggugcugagcuucgagcugcugcacgccccagccaccguguguggccccaagaagagcaccaaccuggugaagaacaagugcgugaacuucaacuucaacggccuuaccggcaccggcgugcugaccgagagcaacaagaaauuccugcccuuucagcaguucggccgggacaucgccgacaccaccgacgcugugcgggauccccagacccuggagauccuggacaucaccccuugcagcuucggcggcgugagcgugaucaccccaggcaccaacaccagcaaccagguggccgugcuguaccagggcgugaacugcaccgaggugcccguggccauccacgccgaccagcugacacccaccuggcgggucuacagcaccggcagcaacguguuccagacccgggccgguugccugaucggcgccgagcacgugaacaacagcuacgagugcgacauccccaucggcgccggcaucugugccagcuaccagacccagaccaauucaccccggagggcaaggagcguggccagccagagcaucaucgccuacaccaugagccugggcgccgagaacagcguggccuacagcaacaacagcaucgccauccccaccaacuucaccaucagcgugaccaccgagauucugcccgugagcaugaccaagaccagcguggacugcaccauguacaucugcggcgacagcaccgagugcagcaaccugcugcugcaguacggcagcuucugcacccagcugaaccgggcccugaccggcaucgccguggagcaggacaagaacacccaggagguguucgcccaggugaagcagaucuacaagaccccucccaucaaggacuucggcggcuucaacuucagccagauccugcccgaccccagcaagcccagcaagcggagcuucaucgaggaccugcuguucaacaaggugacccuagccgacgccggcuucaucaagcaguacggcgacugccucggcgacauagccgcccgggaccugaucugcgcccagaaguucaacggccugaccgugcugccuccccugcugaccgacgagaugaucgcccaguacaccagcgcccuguuagccggaaccaucaccagcggcuggacuuucggcgcuggagccgcucugcagauccccuucgccaugcagauggccuaccgguucaacggcaucggcgugacccagaacgugcuguacgagaaccagaagcugaucgccaaccaguucaacagcgccaucggcaagauccaggacagccugagcagcaccgcuagcgcccugggcaagcugcaggacguggugaaccagaacgcccaggcccugaacacccuggugaagcagcugagcagcaacuucggcgccaucagcagcgugcugaacgacauccugagccggcuggacccucccgaggccgaggugcagaucgaccggcugaucacuggccggcugcagagccugcagaccuacgugacccagcagcugauccgggccgccgagauucgggccagcgccaaccuggccgccaccaagaugagcgagugcgugcugggccagagcaagcggguggacuucugcggcaagggcuaccaccugaugagcuuuccccagagcgcaccccacggagugguguuccugcacgugaccuacgugcccgcccaggagaagaacuucaccaccgccccagccaucugccacgacggcaaggcccacuuuccccgggagggcguguucgugagcaacggcacccacugguucgugacccagcggaacuucuacgagccccagaucaucaccaccgacaacaccuucgugagcggcaacugcgacguggugaucggcaucgugaacaacaccguguacgauccccugcagcccgagcuggacagcuucaaggaggagcuggacaaguacuucaagaaucacaccagccccgacguggaccugggcgacaucagcggcaucaacgccagcguggugaacauccagaaggagaucgaucggcugaacgagguggccaagaaccugaacgagagccugaucgaccugcaggagcugggcaaguacgagcaguacaucaaguggcccugguacaucuggcugggcuucaucgccggccugaucgccaucgugaucgugaccaucaugcugugcugcaugaccagcugcugcagcugccugaagggcuguugcagcugcggcagcugcugcaaguucgacgaggacgacagcgagcccgugcugaagggcgugaagcugcacuacaccuga

SEQ ID NO: 23123 - RNA, 3816 nt, Artificial Sequence
  SARS-CoV-2/Wuhan/WIV05/2019__EPI_ISL_402128 spike protein CDS gc (1-1273)(K986P_V987P_H69del_V70del_A222V_Y453F_S477N_D614G_I692V)
auguucguguuccuggugcugcugccccuggugagcagccagugcgugaaccugaccacccggacccagcugccaccagccuacaccaacagcuucacccggggcgucuacuaccccgacaagguguuccggagcagcguccugcacagcacccaggaccuguuccugcccuucuucagcaacgugaccugguuccacgccaucagcggcaccaacggcaccaagcgguucgacaaccccgugcugcccuucaacgacggcguguacuucgccagcaccgagaagagcaacaucauccggggcuggaucuucggcaccacccuggacagcaagacccagagccugcugaucgugaauaacgccaccaacguggugaucaaggugugcgaguuccaguucugcaacgaccccuuccugggcguguacuaccacaagaacaacaagagcuggauggagagcgaguuccggguguacagcagcgccaacaacugcaccuucgaguacgugagccagcccuuccugauggaccuggagggcaagcagggcaacuucaagaaccugcgggaguucguguucaagaacaucgacggcuacuucaagaucuacagcaagcacaccccaaucaaccuggugcgggaucugccccagggcuucucagugcuggagccccugguggaccugcccaucggcaucaacaucacccgguuccagacccugcuggcccugcaccggagcuaccugaccccaggcgacagcagcagcggguggacagcaggcgcggcugcuuacuacgugggcuaccugcagccccggaccuuccugcugaaguacaacgagaacggcaccaucaccgacgccguggacugcgcccuggacccucugagcgagaccaagugcacccugaagagcuucaccguggagaagggcaucuaccagaccagcaacuuccgggugcagcccaccgagagcaucgugcgguuccccaacaucaccaaccugugccccuucggcgagguguucaacgccacccgguucgccagcguguacgccuggaaccggaagcggaucagcaacugcguggccgacuacagcgugcuguacaacagcgccagcuucagcaccuucaagugcuacggcgugagccccaccaagcugaacgaccugugcuucaccaacguguacgccgacagcuucgugauccguggcgacgaggugcggcagaucgcacccggccagacaggcaagaucgccgacuacaacuacaagcugcccgacgacuucaccggcugcgugaucgccuggaacagcaacaaccucgacagcaaggugggcggcaacuacaacuaccuguuccggcuguuccggaagagcaaccugaagcccuucgagcgggacaucagcaccgagaucuaccaagccggcaacaccccuugcaacggcguggagggcuucaacugcuacuucccucugcagagcuacggcuuccagcccaccaacggcgugggcuaccagcccuaccgggugguggugcugagcuucgagcugcugcacgccccagccaccguguguggccccaagaagagcaccaaccuggugaagaacaagugcgugaacuucaacuucaacggccuuaccggcaccggcgugcugaccgagagcaacaagaaauuccugcccuuucagcaguucggccgggacaucgccgacaccaccgacgcugugcgggauccccagacccuggagauccuggacaucaccccuugcagcuucggcggcgugagcgugaucaccccaggcaccaacaccagcaaccagguggccgugcuguaccagggcgugaacugcaccgaggugcccguggccauccacgccgaccagcugacacccaccuggcgggucuacagcaccggcagcaacguguuccagacccgggccgguugccugaucggcgccgagcacgugaacaacagcuacgagugcgacauccccaucggcgccggcaucugugccagcuaccagacccagaccaauucaccccggagggcaaggagcguggccagccagagcgugaucgccuacaccaugagccugggcgccgagaacagcguggccuacagcaacaacagcaucgccauccccaccaacuucaccaucagcgugaccaccgagauucugcccgugagcaugaccaagaccagcguggacugcaccauguacaucugcggcgacagcaccgagugcagcaaccugcugcugcaguacggcagcuucugcacccagcugaaccgggcccugaccggcaucgccguggagcaggacaagaacacccaggagguguucgcccaggugaagcagaucuacaagaccccucccaucaaggacuucggcggcuucaacuucagccagauccugcccgaccccagcaagcccagcaagcggagcuucaucgaggaccugcuguucaacaaggugacccuagccgacgccggcuucaucaagcaguacggcgacugccucggcgacauagccgcccgggaccugaucugcgcccagaaguucaacggccugaccgugcugccuccccugcugaccgacgagaugaucgcccaguacaccagcgcccuguuagccggaaccaucaccagcggcuggacuuucggcgcuggagccgcucugcagauccccuucgccaugcagauggccuaccgguucaacggcaucggcgugacccagaacgugcuguacgagaaccagaagcugaucgccaaccaguucaacagcgccaucggcaagauccaggacagccugagcagcaccgcuagcgcccugggcaagcugcaggacguggugaaccagaacgcccaggcccugaacacccuggugaagcagcugagcagcaacuucggcgccaucagcagcgugcugaacgacauccugagccggcuggacccucccgaggccgaggugcagaucgaccggcugaucacuggccggcugcagagccugcagaccuacgugacccagcagcugauccgggccgccgagauucgggccagcgccaaccuggccgccaccaagaugagcgagugcgugcugggccagagcaagcggguggacuucugcggcaagggcuaccaccugaugagcuuuccccagagcgcaccccacggagugguguuccugcacgugaccuacgugcccgcccaggagaagaacuucaccaccgccccagccaucugccacgacggcaaggcccacuuuccccgggagggcguguucgugagcaacggcacccacugguucgugacccagcggaacuucuacgagccccagaucaucaccaccgacaacaccuucgugagcggcaacugcgacguggugaucggcaucgugaacaacaccguguacgauccccugcagcccgagcuggacagcuucaaggaggagcuggacaaguacuucaagaaucacaccagccccgacguggaccugggcgacaucagcggcaucaacgccagcguggugaacauccagaaggagaucgaucggcugaacgagguggccaagaaccugaacgagagccugaucgaccugcaggagcugggcaaguacgagcaguacaucaaguggcccugguacaucuggcugggcuucaucgccggccugaucgccaucgugauggugaccaucaugcugugcugcaugaccagcugcugcagcugccugaagggcuguugcagcugcggcagcugcugcaaguucgacgaggacgacagcgagcccgugcugaagggcgugaagcugcacuacaccuga

SEQ ID NO: 23124 - RNA, 3816 nt, Artificial Sequence
  SARS-CoV-2/Wuhan/WIV05/2019__EPI_ISL_402128 spike protein CDS gc (1-1273)(K986P_V987P_H69del_V70del_Y453F_D614G_I692V_M1229I)
auguucguguuccuggugcugcugccccuggugagcagccagugcgugaaccugaccacccggacccagcugccaccagccuacaccaacagcuucacccggggcgucuacuaccccgacaagguguuccggagcagcguccugcacagcacccaggaccuguuccugcccuucuucagcaacgugaccugguuccacgccaucagcggcaccaacggcaccaagcgguucgacaaccccgugcugcccuucaacgacggcguguacuucgccagcaccgagaagagcaacaucauccggggcuggaucuucggcaccacccuggacagcaagacccagagccugcugaucgugaauaacgccaccaacguggugaucaaggugugcgaguuccaguucugcaacgaccccuuccugggcguguacuaccacaagaacaacaagagcuggauggagagcgaguuccggguguacagcagcgccaacaacugcaccuucgaguacgugagccagcccuuccugauggaccuggagggcaagcagggcaacuucaagaaccugcgggaguucguguucaagaacaucgacggcuacuucaagaucuacagcaagcacaccccaaucaaccuggugcgggaucugccccagggcuucucagcccuggagccccugguggaccugcccaucggcaucaacaucacccgguuccagacccugcuggcccugcaccggagcuaccugaccccaggcgacagcagcagcggguggacagcaggcgcggcugcuuacuacgugggcuaccugcagccccggaccuuccugcugaaguacaacgagaacggcaccaucaccgacgccguggacugcgcccuggacccucugagcgagaccaagugcacccugaagagcuucaccguggagaagggcaucuaccagaccagcaacuuccgggugcagcccaccgagagcaucgugcgguuccccaacaucaccaaccugugccccuucggcgagguguucaacgccacccgguucgccagcguguacgccuggaaccggaagcggaucagcaacugcguggccgacuacagcgugcuguacaacagcgccagcuucagcaccuucaagugcuacggcgugagccccaccaagcugaacgaccugugcuucaccaacguguacgccgacagcuucgugauccguggcgacgaggugcggcagaucgcacccggccagacaggcaagaucgccgacuacaacuacaagcugcccgacgacuucaccggcugcgugaucgccuggaacagcaacaaccucgacagcaaggugggcggcaacuacaacuaccuguuccggcuguuccggaagagcaaccugaagcccuucgagcgggacaucagcaccgagaucuaccaagccggcuccaccccuugcaacggcguggagggcuucaacugcuacuucccucugcagagcuacggcuuccagcccaccaacggcgugggcuaccagcccuaccgggugguggugcugagcuucgagcugcugcacgccccagccaccguguguggccccaagaagagcaccaaccuggugaagaacaagugcgugaacuucaacuucaacggccuuaccggcaccggcgugcugaccgagagcaacaagaaauuccugcccuuucagcaguucggccgggacaucgccgacaccaccgacgcugugcgggauccccagacccuggagauccuggacaucaccccuugcagcuucggcggcgugagcgugaucaccccaggcaccaacaccagcaaccagguggccgugcuguaccagggcgugaacugcaccgaggugcccguggccauccacgccgaccagcugacacccaccuggcgggucuacagcaccggcagcaacguguuccagacccgggccgguugccugaucggcgccgagcacgugaacaacagcuacgagugcgacauccccaucggcgccggcaucugugccagcuaccagacccagaccaauucaccccggagggcaaggagcguggccagccagagcgugaucgccuacaccaugagccugggcgccgagaacagcguggccuacagcaacaacagcaucgccauccccaccaacuucaccaucagcgugaccaccgagauucugcccgugagcaugaccaagaccagcguggacugcaccauguacaucugcggcgacagcaccgagugcagcaaccugcugcugcaguacggcagcuucugcacccagcugaaccgggcccugaccggcaucgccguggagcaggacaagaacacccaggagguguucgcccaggugaagcagaucuacaagaccccucccaucaaggacuucggcggcuucaacuucagccagauccugcccgaccccagcaagcccagcaagcggagcuucaucgaggaccugcuguucaacaaggugacccuagccgacgccggcuucaucaagcaguacggcgacugccucggcgacauagccgcccgggaccugaucugcgcccagaaguucaacggccugaccgugcugccuccccugcugaccgacgagaugaucgcccaguacaccagcgcccuguuagccggaaccaucaccagcggcuggacuuucggcgcuggagccgcucugcagauccccuucgccaugcagauggccuaccgguucaacggcaucggcgugacccagaacgugcuguacgagaaccagaagcugaucgccaaccaguucaacagcgccaucggcaagauccaggacagccugagcagcaccgcuagcgcccugggcaagcugcaggacguggugaaccagaacgcccaggcccugaacacccuggugaagcagcugagcagcaacuucggcgccaucagcagcgugcugaacgacauccugagccggcuggacccucccgaggccgaggugcagaucgaccggcugaucacuggccggcugcagagccugcagaccuacgugacccagcagcugauccgggccgccgagauucgggccagcgccaaccuggccgccaccaagaugagcgagugcgugcugggccagagcaagcggguggacuucugcggcaagggcuaccaccugaugagcuuuccccagagcgcaccccacggagugguguuccugcacgugaccuacgugcccgcccaggagaagaacuucaccaccgccccagccaucugccacgacggcaaggcccacuuuccccgggagggcguguucgugagcaacggcacccacugguucgugacccagcggaacuucuacgagccccagaucaucaccaccgacaacaccuucgugagcggcaacugcgacguggugaucggcaucgugaacaacaccguguacgauccccugcagcccgagcuggacagcuucaaggaggagcuggacaaguacuucaagaaucacaccagccccgacguggaccugggcgacaucagcggcaucaacgccagcguggugaacauccagaaggagaucgaucggcugaacgagguggccaagaaccugaacgagagccugaucgaccugcaggagcugggcaaguacgagcaguacaucaaguggcccugguacaucuggcugggcuucaucgccggccugaucgccaucgugaucgugaccaucaugcugugcugcaugaccagcugcugcagcugccugaagggcuguugcagcugcggcagcugcugcaaguucgacgaggacgacagcgagcccgugcugaagggcgugaagcugcacuacaccuga

SEQ ID NO: 23125 - RNA, 3813 nt, Artificial Sequence
  SARS-CoV-2/Wuhan/WIV05/2019__EPI_ISL_402128 spike protein CDS gc (1-1273)(K986P_V987P_K986P_V987P_H69del_V70del_Y144del_N501Y_A570 D_D614G_P681H_T716I_S982A_D1118H)
auguucguguuccuggugcugcugccccuggugagcagccagugcgugaaccugaccacccggacccagcugccaccagccuacaccaacagcuucacccggggcgucuacuaccccgacaagguguuccggagcagcguccugcacagcacccaggaccuguuccugcccuucuucagcaacgugaccugguuccacgccaucagcggcaccaacggcaccaagcgguucgacaaccccgugcugcccuucaacgacggcguguacuucgccagcaccgagaagagcaacaucauccggggcuggaucuucggcaccacccuggacagcaagacccagagccugcugaucgugaauaacgccaccaacguggugaucaaggugugcgaguuccaguucugcaacgaccccuuccugggcguguaccacaagaacaacaagagcuggauggagagcgaguuccggguguacagcagcgccaacaacugcaccuucgaguacgugagccagcccuuccugauggaccuggagggcaagcagggcaacuucaagaaccugcgggaguucguguucaagaacaucgacggcuacuucaagaucuacagcaagcacaccccaaucaaccuggugcgggaucugccccagggcuucucagcccuggagccccugguggaccugcccaucggcaucaacaucacccgguuccagacccugcuggcccugcaccggagcuaccugaccccaggcgacagcagcagcggguggacagcaggcgcggcugcuuacuacgugggcuaccugcagccccggaccuuccugcugaaguacaacgagaacggcaccaucaccgacgccguggacugcgcccuggacccucugagcgagaccaagugcacccugaagagcuucaccguggagaagggcaucuaccagaccagcaacuuccgggugcagcccaccgagagcaucgugcgguuccccaacaucaccaaccugugccccuucggcgagguguucaacgccacccgguucgccagcguguacgccuggaaccggaagcggaucagcaacugcguggccgacuacagcgugcuguacaacagcgccagcuucagcaccuucaagugcuacggcgugagccccaccaagcugaacgaccugugcuucaccaacguguacgccgacagcuucgugauccguggcgacgaggugcggcagaucgcacccggccagacaggcaagaucgccgacuacaacuacaagcugcccgacgacuucaccggcugcgugaucgccuggaacagcaacaaccucgacagcaaggugggcggcaacuacaacuaccuguaccggcuguuccggaagagcaaccugaagcccuucgagcgggacaucagcaccgagaucuaccaagccggcuccaccccuugcaacggcguggagggcuucaacugcuacuucccucugcagagcuacggcuuccagcccaccuacggcgugggcuaccagcccuaccgggugguggugcugagcuucgagcugcugcacgccccagccaccguguguggccccaagaagagcaccaaccuggugaagaacaagugcgugaacuucaacuucaacggccuuaccggcaccggcgugcugaccgagagcaacaagaaauuccugcccuuucagcaguucggccgggacaucgacgacaccaccgacgcugugcgggauccccagacccuggagauccuggacaucaccccuugcagcuucggcggcgugagcgugaucaccccaggcaccaacaccagcaaccagguggccgugcuguaccagggcgugaacugcaccgaggugcccguggccauccacgccgaccagcugacacccaccuggcgggucuacagcaccggcagcaacguguuccagacccgggccgguugccugaucggcgccgagcacgugaacaacagcuacgagugcgacauccccaucggcgccggcaucugugccagcuaccagacccagaccaauucacaccggagggcaaggagcguggccagccagagcaucaucgccuacaccaugagccugggcgccgagaacagcguggccuacagcaacaacagcaucgccauccccaucaacuucaccaucagcgugaccaccgagauucugcccgugagcaugaccaagaccagcguggacugcaccauguacaucugcggcgacagcaccgagugcagcaaccugcugcugcaguacggcagcuucugcacccagcugaaccgggcccugaccggcaucgccguggagcaggacaagaacacccaggagguguucgcccaggugaagcagaucuacaagaccccucccaucaaggacuucggcggcuucaacuucagccagauccugcccgaccccagcaagcccagcaagcggagcuucaucgaggaccugcuguucaacaaggugacccuagccgacgccggcuucaucaagcaguacggcgacugccucggcgacauagccgcccgggaccugaucugcgcccagaaguucaacggccugaccgugcugccuccccugcugaccgacgagaugaucgcccaguacaccagcgcccuguuagccggaaccaucaccagcggcuggacuuucggcgcuggagccgcucugcagauccccuucgccaugcagauggccuaccgguucaacggcaucggcgugacccagaacgugcuguacgagaaccagaagcugaucgccaaccaguucaacagcgccaucggcaagauccaggacagccugagcagcaccgcuagcgcccugggcaagcugcaggacguggugaaccagaacgcccaggcccugaacacccuggugaagcagcugagcagcaacuucggcgccaucagcagcgugcugaacgacauccuggcccggcuggacccucccgaggccgaggugcagaucgaccggcugaucacuggccggcugcagagccugcagaccuacgugacccagcagcugauccgggccgccgagauucgggccagcgccaaccuggccgccaccaagaugagcgagugcgugcugggccagagcaagcggguggacuucugcggcaagggcuaccaccugaugagcuuuccccagagcgcaccccacggagugguguuccugcacgugaccuacgugcccgcccaggagaagaacuucaccaccgccccagccaucugccacgacggcaaggcccacuuuccccgggagggcguguucgugagcaacggcacccacugguucgugacccagcggaacuucuacgagccccagaucaucaccacccacaacaccuucgugagcggcaacugcgacguggugaucggcaucgugaacaacaccguguacgauccccugcagcccgagcuggacagcuucaaggaggagcuggacaaguacuucaagaaucacaccagccccgacguggaccugggcgacaucagcggcaucaacgccagcguggugaacauccagaaggagaucgaucggcugaacgagguggccaagaaccugaacgagagccugaucgaccugcaggagcugggcaaguacgagcaguacaucaaguggcccugguacaucuggcugggcuucaucgccggccugaucgccaucgugauggugaccaucaugcugugcugcaugaccagcugcugcagcugccugaagggcuguugcagcugcggcagcugcugcaaguucgacgaggacgacagcgagcccgugcugaagggcgugaagcugcacuacaccuga

SEQ ID NO: 23126 - RNA, 3822 nt, Artificial Sequence
  SARS-CoV-2/Wuhan/WIV05/2019__EPI_ISL_402128 spike protein CDS gc (1-1273)(K986P_V987P_K986P_V987P_K417N_E484K_N501Y_D614G)
auguucguguuccuggugcugcugccccuggugagcagccagugcgugaaccugaccacccggacccagcugccaccagccuacaccaacagcuucacccggggcgucuacuaccccgacaagguguuccggagcagcguccugcacagcacccaggaccuguuccugcccuucuucagcaacgugaccugguuccacgccauccacgugagcggcaccaacggcaccaagcgguucgacaaccccgugcugcccuucaacgacggcguguacuucgccagcaccgagaagagcaacaucauccggggcuggaucuucggcaccacccuggacagcaagacccagagccugcugaucgugaauaacgccaccaacguggugaucaaggugugcgaguuccaguucugcaacgaccccuuccugggcguguacuaccacaagaacaacaagagcuggauggagagcgaguuccggguguacagcagcgccaacaacugcaccuucgaguacgugagccagcccuuccugauggaccuggagggcaagcagggcaacuucaagaaccugcgggaguucguguucaagaacaucgacggcuacuucaagaucuacagcaagcacaccccaaucaaccuggugcgggaucugccccagggcuucucagcccuggagccccugguggaccugcccaucggcaucaacaucacccgguuccagacccugcuggcccugcaccggagcuaccugaccccaggcgacagcagcagcggguggacagcaggcgcggcugcuuacuacgugggcuaccugcagccccggaccuuccugcugaaguacaacgagaacggcaccaucaccgacgccguggacugcgcccuggacccucugagcgagaccaagugcacccugaagagcuucaccguggagaagggcaucuaccagaccagcaacuuccgggugcagcccaccgagagcaucgugcgguuccccaacaucaccaaccugugccccuucggcgagguguucaacgccacccgguucgccagcguguacgccuggaaccggaagcggaucagcaacugcguggccgacuacagcgugcuguacaacagcgccagcuucagcaccuucaagugcuacggcgugagccccaccaagcugaacgaccugugcuucaccaacguguacgccgacagcuucgugauccguggcgacgaggugcggcagaucgcacccggccagacaggcaacaucgccgacuacaacuacaagcugcccgacgacuucaccggcugcgugaucgccuggaacagcaacaaccucgacagcaaggugggcggcaacuacaacuaccuguaccggcuguuccggaagagcaaccugaagcccuucgagcgggacaucagcaccgagaucuaccaagccggcuccaccccuugcaacggcgugaagggcuucaacugcuacuucccucugcagagcuacggcuuccagcccaccuacggcgugggcuaccagcccuaccgggugguggugcugagcuucgagcugcugcacgccccagccaccguguguggccccaagaagagcaccaaccuggugaagaacaagugcgugaacuucaacuucaacggccuuaccggcaccggcgugcugaccgagagcaacaagaaauuccugcccuuucagcaguucggccgggacaucgccgacaccaccgacgcugugcgggauccccagacccuggagauccuggacaucaccccuugcagcuucggcggcgugagcgugaucaccccaggcaccaacaccagcaaccagguggccgugcuguaccagggcgugaacugcaccgaggugcccguggccauccacgccgaccagcugacacccaccuggcgggucuacagcaccggcagcaacguguuccagacccgggccgguugccugaucggcgccgagcacgugaacaacagcuacgagugcgacauccccaucggcgccggcaucugugccagcuaccagacccagaccaauucaccccggagggcaaggagcguggccagccagagcaucaucgccuacaccaugagccugggcgccgagaacagcguggccuacagcaacaacagcaucgccauccccaccaacuucaccaucagcgugaccaccgagauucugcccgugagcaugaccaagaccagcguggacugcaccauguacaucugcggcgacagcaccgagugcagcaaccugcugcugcaguacggcagcuucugcacccagcugaaccgggcccugaccggcaucgccguggagcaggacaagaacacccaggagguguucgcccaggugaagcagaucuacaagaccccucccaucaaggacuucggcggcuucaacuucagccagauccugcccgaccccagcaagcccagcaagcggagcuucaucgaggaccugcuguucaacaaggugacccuagccgacgccggcuucaucaagcaguacggcgacugccucggcgacauagccgcccgggaccugaucugcgcccagaaguucaacggccugaccgugcugccuccccugcugaccgacgagaugaucgcccaguacaccagcgcccuguuagccggaaccaucaccagcggcuggacuuucggcgcuggagccgcucugcagauccccuucgccaugcagauggccuaccgguucaacggcaucggcgugacccagaacgugcuguacgagaaccagaagcugaucgccaaccaguucaacagcgccaucggcaagauccaggacagccugagcagcaccgcuagcgcccugggcaagcugcaggacguggugaaccagaacgcccaggcccugaacacccuggugaagcagcugagcagcaacuucggcgccaucagcagcgugcugaacgacauccugagccggcuggacccucccgaggccgaggugcagaucgaccggcugaucacuggccggcugcagagccugcagaccuacgugacccagcagcugauccgggccgccgagauucgggccagcgccaaccuggccgccaccaagaugagcgagugcgugcugggccagagcaagcggguggacuucugcggcaagggcuaccaccugaugagcuuuccccagagcgcaccccacggagugguguuccugcacgugaccuacgugcccgcccaggagaagaacuucaccaccgccccagccaucugccacgacggcaaggcccacuuuccccgggagggcguguucgugagcaacggcacccacugguucgugacccagcggaacuucuacgagccccagaucaucaccaccgacaacaccuucgugagcggcaacugcgacguggugaucggcaucgugaacaacaccguguacgauccccugcagcccgagcuggacagcuucaaggaggagcuggacaaguacuucaagaaucacaccagccccgacguggaccugggcgacaucagcggcaucaacgccagcguggugaacauccagaaggagaucgaucggcugaacgagguggccaagaaccugaacgagagccugaucgaccugcaggagcugggcaaguacgagcaguacaucaaguggcccugguacaucuggcugggcuucaucgccggccugaucgccaucgugauggugaccaucaugcugugcugcaugaccagcugcugcagcugccugaagggcuguugcagcugcggcagcugcugcaaguucgacgaggacgacagcgagcccgugcugaagggcgugaagcugcacuacaccuga

SEQ ID NO: 23127 - RNA, 3813 nt, Artificial Sequence
  SARS-CoV-2/Wuhan/WIV05/2019__EPI_ISL_402128 spike protein CDS gc (1-1273)(K986P_V987P_K986P_V987P_L18F_D80A_D215G_L242del_A243del_ L244del_R246I_K417N_E484K_N501Y_D614G_A701V)
auguucguguuccuggugcugcugccccuggugagcagccagugcgugaacuucaccacccggacccagcugccaccagccuacaccaacagcuucacccggggcgucuacuaccccgacaagguguuccggagcagcguccugcacagcacccaggaccuguuccugcccuucuucagcaacgugaccugguuccacgccauccacgugagcggcaccaacggcaccaagcgguucgccaaccccgugcugcccuucaacgacggcguguacuucgccagcaccgagaagagcaacaucauccggggcuggaucuucggcaccacccuggacagcaagacccagagccugcugaucgugaauaacgccaccaacguggugaucaaggugugcgaguuccaguucugcaacgaccccuuccugggcguguacuaccacaagaacaacaagagcuggauggagagcgaguuccggguguacagcagcgccaacaacugcaccuucgaguacgugagccagcccuuccugauggaccuggagggcaagcagggcaacuucaagaaccugcgggaguucguguucaagaacaucgacggcuacuucaagaucuacagcaagcacaccccaaucaaccuggugcggggccugccccagggcuucucagcccuggagccccugguggaccugcccaucggcaucaacaucacccgguuccagacccugcacaucagcuaccugaccccaggcgacagcagcagcggguggacagcaggcgcggcugcuuacuacgugggcuaccugcagccccggaccuuccugcugaaguacaacgagaacggcaccaucaccgacgccguggacugcgcccuggacccucugagcgagaccaagugcacccugaagagcuucaccguggagaagggcaucuaccagaccagcaacuuccgggugcagcccaccgagagcaucgugcgguuccccaacaucaccaaccugugccccuucggcgagguguucaacgccacccgguucgccagcguguacgccuggaaccggaagcggaucagcaacugcguggccgacuacagcgugcuguacaacagcgccagcuucagcaccuucaagugcuacggcgugagccccaccaagcugaacgaccugugcuucaccaacguguacgccgacagcuucgugauccguggcgacgaggugcggcagaucgcacccggccagacaggcaacaucgccgacuacaacuacaagcugcccgacgacuucaccggcugcgugaucgccuggaacagcaacaaccucgacagcaaggugggcggcaacuacaacuaccuguaccggcuguuccggaagagcaaccugaagcccuucgagcgggacaucagcaccgagaucuaccaagccggcuccaccccuugcaacggcgugaagggcuucaacugcuacuucccucugcagagcuacggcuuccagcccaccuacggcgugggcuaccagcccuaccgggugguggugcugagcuucgagcugcugcacgccccagccaccguguguggccccaagaagagcaccaaccuggugaagaacaagugcgugaacuucaacuucaacggccuuaccggcaccggcgugcugaccgagagcaacaagaaauuccugcccuuucagcaguucggccgggacaucgccgacaccaccgacgcugugcgggauccccagacccuggagauccuggacaucaccccuugcagcuucggcggcgugagcgugaucaccccaggcaccaacaccagcaaccagguggccgugcuguaccagggcgugaacugcaccgaggugcccguggccauccacgccgaccagcugacacccaccuggcgggucuacagcaccggcagcaacguguuccagacccgggccgguugccugaucggcgccgagcacgugaacaacagcuacgagugcgacauccccaucggcgccggcaucugugccagcuaccagacccagaccaauucaccccggagggcaaggagcguggccagccagagcaucaucgccuacaccaugagccugggcguggagaacagcguggccuacagcaacaacagcaucgccauccccaccaacuucaccaucagcgugaccaccgagauucugcccgugagcaugaccaagaccagcguggacugcaccauguacaucugcggcgacagcaccgagugcagcaaccugcugcugcaguacggcagcuucugcacccagcugaaccgggcccugaccggcaucgccguggagcaggacaagaacacccaggagguguucgcccaggugaagcagaucuacaagaccccucccaucaaggacuucggcggcuucaacuucagccagauccugcccgaccccagcaagcccagcaagcggagcuucaucgaggaccugcuguucaacaaggugacccuagccgacgccggcuucaucaagcaguacggcgacugccucggcgacauagccgcccgggaccugaucugcgcccagaaguucaacggccugaccgugcugccuccccugcugaccgacgagaugaucgcccaguacaccagcgcccuguuagccggaaccaucaccagcggcuggacuuucggcgcuggagccgcucugcagauccccuucgccaugcagauggccuaccgguucaacggcaucggcgugacccagaacgugcuguacgagaaccagaagcugaucgccaaccaguucaacagcgccaucggcaagauccaggacagccugagcagcaccgcuagcgcccugggcaagcugcaggacguggugaaccagaacgcccaggcccugaacacccuggugaagcagcugagcagcaacuucggcgccaucagcagcgugcugaacgacauccugagccggcuggacccucccgaggccgaggugcagaucgaccggcugaucacuggccggcugcagagccugcagaccuacgugacccagcagcugauccgggccgccgagauucgggccagcgccaaccuggccgccaccaagaugagcgagugcgugcugggccagagcaagcggguggacuucugcggcaagggcuaccaccugaugagcuuuccccagagcgcaccccacggagugguguuccugcacgugaccuacgugcccgcccaggagaagaacuucaccaccgccccagccaucugccacgacggcaaggcccacuuuccccgggagggcguguucgugagcaacggcacccacugguucgugacccagcggaacuucuacgagccccagaucaucaccaccgacaacaccuucgugagcggcaacugcgacguggugaucggcaucgugaacaacaccguguacgauccccugcagcccgagcuggacagcuucaaggaggagcuggacaaguacuucaagaaucacaccagccccgacguggaccugggcgacaucagcggcaucaacgccagcguggugaacauccagaaggagaucgaucggcugaacgagguggccaagaaccugaacgagagccugaucgaccugcaggagcugggcaaguacgagcaguacaucaaguggcccugguacaucuggcugggcuucaucgccggccugaucgccaucgugauggugaccaucaugcugugcugcaugaccagcugcugcagcugccugaagggcuguugcagcugcggcagcugcugcaaguucgacgaggacgacagcgagcccgugcugaagggcgugaagcugcacuacaccuga

SEQ ID NO: 23128 - RNA, 3822 nt, Artificial Sequence
  SARS-CoV-2/Wuhan/WIV05/2019__EPI_ISL_402128 spike protein CDS gc (1-1273)(K986P_V987P_K986P_V987P_E484K_D614G)
auguucguguuccuggugcugcugccccuggugagcagccagugcgugaaccugaccacccggacccagcugccaccagccuacaccaacagcuucacccggggcgucuacuaccccgacaagguguuccggagcagcguccugcacagcacccaggaccuguuccugcccuucuucagcaacgugaccugguuccacgccauccacgugagcggcaccaacggcaccaagcgguucgacaaccccgugcugcccuucaacgacggcguguacuucgccagcaccgagaagagcaacaucauccggggcuggaucuucggcaccacccuggacagcaagacccagagccugcugaucgugaauaacgccaccaacguggugaucaaggugugcgaguuccaguucugcaacgaccccuuccugggcguguacuaccacaagaacaacaagagcuggauggagagcgaguuccggguguacagcagcgccaacaacugcaccuucgaguacgugagccagcccuuccugauggaccuggagggcaagcagggcaacuucaagaaccugcgggaguucguguucaagaacaucgacggcuacuucaagaucuacagcaagcacaccccaaucaaccuggugcgggaucugccccagggcuucucagcccuggagccccugguggaccugcccaucggcaucaacaucacccgguuccagacccugcuggcccugcaccggagcuaccugaccccaggcgacagcagcagcggguggacagcaggcgcggcugcuuacuacgugggcuaccugcagccccggaccuuccugcugaaguacaacgagaacggcaccaucaccgacgccguggacugcgcccuggacccucugagcgagaccaagugcacccugaagagcuucaccguggagaagggcaucuaccagaccagcaacuuccgggugcagcccaccgagagcaucgugcgguuccccaacaucaccaaccugugccccuucggcgagguguucaacgccacccgguucgccagcguguacgccuggaaccggaagcggaucagcaacugcguggccgacuacagcgugcuguacaacagcgccagcuucagcaccuucaagugcuacggcgugagccccaccaagcugaacgaccugugcuucaccaacguguacgccgacagcuucgugauccguggcgacgaggugcggcagaucgcacccggccagacaggcaagaucgccgacuacaacuacaagcugcccgacgacuucaccggcugcgugaucgccuggaacagcaacaaccucgacagcaaggugggcggcaacuacaacuaccuguaccggcuguuccggaagagcaaccugaagcccuucgagcgggacaucagcaccgagaucuaccaagccggcuccaccccuugcaacggcgugaagggcuucaacugcuacuucccucugcagagcuacggcuuccagcccaccaacggcgugggcuaccagcccuaccgggugguggugcugagcuucgagcugcugcacgccccagccaccguguguggccccaagaagagcaccaaccuggugaagaacaagugcgugaacuucaacuucaacggccuuaccggcaccggcgugcugaccgagagcaacaagaaauuccugcccuuucagcaguucggccgggacaucgccgacaccaccgacgcugugcgggauccccagacccuggagauccuggacaucaccccuugcagcuucggcggcgugagcgugaucaccccaggcaccaacaccagcaaccagguggccgugcuguaccagggcgugaacugcaccgaggugcccguggccauccacgccgaccagcugacacccaccuggcgggucuacagcaccggcagcaacguguuccagacccgggccgguugccugaucggcgccgagcacgugaacaacagcuacgagugcgacauccccaucggcgccggcaucugugccagcuaccagacccagaccaauucaccccggagggcaaggagcguggccagccagagcaucaucgccuacaccaugagccugggcgccgagaacagcguggccuacagcaacaacagcaucgccauccccaccaacuucaccaucagcgugaccaccgagauucugcccgugagcaugaccaagaccagcguggacugcaccauguacaucugcggcgacagcaccgagugcagcaaccugcugcugcaguacggcagcuucugcacccagcugaaccgggcccugaccggcaucgccguggagcaggacaagaacacccaggagguguucgcccaggugaagcagaucuacaagaccccucccaucaaggacuucggcggcuucaacuucagccagauccugcccgaccccagcaagcccagcaagcggagcuucaucgaggaccugcuguucaacaaggugacccuagccgacgccggcuucaucaagcaguacggcgacugccucggcgacauagccgcccgggaccugaucugcgcccagaaguucaacggccugaccgugcugccuccccugcugaccgacgagaugaucgcccaguacaccagcgcccuguuagccggaaccaucaccagcggcuggacuuucggcgcuggagccgcucugcagauccccuucgccaugcagauggccuaccgguucaacggcaucggcgugacccagaacgugcuguacgagaaccagaagcugaucgccaaccaguucaacagcgccaucggcaagauccaggacagccugagcagcaccgcuagcgcccugggcaagcugcaggacguggugaaccagaacgcccaggcccugaacacccuggugaagcagcugagcagcaacuucggcgccaucagcagcgugcugaacgacauccugagccggcuggacccucccgaggccgaggugcagaucgaccggcugaucacuggccggcugcagagccugcagaccuacgugacccagcagcugauccgggccgccgagauucgggccagcgccaaccuggccgccaccaagaugagcgagugcgugcugggccagagcaagcggguggacuucugcggcaagggcuaccaccugaugagcuuuccccagagcgcaccccacggagugguguuccugcacgugaccuacgugcccgcccaggagaagaacuucaccaccgccccagccaucugccacgacggcaaggcccacuuuccccgggagggcguguucgugagcaacggcacccacugguucgugacccagcggaacuucuacgagccccagaucaucaccaccgacaacaccuucgugagcggcaacugcgacguggugaucggcaucgugaacaacaccguguacgauccccugcagcccgagcuggacagcuucaaggaggagcuggacaaguacuucaagaaucacaccagccccgacguggaccugggcgacaucagcggcaucaacgccagcguggugaacauccagaaggagaucgaucggcugaacgagguggccaagaaccugaacgagagccugaucgaccugcaggagcugggcaaguacgagcaguacaucaaguggcccugguacaucuggcugggcuucaucgccggccugaucgccaucgugauggugaccaucaugcugugcugcaugaccagcugcugcagcugccugaagggcuguugcagcugcggcagcugcugcaaguucgacgaggacgacagcgagcccgugcugaagggcgugaagcugcacuacaccuga

SEQ ID NO: 23129 - RNA, 3822 nt, Artificial Sequence
  SARS-CoV-2/Wuhan/WIV05/2019__EPI_ISL_402128 spike protein CDS gc (1-1273)(K986P_V987P_K986P_V987P_L18F_T20N_P26S_D138Y_R190S_K417T _E484K_N501Y_D614G_H655Y_T1027I)
auguucguguuccuggugcugcugccccuggugagcagccagugcgugaacuucaccaaccggacccagcugccaagcgccuacaccaacagcuucacccggggcgucuacuaccccgacaagguguuccggagcagcguccugcacagcacccaggaccuguuccugcccuucuucagcaacgugaccugguuccacgccauccacgugagcggcaccaacggcaccaagcgguucgacaaccccgugcugcccuucaacgacggcguguacuucgccagcaccgagaagagcaacaucauccggggcuggaucuucggcaccacccuggacagcaagacccagagccugcugaucgugaauaacgccaccaacguggugaucaaggugugcgaguuccaguucugcaacuaccccuuccugggcguguacuaccacaagaacaacaagagcuggauggagagcgaguuccggguguacagcagcgccaacaacugcaccuucgaguacgugagccagcccuuccugauggaccuggagggcaagcagggcaacuucaagaaccugagcgaguucguguucaagaacaucgacggcuacuucaagaucuacagcaagcacaccccaaucaaccuggugcgggaucugccccagggcuucucagcccuggagccccugguggaccugcccaucggcaucaacaucacccgguuccagacccugcuggcccugcaccggagcuaccugaccccaggcgacagcagcagcggguggacagcaggcgcggcugcuuacuacgugggcuaccugcagccccggaccuuccugcugaaguacaacgagaacggcaccaucaccgacgccguggacugcgcccuggacccucugagcgagaccaagugcacccugaagagcuucaccguggagaagggcaucuaccagaccagcaacuuccgggugcagcccaccgagagcaucgugcgguuccccaacaucaccaaccugugccccuucggcgagguguucaacgccacccgguucgccagcguguacgccuggaaccggaagcggaucagcaacugcguggccgacuacagcgugcuguacaacagcgccagcuucagcaccuucaagugcuacggcgugagccccaccaagcugaacgaccugugcuucaccaacguguacgccgacagcuucgugauccguggcgacgaggugcggcagaucgcacccggccagacaggcaccaucgccgacuacaacuacaagcugcccgacgacuucaccggcugcgugaucgccuggaacagcaacaaccucgacagcaaggugggcggcaacuacaacuaccuguaccggcuguuccggaagagcaaccugaagcccuucgagcgggacaucagcaccgagaucuaccaagccggcuccaccccuugcaacggcgugaagggcuucaacugcuacuucccucugcagagcuacggcuuccagcccaccuacggcgugggcuaccagcccuaccgggugguggugcugagcuucgagcugcugcacgccccagccaccguguguggccccaagaagagcaccaaccuggugaagaacaagugcgugaacuucaacuucaacggccuuaccggcaccggcgugcugaccgagagcaacaagaaauuccugcccuuucagcaguucggccgggacaucgccgacaccaccgacgcugugcgggauccccagacccuggagauccuggacaucaccccuugcagcuucggcggcgugagcgugaucaccccaggcaccaacaccagcaaccagguggccgugcuguaccagggcgugaacugcaccgaggugcccguggccauccacgccgaccagcugacacccaccuggcgggucuacagcaccggcagcaacguguuccagacccgggccgguugccugaucggcgccgaguacgugaacaacagcuacgagugcgacauccccaucggcgccggcaucugugccagcuaccagacccagaccaauucaccccggagggcaaggagcguggccagccagagcaucaucgccuacaccaugagccugggcgccgagaacagcguggccuacagcaacaacagcaucgccauccccaccaacuucaccaucagcgugaccaccgagauucugcccgugagcaugaccaagaccagcguggacugcaccauguacaucugcggcgacagcaccgagugcagcaaccugcugcugcaguacggcagcuucugcacccagcugaaccgggcccugaccggcaucgccguggagcaggacaagaacacccaggagguguucgcccaggugaagcagaucuacaagaccccucccaucaaggacuucggcggcuucaacuucagccagauccugcccgaccccagcaagcccagcaagcggagcuucaucgaggaccugcuguucaacaaggugacccuagccgacgccggcuucaucaagcaguacggcgacugccucggcgacauagccgcccgggaccugaucugcgcccagaaguucaacggccugaccgugcugccuccccugcugaccgacgagaugaucgcccaguacaccagcgcccuguuagccggaaccaucaccagcggcuggacuuucggcgcuggagccgcucugcagauccccuucgccaugcagauggccuaccgguucaacggcaucggcgugacccagaacgugcuguacgagaaccagaagcugaucgccaaccaguucaacagcgccaucggcaagauccaggacagccugagcagcaccgcuagcgcccugggcaagcugcaggacguggugaaccagaacgcccaggcccugaacacccuggugaagcagcugagcagcaacuucggcgccaucagcagcgugcugaacgacauccugagccggcuggacccucccgaggccgaggugcagaucgaccggcugaucacuggccggcugcagagccugcagaccuacgugacccagcagcugauccgggccgccgagauucgggccagcgccaaccuggccgccaucaagaugagcgagugcgugcugggccagagcaagcggguggacuucugcggcaagggcuaccaccugaugagcuuuccccagagcgcaccccacggagugguguuccugcacgugaccuacgugcccgcccaggagaagaacuucaccaccgccccagccaucugccacgacggcaaggcccacuuuccccgggagggcguguucgugagcaacggcacccacugguucgugacccagcggaacuucuacgagccccagaucaucaccaccgacaacaccuucgugagcggcaacugcgacguggugaucggcaucgugaacaacaccguguacgauccccugcagcccgagcuggacagcuucaaggaggagcuggacaaguacuucaagaaucacaccagccccgacguggaccugggcgacaucagcggcaucaacgccagcguggugaacauccagaaggagaucgaucggcugaacgagguggccaagaaccugaacgagagccugaucgaccugcaggagcugggcaaguacgagcaguacaucaaguggcccugguacaucuggcugggcuucaucgccggccugaucgccaucgugauggugaccaucaugcugugcugcaugaccagcugcugcagcugccugaagggcuguugcagcugcggcagcugcugcaaguucgacgaggacgacagcgagcccgugcugaagggcgugaagcugcacuacaccuga

SEQ ID NO: 23130 - RNA, 3822 nt, Artificial Sequence
  SARS-CoV-2/Wuhan/WIV05/2019__EPI_ISL_402128 spike protein CDS gc (1-1273)(K986P_V987P_K986P_V987P_S13I_W152C_L452R_D614G)
auguucguguuccuggugcugcugccccuggugagcauccagugcgugaaccugaccacccggacccagcugccaccagccuacaccaacagcuucacccggggcgucuacuaccccgacaagguguuccggagcagcguccugcacagcacccaggaccuguuccugcccuucuucagcaacgugaccugguuccacgccauccacgugagcggcaccaacggcaccaagcgguucgacaaccccgugcugcccuucaacgacggcguguacuucgccagcaccgagaagagcaacaucauccggggcuggaucuucggcaccacccuggacagcaagacccagagccugcugaucgugaauaacgccaccaacguggugaucaaggugugcgaguuccaguucugcaacgaccccuuccugggcguguacuaccacaagaacaacaagagcugcauggagagcgaguuccggguguacagcagcgccaacaacugcaccuucgaguacgugagccagcccuuccugauggaccuggagggcaagcagggcaacuucaagaaccugcgggaguucguguucaagaacaucgacggcuacuucaagaucuacagcaagcacaccccaaucaaccuggugcgggaucugccccagggcuucucagcccuggagccccugguggaccugcccaucggcaucaacaucacccgguuccagacccugcuggcccugcaccggagcuaccugaccccaggcgacagcagcagcggguggacagcaggcgcggcugcuuacuacgugggcuaccugcagccccggaccuuccugcugaaguacaacgagaacggcaccaucaccgacgccguggacugcgcccuggacccucugagcgagaccaagugcacccugaagagcuucaccguggagaagggcaucuaccagaccagcaacuuccgggugcagcccaccgagagcaucgugcgguuccccaacaucaccaaccugugccccuucggcgagguguucaacgccacccgguucgccagcguguacgccuggaaccggaagcggaucagcaacugcguggccgacuacagcgugcuguacaacagcgccagcuucagcaccuucaagugcuacggcgugagccccaccaagcugaacgaccugugcuucaccaacguguacgccgacagcuucgugauccguggcgacgaggugcggcagaucgcacccggccagacaggcaagaucgccgacuacaacuacaagcugcccgacgacuucaccggcugcgugaucgccuggaacagcaacaaccucgacagcaaggugggcggcaacuacaacuaccgcuaccggcuguuccggaagagcaaccugaagcccuucgagcgggacaucagcaccgagaucuaccaagccggcuccaccccuugcaacggcguggagggcuucaacugcuacuucccucugcagagcuacggcuuccagcccaccaacggcgugggcuaccagcccuaccgggugguggugcugagcuucgagcugcugcacgccccagccaccguguguggccccaagaagagcaccaaccuggugaagaacaagugcgugaacuucaacuucaacggccuuaccggcaccggcgugcugaccgagagcaacaagaaauuccugcccuuucagcaguucggccgggacaucgccgacaccaccgacgcugugcgggauccccagacccuggagauccuggacaucaccccuugcagcuucggcggcgugagcgugaucaccccaggcaccaacaccagcaaccagguggccgugcuguaccagggcgugaacugcaccgaggugcccguggccauccacgccgaccagcugacacccaccuggcgggucuacagcaccggcagcaacguguuccagacccgggccgguugccugaucggcgccgagcacgugaacaacagcuacgagugcgacauccccaucggcgccggcaucugugccagcuaccagacccagaccaauucaccccggagggcaaggagcguggccagccagagcaucaucgccuacaccaugagccugggcgccgagaacagcguggccuacagcaacaacagcaucgccauccccaccaacuucaccaucagcgugaccaccgagauucugcccgugagcaugaccaagaccagcguggacugcaccauguacaucugcggcgacagcaccgagugcagcaaccugcugcugcaguacggcagcuucugcacccagcugaaccgggcccugaccggcaucgccguggagcaggacaagaacacccaggagguguucgcccaggugaagcagaucuacaagaccccucccaucaaggacuucggcggcuucaacuucagccagauccugcccgaccccagcaagcccagcaagcggagcuucaucgaggaccugcuguucaacaaggugacccuagccgacgccggcuucaucaagcaguacggcgacugccucggcgacauagccgcccgggaccugaucugcgcccagaaguucaacggccugaccgugcugccuccccugcugaccgacgagaugaucgcccaguacaccagcgcccuguuagccggaaccaucaccagcggcuggacuuucggcgcuggagccgcucugcagauccccuucgccaugcagauggccuaccgguucaacggcaucggcgugacccagaacgugcuguacgagaaccagaagcugaucgccaaccaguucaacagcgccaucggcaagauccaggacagccugagcagcaccgcuagcgcccugggcaagcugcaggacguggugaaccagaacgcccaggcccugaacacccuggugaagcagcugagcagcaacuucggcgccaucagcagcgugcugaacgacauccugagccggcuggacccucccgaggccgaggugcagaucgaccggcugaucacuggccggcugcagagccugcagaccuacgugacccagcagcugauccgggccgccgagauucgggccagcgccaaccuggccgccaccaagaugagcgagugcgugcugggccagagcaagcggguggacuucugcggcaagggcuaccaccugaugagcuuuccccagagcgcaccccacggagugguguuccugcacgugaccuacgugcccgcccaggagaagaacuucaccaccgccccagccaucugccacgacggcaaggcccacuuuccccgggagggcguguucgugagcaacggcacccacugguucgugacccagcggaacuucuacgagccccagaucaucaccaccgacaacaccuucgugagcggcaacugcgacguggugaucggcaucgugaacaacaccguguacgauccccugcagcccgagcuggacagcuucaaggaggagcuggacaaguacuucaagaaucacaccagccccgacguggaccugggcgacaucagcggcaucaacgccagcguggugaacauccagaaggagaucgaucggcugaacgagguggccaagaaccugaacgagagccugaucgaccugcaggagcugggcaaguacgagcaguacaucaaguggcccugguacaucuggcugggcuucaucgccggccugaucgccaucgugauggugaccaucaugcugugcugcaugaccagcugcugcagcugccugaagggcuguugcagcugcggcagcugcugcaaguucgacgaggacgacagcgagcccgugcugaagggcgugaagcugcacuacaccuga

SEQ ID NO: 23131 - RNA, 3822 nt, Artificial Sequence
  SARS-CoV-2/Wuhan/WIV05/2019__EPI_ISL_402128 spike protein CDS gc (1-1273)(K986P_V987P)
auguucguguuccuggugcugcugccccuggugagcagccagugcgugaaccugaccacccggacccagcugcccccugccuacaccaacagcuucacccggggcguguacuaccccgacaagguguuccggagcagcgugcugcacagcacccaggaccuguuccugcccuucuucagcaacgugaccugguuccacgccauccacgugagcggcaccaacggcaccaagcgguucgacaacccagugcugcccuucaacgacggcguguacuucgccagcaccgagaagucaaacaucauccggggcuggaucuucggcaccacccuggacagcaagacacagagccugcugaucgugaacaacgccaccaacguggugaucaaggugugcgaguuucaguucugcaacgaccccuuccugggcguguacuaccacaagaacaacaagagcuggauggagagcgaguuccgggucuacagcagcgcuaacaauugcaccuucgaguacgugagccagcccuuccugauggaccucgagggcaagcagggcaacuucaagaaccugcgggaguucguguucaagaacaucgauggcuacuucaagaucuacagcaagcacacccccaucaaccuggugcgggaccugccccagggauucagcgcccuggagccucugguggaccugcccaucggcaucaacaucaccagguuccagacccugcuggcccugcaccggagcuaccugacccccggcgacagcagcagcggcuggaccgccggcgccgccgcauacuacgugggcuaccugcagccacggaccuuccugcugaaguacaacgagaacggcaccaucaccgacgccguggacugcgcccuggacccccugagcgagaccaagugcacccuaaagagcuucaccguggagaagggcaucuaccagaccagcaacuuccgggugcagcccacugagagcaucgugcgguuccccaacauuaccaaccugugucccuucggcgagguguucaacgccacccgguucgccagcguguacgccuggaaccggaagcggaucagcaacugcguggccgacuacagcgugcuguacaacagcgccagcuucagcaccuucaagugcuacggcgugagcccuaccaagcugaacgaccugugcuucaccaacguguacgcugacagcuucgugauccggggcgacgaggugcggcagaucgcccccggccagaccggcaagaucgccgacuacaacuacaagcugcccgacgacuucaccggcugcgugaucgccuggaacagcaacaaccuggacagcaaggugggcggcaacuacaacuaccuguaccggcuguuccguaagagcaaccugaagccauucgagcgggacaucagcaccgagaucuaccaggccggcagcacccccugcaacgguguggagggcuuuaacugcuacuucccccugcagagcuacggcuuccagcccaccaacggcgugggcuaccagcccuaccgggugguggugcugagcuucgagcugcugcacgcccccgccaccgugugcggcccuaaaaagagcaccaaccuggugaagaacaagugcgugaacuucaauuucaacggccugaccggcaccggcgugcugaccgagagcaacaagaaguuccugcccuuccagcaguucggccgggauaucgccgacaccaccgacgcagugcgggacccccagacccuggagauccuggacaucaccccaugcagcuucggcggcgugagcgucaucacccccggcacaaacaccagcaaccagguggccgugcuguaccaggacgugaacugcaccgaggugcccguggccauccacgccgaccagcugacccccaccuggcggguguacagcaccggaagcaacguguuccagacccgggccggcugccugaucggcgccgagcacgugaacaacuccuacgagugcgacauccccaucggcgcuggcaucugcgccagcuaccagacccagaccaacagcccccggcgggcccggagcguggccagccagagcaucaucgccuacaccaugagcuuaggcgccgagaacagcguggccuacagcaacaacagcaucgcgaucccuaccaacuucaccaucagcgugaccaccgagauacugcccgugagcaugaccaagaccagcguggacuguaccauguacaucugcggcgacagcaccgagugcagcaaccugcugcugcaguacggcagcuucugcacccagcugaaccgggcccugaccggcaucgccguggagcaggacaagaacacccaagagguguucgcccaggugaagcagaucuacaagacucccccaaucaaggacuucggcggcuucaacuucagccagauccugcccgaccccagcaagcccagcaagcggagcuucaucgaggaccugcuguucaacaaggugacccuggccgacgccggcuucaucaagcaguacggcgauugccugggcgacaucgccgcucgggaccugaucugcgcccagaaguucaacgggcugaccgugcugcccccucugcugaccgacgagaugaucgcccaguacaccagcgcccugcuugccggcaccaucaccagcggcuggaccuucggcgccggcgcagcccugcagauccccuucgccaugcagauggccuaccgguucaacggcaucggcgugacccagaacgugcuguacgagaaccagaagcugaucgccaaccaguucaacagcgccaucggcaagauccaggacagccugagcagcaccgccagcgcccugggcaagcugcaggacguggugaaccagaacgcucaggcccugaacacccuggugaagcagcugagcagcaacuucggcgccaucagcucagugcugaaugacauccugagcaggcuggaucccccagaggccgaggugcagaucgaccggcugaucaccggccggcugcagagccugcagaccuacgugacccagcagcugauccgggccgccgagauccgggccagcgccaaccuggcagccaccaagaugagcgagugcgugcugggccagagcaagcggguggacuuuugcggcaagggcuaccaccugaugagcuucccccagagcgcuccccacggcgugguguuccuccacgugacauacguccccgcccaggagaagaacuucaccaccgcccccgccauuugccacgacggcaaggcccacuucccccgggagggcguguucgugagcaacggaacccacugguucgugacccagcggaacuucuacgagccucagaucaucaccaccgacaacaccuucgugagcggcaacugcgacguggugaucggcaucgugaacaacaccguguacgacccccugcagcccgagcuggacagcuucaaggaggagcuggacaaguacuucaagaaccacaccagcccagacguggaccugggcgacaucagcggcaucaacgccagcguggugaacauccagaaggagaucgaccggcugaacgagguggccaagaaccugaacgagagccugaucgaccugcaggagcugggcaaguacgagcaguacaucaaguggcccugguacaucuggcugggcuucaucgccggccugaucgccaucgugauggugaccaucaugcugugcugcaugaccagcugcuguagcugccugaagggcugcugcagcugcggcagcugcugcaaguucgacgaggacgacagcgagcccgugcugaagggcgugaagcugcacuacaccuga

SEQ ID NO: 23132 - RNA, 3822 nt, Artificial Sequence
  SARS-CoV-2/Wuhan/WIV05/2019__EPI_ISL_402128 spike protein CDS gc (1-1273)(K986P_V987P_ D614G)
auguucguguuccuggugcugcugccccuggugagcagccagugcgugaaccugaccacccggacccagcugcccccugccuacaccaacagcuucacccggggcguguacuaccccgacaagguguuccggagcagcgugcugcacagcacccaggaccuguuccugcccuucuucagcaacgugaccugguuccacgccauccacgugagcggcaccaacggcaccaagcgguucgacaacccagugcugcccuucaacgacggcguguacuucgccagcaccgagaagucaaacaucauccggggcuggaucuucggcaccacccuggacagcaagacacagagccugcugaucgugaacaacgccaccaacguggugaucaaggugugcgaguuucaguucugcaacgaccccuuccugggcguguacuaccacaagaacaacaagagcuggauggagagcgaguuccgggucuacagcagcgcuaacaauugcaccuucgaguacgugagccagcccuuccugauggaccucgagggcaagcagggcaacuucaagaaccugcgggaguucguguucaagaacaucgauggcuacuucaagaucuacagcaagcacacccccaucaaccuggugcgggaccugccccagggauucagcgcccuggagccucugguggaccugcccaucggcaucaacaucaccagguuccagacccugcuggcccugcaccggagcuaccugacccccggcgacagcagcagcggcuggaccgccggcgccgccgcauacuacgugggcuaccugcagccacggaccuuccugcugaaguacaacgagaacggcaccaucaccgacgccguggacugcgcccuggacccccugagcgagaccaagugcacccuaaagagcuucaccguggagaagggcaucuaccagaccagcaacuuccgggugcagcccacugagagcaucgugcgguuccccaacauuaccaaccugugucccuucggcgagguguucaacgccacccgguucgccagcguguacgccuggaaccggaagcggaucagcaacugcguggccgacuacagcgugcuguacaacagcgccagcuucagcaccuucaagugcuacggcgugagcccuaccaagcugaacgaccugugcuucaccaacguguacgcugacagcuucgugauccggggcgacgaggugcggcagaucgcccccggccagaccggcaagaucgccgacuacaacuacaagcugcccgacgacuucaccggcugcgugaucgccuggaacagcaacaaccuggacagcaaggugggcggcaacuacaacuaccuguaccggcuguuccguaagagcaaccugaagccauucgagcgggacaucagcaccgagaucuaccaggccggcagcacccccugcaacgguguggagggcuuuaacugcuacuucccccugcagagcuacggcuuccagcccaccaacggcgugggcuaccagcccuaccgggugguggugcugagcuucgagcugcugcacgcccccgccaccgugugcggcccuaaaaagagcaccaaccuggugaagaacaagugcgugaacuucaauuucaacggccugaccggcaccggcgugcugaccgagagcaacaagaaguuccugcccuuccagcaguucggccgggauaucgccgacaccaccgacgcagugcgggacccccagacccuggagauccuggacaucaccccaugcagcuucggcggcgugagcgucaucacccccggcacaaacaccagcaaccagguggccgugcuguaccagggagugaacugcaccgaggugcccguggccauccacgccgaccagcugacccccaccuggcggguguacagcaccggcagcaacguguuccagacccgggccggcugccugaucggcgccgagcacgugaacaacuccuacgagugcgacauccccaucggcgcuggcaucugcgccagcuaccagacccagaccaacagcccccggcgggcccggagcguggccagccagagcaucaucgccuacaccaugagcuuaggcgccgagaacagcguggccuacagcaacaacagcaucgcgaucccuaccaacuucaccaucagcgugaccaccgagauacugcccgugagcaugaccaagaccagcguggacuguaccauguacaucugcggcgacagcaccgagugcagcaaccugcugcugcaguacggcagcuucugcacccagcugaaccgggcccugaccggcaucgccguggagcaggacaagaacacccaagagguguucgcccaggugaagcagaucuacaagacucccccaaucaaggacuucggcggcuucaacuucagccagauccugcccgaccccagcaagcccagcaagcggagcuucaucgaggaccugcuguucaacaaggugacccuggccgacgccggcuucaucaagcaguacggcgacugccugggggauaucgccgcucgggaccugaucugcgcccagaaguucaacggccugaccgugcugcccccucugcugaccgacgagaugaucgcccaguacaccagcgcccugcuugccggcaccaucaccagcggcuggaccuucggcgccggcgcagcccugcagauccccuucgccaugcagauggccuaccgguucaacggcaucggcgugacccagaacgugcuguacgagaaccagaagcugaucgccaaccaguucaacagcgccaucggcaagauccaggacagccugagcagcaccgccagcgcccugggcaagcugcaggacguggugaaccagaacgcucaggcccugaacacccuggugaagcagcugagcagcaacuucggcgccaucagcucagugcugaaugacauccugagcaggcuggaucccccagaggccgaggugcagaucgaccggcugaucaccggccggcugcagagccugcagaccuacgugacccagcagcugauccgggccgccgagauccgggccagcgccaaccuggcagccaccaagaugagcgagugcgugcugggccagagcaagcggguggacuuuugcggcaagggcuaccaccugaugagcuucccccagagcgcuccccacggcgugguguuccuccacgugacauacguccccgcccaggagaagaacuucaccaccgcccccgccauuugccacgacggcaaggcccacuucccccgggagggaguguucgugagcaacggcacccacugguucgugacccagcggaacuucuacgagccucagaucaucaccaccgacaacaccuucgugagcggcaacugcgacguggugaucggcaucgugaacaacaccguguacgacccccugcagcccgagcuggacagcuucaaggaggagcuggacaaguacuucaagaaccacaccagcccagacguggaccugggcgacaucagcggcaucaacgccagcguggugaacauccagaaggagaucgaccggcugaacgagguggccaagaaccugaacgagagccugaucgaccugcaggagcugggcaaguacgagcaguacaucaaguggcccugguacaucuggcugggcuucaucgccggccugaucgccaucgugauggugaccaucaugcugugcugcaugaccagcugcuguagcugccugaagggcugcugcagcugcggcagcugcugcaaguucgacgaggacgacagcgagcccgugcugaagggcgugaagcugcacuacaccuga

SEQ ID NO: 23133 - RNA, 3822 nt, Artificial Sequence
  SARS-CoV-2/Wuhan/WIV05/2019__EPI_ISL_402128 spike protein CDS gc (1-1273)(K986P_V987P_A222V_D614G)
auguucguguuccuggugcugcugccccuggugagcagccagugcgugaaccugaccacccggacccagcugcccccugccuacaccaacagcuucacccggggcguguacuaccccgacaagguguuccggagcagcgugcugcacagcacccaggaccuguuccugcccuucuucagcaacgugaccugguuccacgccauccacgugagcggcaccaacggcaccaagcgguucgacaacccagugcugcccuucaacgacggcguguacuucgccagcaccgagaagucaaacaucauccggggcuggaucuucggcaccacccuggacagcaagacacagagccugcugaucgugaacaacgccaccaacguggugaucaaggugugcgaguuucaguucugcaacgaccccuuccugggcguguacuaccacaagaacaacaagagcuggauggagagcgaguuccgggucuacagcagcgcuaacaauugcaccuucgaguacgugagccagcccuuccugauggaccucgagggcaagcagggcaacuucaagaaccugcgggaguucguguucaagaacaucgauggcuacuucaagaucuacagcaagcacacccccaucaaccuggugcgggaccugccccagggauucagcgugcuggagccucugguggaccugcccaucggcaucaacaucaccagguuccagacccugcuggcccugcaccggagcuaccugacccccggcgacagcagcagcggcuggaccgccggcgccgccgccuacuacgugggcuaccugcagccacggaccuuccugcugaaguacaacgagaacggcaccaucaccgacgcaguggacugcgcccuggacccccugagcgagaccaagugcacccuaaagagcuucaccguggagaagggcaucuaccagaccagcaacuuccgggugcagcccacugagagcaucgugcgguuccccaacauuaccaaccugugucccuucggcgagguguucaacgccacccgguucgccagcguguacgccuggaaccggaagcggaucagcaacugcguggccgacuacagcgugcuguacaacagcgccagcuucagcaccuucaagugcuacggcgugagcccuaccaagcugaacgaccugugcuucaccaacguguacgccgacagcuucgugauccggggcgacgaggugcggcagaucgcucccggccagaccggcaagaucgccgacuacaacuacaagcugcccgacgacuucaccggcugcgugaucgccuggaacagcaacaaccuggacagcaaggugggcggcaacuacaacuaccuguaccggcuguuccguaagagcaaccugaagccauucgagcgggacaucagcaccgagaucuaccaggccggcagcacccccugcaacgguguggagggcuuuaacugcuacuucccccugcagagcuacggcuuccagcccaccaacggcgugggcuaccagcccuaccgggugguggugcugagcuucgagcugcugcacgcccccgccaccgugugcggcccuaaaaagagcaccaaccuggugaagaacaagugcgugaacuucaauuucaacggccugaccggcaccggcgugcugaccgagagcaacaagaaguuccugcccuuccagcaguucggccgggauaucgccgacaccaccgacgccgugcgggacccccagacccuggagauccuggacaucaccccaugcagcuucggcggcgucagcgugaucacccccggcacaaacaccagcaaccagguggcagugcuguaccagggagugaacugcaccgaggugcccguggccauccacgccgaccagcugacccccaccuggcggguguacagcaccggcagcaacguguuccagacccgggccggcugccugaucggcgccgagcacgugaacaacuccuacgagugcgacauccccaucggcgccggcaucugcgcuagcuaccagacccagaccaacagcccccggcgggcccggagcguggccagccagagcaucaucgccuacaccaugagcuuaggcgccgagaacagcguggccuacagcaacaacagcaucgccaucccuaccaacuucaccaucagcgugaccaccgagauacugcccgugagcaugaccaagaccagcguggacuguaccauguacaucugcggcgacagcaccgagugcagcaaccugcugcugcaguacggcagcuucugcacccagcugaaccgggcgcugaccggcaucgccguggagcaggacaagaacacccaagagguguucgcccaggugaagcagaucuacaagacucccccaaucaaggacuucggcggcuucaacuucagccagauccugcccgaccccagcaagcccagcaagcggagcuucaucgaggaccugcuguucaacaaggugacccuggccgacgccggcuucaucaagcaguacggcgacugccugggggauaucgccgcccgggaccugaucugcgcucagaaguucaacggccugaccgugcugcccccucugcugaccgacgagaugaucgcccaguacaccagcgcccugcuugccggcaccaucaccagcggcuggaccuucggcgccggcgccgcacugcagauccccuucgccaugcagauggccuaccgguucaacggcaucggcgugacccagaacgugcuguacgagaaccagaagcugaucgccaaccaguucaacagcgccaucggcaagauccaggacagccugagcagcaccgccagcgcccugggcaagcugcaggacguggugaaccagaacgcccaggcucugaacacccuggugaagcagcugagcagcaacuucggcgccaucagcucagugcugaaugacauccugagcaggcuggaucccccagaggccgaggugcagaucgaccggcugaucaccggccggcugcagagccugcagaccuacgugacccagcagcugauccgggccgccgagauccgggccagcgccaaccuggccgcaaccaagaugagcgagugcgugcugggccagagcaagcggguggacuuuugcggcaagggcuaccaccugaugagcuucccccagagcgcuccccacggcgugguguuccuccacgucacauacgugcccgcccaggagaagaacuucaccaccgcccccgccauuugccacgacggcaaggcccacuucccccgggagggaguguucgugagcaacggcacccacugguucgugacccagcggaacuucuacgagccucagaucaucaccaccgacaacaccuucgugagcggcaacugcgacguggugaucggcaucgugaacaacaccguguacgacccccugcagcccgagcuggacagcuucaaggaggagcuggacaaguacuucaagaaccacaccagcccagacguggaccugggcgacaucagcggcaucaacgccagcguggugaacauccagaaggagaucgaccggcugaacgagguggccaagaaccugaacgagagccugaucgaccugcaggagcugggcaaguacgagcaguacaucaaguggcccugguacaucuggcugggcuucaucgccggccugaucgccaucgugauggugaccaucaugcugugcugcaugaccagcugcuguagcugccugaagggcugcugcagcugcggcagcugcugcaaguucgacgaggacgacagcgagcccgugcugaagggcgugaagcugcacuacaccuga

SEQ ID NO: 23134 - RNA, 3822 nt, Artificial Sequence
  SARS-CoV-2/Wuhan/WIV05/2019__EPI_ISL_402128 spike protein CDS gc (1-1273)(K986P_V987P_N439K_D614G)
auguucguguuccuggugcugcugccccuggugagcagccagugcgugaaccugaccacccggacccagcugcccccugccuacaccaacagcuucacccggggcguguacuaccccgacaagguguuccggagcagcgugcugcacagcacccaggaccuguuccugcccuucuucagcaacgugaccugguuccacgccauccacgugagcggcaccaacggcaccaagcgguucgacaacccagugcugcccuucaacgacggcguguacuucgccagcaccgagaagucaaacaucauccggggcuggaucuucggcaccacccuggacagcaagacacagagccugcugaucgugaacaacgccaccaacguggugaucaaggugugcgaguuucaguucugcaacgaccccuuccugggcguguacuaccacaagaacaacaagagcuggauggagagcgaguuccgggucuacagcagcgcuaacaauugcaccuucgaguacgugagccagcccuuccugauggaccucgagggcaagcagggcaacuucaagaaccugcgggaguucguguucaagaacaucgauggcuacuucaagaucuacagcaagcacacccccaucaaccuggugcgggaccugccccagggauucagcgcccuggagccucugguggaccugcccaucggcaucaacaucaccagguuccagacccugcuggcccugcaccggagcuaccugacccccggcgacagcagcagcggcuggaccgccggcgccgccgcauacuacgugggcuaccugcagccacggaccuuccugcugaaguacaacgagaacggcaccaucaccgacgccguggacugcgcccuggacccccugagcgagaccaagugcacccuaaagagcuucaccguggagaagggcaucuaccagaccagcaacuuccgggugcagcccacugagagcaucgugcgguuccccaacauuaccaaccugugucccuucggcgagguguucaacgccacccgguucgccagcguguacgccuggaaccggaagcggaucagcaacugcguggccgacuacagcgugcuguacaacagcgccagcuucagcaccuucaagugcuacggcgugagcccuaccaagcugaacgaccugugcuucaccaacguguacgcugacagcuucgugauccggggcgacgaggugcggcagaucgcccccggccagaccggcaagaucgccgacuacaacuacaagcugcccgacgacuucaccggcugcgugaucgccuggaacagcaagaaccuggacagcaaggugggcggcaacuacaacuaccuguaccggcuguuccguaagagcaaccugaagccauucgagcgggacaucagcaccgagaucuaccaggccggcagcacccccugcaacgguguggagggcuuuaacugcuacuucccccugcagagcuacggcuuccagcccaccaacggcgugggcuaccagcccuaccgggugguggugcugagcuucgagcugcugcacgcccccgccaccgugugcggcccuaaaaagagcaccaaccuggugaagaacaagugcgugaacuucaacuucaauggccugaccggcaccggcgugcugaccgagagcaacaagaaguuccugcccuuccagcaguucggccgggauaucgccgacaccaccgacgcagugcgggacccccagacccuggagauccuggacaucaccccaugcagcuucggcggcgugagcgucaucacccccggcacaaacaccagcaaccagguggccgugcuguaccagggagugaacugcaccgaggugcccguggccauccacgccgaccagcugacccccaccuggcggguguacagcaccggcagcaacguguuccagacccgggccggcugccugaucggcgccgagcacgugaacaacuccuacgagugcgacauccccaucggcgcuggcaucugcgccagcuaccagacccagaccaacagcccccggcgggcccggagcguggccagccagagcaucaucgccuacaccaugagcuuaggcgccgagaacagcguggccuacagcaacaacagcaucgcgaucccuaccaacuucaccaucagcgugaccaccgagauacugcccgugagcaugaccaagaccagcguggacuguaccauguacaucugcggcgacagcaccgagugcagcaaccugcugcugcaguacggcagcuucugcacccagcugaaccgggcccugaccggcaucgccguggagcaggacaagaacacccaagagguguucgcccaggugaagcagaucuacaagacucccccaaucaaggacuucggcggcuucaacuucagccagauccugcccgaccccagcaagcccagcaagcggagcuucaucgaggaccugcuguucaacaaggugacccuggccgacgccggcuucaucaagcaguacggcgacugccugggggauaucgccgcucgggaccugaucugcgcccagaaguucaacggccugaccgugcugcccccucugcugaccgacgagaugaucgcccaguacaccagcgcccugcuugccggcaccaucaccagcggcuggaccuucggcgccggcgcagcccugcagauccccuucgccaugcagauggccuaccgguucaacggcaucggcgugacccagaacgugcuguacgagaaccagaagcugaucgccaaccaguucaacagcgccaucggcaagauccaggacagccugagcagcaccgccagcgcccugggcaagcugcaggacguggugaaccagaacgcucaggcccugaacacccuggugaagcagcugagcagcaacuucggcgccaucagcucagugcugaacgacauccugagcaggcuggaucccccagaggccgaggugcagaucgaccggcugaucaccggccggcugcagagccugcagaccuacgugacccagcagcugauccgggccgccgagauccgggccagcgccaaucuggcagccaccaagaugagcgagugcgugcugggccagagcaagcggguggacuuuugcggcaagggcuaccaccugaugagcuucccccagagcgcuccccacggcgugguguuccuccacgugacauacguccccgcccaggagaagaacuucaccaccgcccccgccauuugccacgacggcaaggcccacuucccccgggagggaguguucgugagcaacggcacccacugguucgugacccagcggaacuucuacgagccucagaucaucaccaccgacaacaccuucgugagcggcaacugcgacguggugaucggcaucgugaacaacaccguguacgacccccugcagcccgagcuggacagcuucaaggaggagcuggacaaguacuucaagaaccacaccagcccagacguggaccugggcgacaucagcggcaucaacgccagcguggugaacauccagaaggagaucgaccggcugaacgagguggccaagaaccugaacgagagccugaucgaccugcaggagcugggcaaguacgagcaguacaucaaguggcccugguacaucuggcugggcuucaucgccggccugaucgccaucgugauggugaccaucaugcugugcugcaugaccagcugcuguagcugccugaagggcugcugcagcugcggcagcugcugcaaguucgacgaggacgacagcgagcccgugcugaagggcgugaagcugcacuacaccuga

SEQ ID NO: 23135 - RNA, 3822 nt, Artificial Sequence
  SARS-CoV-2/Wuhan/WIV05/2019__EPI_ISL_402128 spike protein CDS gc (1-1273)(K986P_V987P_S477N_D614G)
auguucguguuccuggugcugcugccccuggugagcagccagugcgugaaccugaccacccggacccagcugcccccugccuacaccaacagcuucacccggggcguguacuaccccgacaagguguuccggagcagcgugcugcacagcacccaggaccuguuccugcccuucuucagcaacgugaccugguuccacgccauccacgugagcggcaccaacggcaccaagcgguucgacaacccagugcugcccuucaacgacggcguguacuucgccagcaccgagaagucaaacaucauccggggcuggaucuucggcaccacccuggacagcaagacacagagccugcugaucgugaacaacgccaccaacguggugaucaaggugugcgaguuucaguucugcaacgaccccuuccugggcguguacuaccacaagaacaacaagagcuggauggagagcgaguuccgggucuacagcagcgcuaacaauugcaccuucgaguacgugagccagcccuuccugauggaccucgagggcaagcagggcaacuucaagaaccugcgggaguucguguucaagaacaucgauggcuacuucaagaucuacagcaagcacacccccaucaaccuggugcgggaccugccccagggauucagcgcccuggagccucugguggaccugcccaucggcaucaacaucaccagguuccagacccugcuggcccugcaccggagcuaccugacccccggcgacagcagcagcggcuggaccgccggcgccgccgcauacuacgugggcuaccugcagccacggaccuuccugcugaaguacaacgagaacggcaccaucaccgacgccguggacugcgcccuggacccccugagcgagaccaagugcacccuaaagagcuucaccguggagaagggcaucuaccagaccagcaacuuccgggugcagcccacugagagcaucgugcgguuccccaacauuaccaaccugugucccuucggcgagguguucaacgccacccgguucgccagcguguacgccuggaaccggaagcggaucagcaacugcguggccgacuacagcgugcuguacaacagcgccagcuucagcaccuucaagugcuacggcgugagcccuaccaagcugaacgaccugugcuucaccaacguguacgcugacagcuucgugauccggggcgacgaggugcggcagaucgcccccggccagaccggcaagaucgccgacuacaacuacaagcugcccgacgacuucaccggcugcgugaucgccuggaacagcaacaaccuggacagcaaggugggcggcaacuacaacuaccuguaccggcuguuccguaagagcaaccugaagccauucgagcgggacaucagcaccgagaucuaccaggccggcaacacccccugcaacgguguggagggcuuuaacugcuacuucccccugcagagcuacggcuuccagcccaccaacggcgugggcuaccagcccuaccgggugguggugcugagcuucgagcugcugcacgcccccgccaccgugugcggcccuaaaaagagcaccaaccuggugaagaacaagugcgugaauuucaacuucaacggccugaccggcaccggcgugcugaccgagagcaacaagaaguuccugcccuuccagcaguucggccgggauaucgccgacaccaccgacgcagugcgggacccccagacccuggagauccuggacaucaccccaugcagcuucggcggcgugagcgucaucacccccggcacaaacaccagcaaccagguggccgugcuguaccagggagugaacugcaccgaggugcccguggccauccacgccgaccagcugacccccaccuggcggguguacagcaccggcagcaacguguuccagacccgggccggcugccugaucggcgccgagcacgugaacaacagcuacgagugcgacauccccaucggcgcuggcaucugcgccuccuaccagacccagaccaacagcccccggcgggcccggagcguggccagccagagcaucaucgccuacaccaugagcuuaggcgccgagaacagcguggccuacagcaacaacagcaucgcgaucccuaccaacuucaccaucagcgugaccaccgagauacugcccgugagcaugaccaagaccagcguggacuguaccauguacaucugcggcgacagcaccgagugcagcaaccugcugcugcaguacggcagcuucugcacccagcugaaccgggcccugaccggcaucgccguggagcaggacaagaacacccaagagguguucgcccaggugaagcagaucuacaagacucccccaaucaaggacuucggcggcuucaacuucagccagauccugcccgaccccagcaagcccagcaagcggagcuucaucgaggaccugcuguucaacaaggugacccuggccgacgccggcuucaucaagcaguacggcgacugccugggggauaucgccgcucgggaccugaucugcgcccagaaguucaacggccugaccgugcugcccccucugcugaccgacgagaugaucgcccaguacaccagcgcccugcuugccggcaccaucaccagcggcuggaccuucggcgccggcgcagcccugcagauccccuucgccaugcagauggccuaccgguucaacggcaucggcgugacccagaacgugcuguacgagaaccagaagcugaucgccaaccaguucaacagcgccaucggcaagauccaggacagccugagcagcaccgccagcgcccugggcaagcugcaggacguggugaaccagaacgcucaggcccugaacacccuggugaagcagcugagcagcaauuucggcgccaucagcagcgugcugaacgacauccugucaaggcuggaucccccagaggccgaggugcagaucgaccggcugaucaccggccggcugcagagccugcagaccuacgugacccagcagcugauccgggccgccgagauccgggccagcgccaaccuggcagccaccaagaugagcgagugcgugcugggccagagcaagcggguggacuuuugcggcaagggcuaccaccugaugagcuucccccagagcgcuccccacggcgugguguuccuccacgugacauacguccccgcccaggagaagaacuucaccaccgcccccgccauuugccacgacggcaaggcccacuucccccgggagggaguguucgugagcaacggcacccacugguucgugacccagcggaacuucuacgagccucagaucaucaccaccgacaacaccuucgugagcggcaacugcgacguggugaucggcaucgugaacaacaccguguacgacccccugcagcccgagcuggacagcuucaaggaggagcuggacaaguacuucaagaaccacaccagcccagacguggaccugggcgacaucagcggcaucaacgccagcguggugaacauccagaaggagaucgaccggcugaacgagguggccaagaaccugaacgagagccugaucgaccugcaggagcugggcaaguacgagcaguacaucaaguggcccugguacaucuggcugggcuucaucgccggccugaucgccaucgugauggugaccaucaugcugugcugcaugaccagcugcuguagcugccugaagggcugcugcagcugcggcagcugcugcaaguucgacgaggacgacagcgagcccgugcugaagggcgugaagcugcacuacaccuga

SEQ ID NO: 23136 - RNA, 3822 nt, Artificial Sequence
  SARS-CoV-2/Wuhan/WIV05/2019__EPI_ISL_402128 spike protein CDS gc (1-1273)(K986P_V987P_N501Y_D614G)
auguucguguuccuggugcugcugccccuggugagcagccagugcgugaaccugaccacccggacccagcugcccccugccuacaccaacagcuucacccggggcguguacuaccccgacaagguguuccggagcagcgugcugcacagcacccaggaccuguuccugcccuucuucagcaacgugaccugguuccacgccauccacgugagcggcaccaacggcaccaagcgguucgacaacccagugcugcccuucaacgacggcguguacuucgccagcaccgagaagucaaacaucauccggggcuggaucuucggcaccacccuggacagcaagacacagagccugcugaucgugaacaacgccaccaacguggugaucaaggugugcgaguuucaguucugcaacgaccccuuccugggcguguacuaccacaagaacaacaagagcuggauggagagcgaguuccgggucuacagcagcgcuaacaauugcaccuucgaguacgugagccagcccuuccugauggaccucgagggcaagcagggcaacuucaagaaccugcgggaguucguguucaagaacaucgauggcuacuucaagaucuacagcaagcacacccccaucaaccuggugcgggaccugccccagggauucagcgcccuggagccucugguggaccugcccaucggcaucaacaucaccagguuccagacccugcuggcccugcaccggagcuaccugacccccggcgacagcagcagcggcuggaccgccggcgccgccgcauacuacgugggcuaccugcagccacggaccuuccugcugaaguacaacgagaacggcaccaucaccgacgccguggacugcgcccuggacccccugagcgagaccaagugcacccuaaagagcuucaccguggagaagggcaucuaccagaccagcaacuuccgggugcagcccacugagagcaucgugcgguuccccaacauuaccaaccugugucccuucggcgagguguucaacgccacccgguucgccagcguguacgccuggaaccggaagcggaucagcaacugcguggccgacuacagcgugcuguacaacagcgccagcuucagcaccuucaagugcuacggcgugagcccuaccaagcugaacgaccugugcuucaccaacguguacgcugacagcuucgugauccggggcgacgaggugcggcagaucgcccccggccagaccggcaagaucgccgacuacaacuacaagcugcccgacgacuucaccggcugcgugaucgccuggaacagcaacaaccuggacagcaaggugggcggcaacuacaacuaccuguaccggcuguuccguaagagcaaccugaagccauucgagcgggacaucagcaccgagaucuaccaggccggcagcacccccugcaacgguguggagggcuuuaacugcuacuucccccugcagagcuacggcuuccagcccaccuacggcgugggcuaccagcccuaccgggugguggugcugagcuucgagcugcugcacgcccccgccaccgugugcggcccuaaaaagagcaccaaccuggugaagaacaagugcgugaacuucaacuucaauggccugaccggcaccggcgugcugaccgagagcaacaagaaguuccugcccuuccagcaguucggccgggauaucgccgacaccaccgacgcagugcgggacccccagacccuggagauccuggacaucaccccaugcagcuucggcggcgugagcgucaucacccccggcacaaacaccagcaaccagguggccgugcuguaccagggagugaacugcaccgaggugcccguggccauccacgccgaccagcugacccccaccuggcggguguacagcaccggcagcaacguguuccagacccgggccggcugccugaucggcgccgagcacgugaacaacuccuacgagugcgacauccccaucggcgcuggcaucugcgccagcuaccagacccagaccaacagcccccggcgggcccggagcguggccagccagagcaucaucgccuacaccaugagcuuaggcgccgagaacagcguggccuacagcaacaacagcaucgcgaucccuaccaacuucaccaucagcgugaccaccgagauacugcccgugagcaugaccaagaccagcguggacuguaccauguacaucugcggcgacagcaccgagugcagcaaccugcugcugcaguacggcagcuucugcacccagcugaaccgggcccugaccggcaucgccguggagcaggacaagaacacccaagagguguucgcccaggugaagcagaucuacaagacucccccaaucaaggacuucggcggcuucaacuucagccagauccugcccgaccccagcaagcccagcaagcggagcuucaucgaggaccugcuguucaacaaggugacccuggccgacgccggcuucaucaagcaguacggcgacugccugggggauaucgccgcucgggaccugaucugcgcccagaaguucaacggccugaccgugcugcccccucugcugaccgacgagaugaucgcccaguacaccagcgcccugcuugccggcaccaucaccagcggcuggaccuucggcgccggcgcagcccugcagauccccuucgccaugcagauggccuaccgguucaacggcaucggcgugacccagaacgugcuguacgagaaccagaagcugaucgccaaccaguucaacagcgccaucggcaagauccaggacagccugagcagcaccgccagcgcccugggcaagcugcaggacguggugaaccagaacgcucaggcccugaacacccuggugaagcagcugagcagcaacuucggcgccaucagcucagugcugaacgacauccugagcaggcuggaucccccagaggccgaggugcagaucgaccggcugaucaccggccggcugcagagccugcagaccuacgugacccagcagcugauccgggccgccgagauccgggccagcgccaaucuggcagccaccaagaugagcgagugcgugcugggccagagcaagcggguggacuuuugcggcaagggcuaccaccugaugagcuucccccagagcgcuccccacggcgugguguuccuccacgugacauacguccccgcccaggagaagaacuucaccaccgcccccgccauuugccacgacggcaaggcccacuucccccgggagggaguguucgugagcaacggcacccacugguucgugacccagcggaacuucuacgagccucagaucaucaccaccgacaacaccuucgugagcggcaacugcgacguggugaucggcaucgugaacaacaccguguacgacccccugcagcccgagcuggacagcuucaaggaggagcuggacaaguacuucaagaaccacaccagcccagacguggaccugggcgacaucagcggcaucaacgccagcguggugaacauccagaaggagaucgaccggcugaacgagguggccaagaaccugaacgagagccugaucgaccugcaggagcugggcaaguacgagcaguacaucaaguggcccugguacaucuggcugggcuucaucgccggccugaucgccaucgugauggugaccaucaugcugugcugcaugaccagcugcuguagcugccugaagggcugcugcagcugcggcagcugcugcaaguucgacgaggacgacagcgagcccgugcugaagggcgugaagcugcacuacaccuga

SEQ ID NO: 23137 - RNA, 3816 nt, Artificial Sequence
  SARS-CoV-2/Wuhan/WIV05/2019__EPI_ISL_402128 spike protein CDS gc (1-1273)(K986P_V987P_H69del_V70del_D614G)
auguucguguuccuggugcugcugccccuggugagcagccagugcgugaaccugaccacccggacccagcugcccccugccuacaccaacagcuucacccggggcguguacuaccccgacaagguguuccggagcagcgugcugcacagcacccaggaccuguuccugcccuucuucagcaacgugaccugguuccacgccaucagcggcaccaacggcaccaagcgguucgacaacccagugcugcccuucaacgacggcguguacuucgccagcaccgagaagucaaacaucauccggggcuggaucuucggcaccacccuggacagcaagacacagagccugcugaucgugaacaacgccaccaacguggugaucaaggugugcgaguuucaguucugcaacgaccccuuccugggcguguacuaccacaagaacaacaagagcuggauggagagcgaguuccggguguacagcagcgcuaacaauugcaccuucgaguacgucagccagcccuuccugauggaccucgagggcaagcagggcaacuucaagaaccugcgggaguucguguucaagaacaucgauggcuacuucaagaucuacagcaagcacacccccaucaaccuggugcgggaccugccccagggauucagcgcccuggagccucugguggaccugcccaucggcaucaacaucaccagguuccagacccugcuggcccugcaccggagcuaccugacccccggcgacagcagcagcggcuggaccgccggcgccgccgcauacuacgugggcuaccugcagccacggaccuuccugcugaaguacaacgagaacggcaccaucaccgacgccguggacugcgcccuggacccccugagcgagaccaagugcacccuaaagagcuucaccguggagaagggcaucuaccagaccagcaacuuccgggugcagcccacugagagcaucgugcgguuccccaacauuaccaaccugugucccuucggcgagguguucaacgccacccgguucgccagcguguacgccuggaaccggaagcggaucagcaacugcguggccgacuacagcgugcuguacaacagcgccagcuucagcaccuucaagugcuacggcgugagcccuaccaagcugaacgaccugugcuucaccaacguguacgcugacagcuucgugauccggggcgacgaggugcggcagaucgcccccggccagaccggcaagaucgccgacuacaacuacaagcugcccgacgacuucaccggcugcgugaucgccuggaacagcaacaaccuggacagcaaggugggcggcaacuacaacuaccuguaccggcuguuccguaagagcaaccugaagccauucgagcgggacaucagcaccgagaucuaccaggccggcagcacccccugcaacgguguggagggcuuuaacugcuacuucccccugcagagcuacggcuuccagcccaccaacggcgugggcuaccagcccuaccgggugguggugcugagcuucgagcugcugcacgcccccgccaccgugugcggcccuaaaaagagcaccaaccuggugaagaacaagugcgugaacuucaauuucaacggccugaccggcaccggcgugcugaccgagagcaacaagaaguuccugcccuuccagcaguucggccgggauaucgccgacaccaccgacgcagugcgggacccccagacccuggagauccuggacaucaccccaugcagcuucggcggcgugagcgugaucacccccggcacaaacaccagcaaccaggucgccgugcuguaccagggagugaacugcaccgaggugcccguggccauccacgccgaccagcugacccccaccuggcggguguacagcaccggcagcaacguguuccagacccgggccggcugccugaucggcgccgagcacgugaacaacuccuacgagugcgacauccccaucggcgcuggcaucugcgccagcuaccagacccagaccaacagcccccggcgggcccggagcguggccagccagagcaucaucgccuacaccaugagcuuaggcgccgagaacagcguggccuacagcaacaacagcaucgcgaucccuaccaacuucaccaucagcgugaccaccgagauacugcccgugagcaugaccaagaccagcguggacuguaccauguacaucugcggcgacagcaccgagugcagcaaccugcugcugcaguacggcagcuucugcacccagcugaaccgggcccugaccggcaucgccguggagcaggacaagaacacccaagagguguucgcccaggugaagcagaucuacaagacucccccaaucaaggacuucggcggcuucaacuucagccagauccugcccgaccccagcaagcccagcaagcggagcuucaucgaggaccugcuguucaacaaggugacccuggccgacgccggcuucaucaagcaguacggcgacugccugggggauaucgccgcucgggaccugaucugcgcccagaaguucaacggccugaccgugcugcccccucugcugaccgacgagaugaucgcccaguacaccagcgcccugcuugccggcaccaucaccagcggcuggaccuucggcgccggcgcagcccugcagauccccuucgccaugcagauggccuaccgguucaacggcaucggcgugacccagaacgugcuguacgagaaccagaagcugaucgccaaccaguucaacagcgccaucggcaagauccaggacagccugagcagcaccgccagcgcccugggcaagcugcaggacguggugaaccagaacgcucaggcccugaacacccuggugaagcagcugagcagcaacuucggcgccaucagcucagugcugaaugacauccugagcaggcuggaucccccagaggccgaggugcagaucgaccggcugaucaccggccggcugcagagccugcagaccuacgugacccagcagcugauccgggccgccgagauccgggccagcgccaaccuggcagccaccaagaugagcgagugcgugcugggccagagcaagcggguggacuuuugcggcaagggcuaccaccugaugagcuucccccagagcgcuccccacggcgugguguuccuccacgugacauacgugcccgcccaggagaagaacuucaccaccgcccccgccauuugccacgacggcaaggcccacuucccccgggagggagucuucgugagcaacggcacccacugguucgugacccagcggaacuucuacgagccucagaucaucaccaccgacaacaccuucgugagcggcaacugcgacguggugaucggcaucgugaacaacaccguguacgacccccugcagcccgagcuggacagcuucaaggaggagcuggacaaguacuucaagaaccacaccagcccagacguggaccugggcgacaucagcggcaucaacgccagcguggugaacauccagaaggagaucgaccggcugaacgagguggccaagaaccugaacgagagccugaucgaccugcaggagcugggcaaguacgagcaguacaucaaguggcccugguacaucuggcugggcuucaucgccggccugaucgccaucgugauggugaccaucaugcugugcugcaugaccagcugcuguagcugccugaagggcugcugcagcugcggcagcugcugcaaguucgacgaggacgacagcgagcccgugcugaagggcgugaagcugcacuacaccuga

SEQ ID NO: 23138 - RNA, 3822 nt, Artificial Sequence
  SARS-CoV-2/Wuhan/WIV05/2019__EPI_ISL_402128 spike protein CDS gc (1-1273)(K986P_V987P_Y453F_D614G)
auguucguguuccuggugcugcugccccuggugagcagccagugcgugaaccugaccacccggacccagcugcccccugccuacaccaacagcuucacccggggcguguacuaccccgacaagguguuccggagcagcgugcugcacagcacccaggaccuguuccugcccuucuucagcaacgugaccugguuccacgccauccacgugagcggcaccaacggcaccaagcgguucgacaacccagugcugcccuucaacgacggcguguacuucgccagcaccgagaagucaaacaucauccggggcuggaucuucggcaccacccuggacagcaagacacagagccugcugaucgugaacaacgccaccaacguggugaucaaggugugcgaguuucaguucugcaacgaccccuuccugggcguguacuaccacaagaacaacaagagcuggauggagagcgaguuccgggucuacagcagcgcuaacaauugcaccuucgaguacgugagccagcccuuccugauggaccucgagggcaagcagggcaacuucaagaaccugcgggaguucguguucaagaacaucgauggcuacuucaagaucuacagcaagcacacccccaucaaccuggugcgggaccugccccagggauucagcgcccuggagccucugguggaccugcccaucggcaucaacaucaccagguuccagacccugcuggcccugcaccggagcuaccugacccccggcgacagcagcagcggcuggaccgccggcgccgccgcauacuacgugggcuaccugcagccacggaccuuccugcugaaguacaacgagaacggcaccaucaccgacgccguggacugcgcccuggacccccugagcgagaccaagugcacccuaaagagcuucaccguggagaagggcaucuaccagaccagcaacuuccgggugcagcccacugagagcaucgugcgguuccccaacauuaccaaccugugucccuucggcgagguguucaacgccacccgguucgccagcguguacgccuggaaccggaagcggaucagcaacugcguggccgacuacagcgugcuguacaacagcgccagcuucagcaccuucaagugcuacggcgugagcccuaccaagcugaacgaccugugcuucaccaacguguacgcugacagcuucgugauccggggcgacgaggugcggcagaucgcccccggccagaccggcaagaucgccgacuacaacuacaagcugcccgacgacuucaccggcugcgugaucgccuggaacagcaacaaccuggacagcaaggugggcggcaacuacaacuaccuguuccggcuguuccguaagagcaaccugaagccauuugagcgggacaucagcaccgagaucuaccaggccggcagcacccccugcaacgguguggagggcuucaacugcuacuucccccugcagagcuacggcuuccagcccaccaacggcgugggcuaccagcccuaccgggugguggugcugagcuucgagcugcugcacgcccccgccaccgugugcggcccuaaaaagagcaccaaccuggugaagaacaagugcgugaacuucaauuucaacggccugaccggcaccggcgugcugaccgagagcaacaagaaguuccugcccuuccagcaguucggccgggauaucgccgacaccaccgacgcagugcgggacccccagacccuggagauccuggacaucaccccaugcagcuucggcggcgugagcgucaucacccccggcacaaacaccagcaaccagguggccgugcuguaccagggagugaacugcaccgaggugcccguggccauccacgccgaccagcugacccccaccuggcggguguacagcaccggcagcaacguguuccagacccgggccggcugccugaucggcgccgagcacgugaacaacuccuacgagugcgacauccccaucggcgcuggcaucugcgccagcuaccagacccagaccaacagcccccggcgggcccggagcguggccagccagagcaucaucgccuacaccaugagcuuaggcgccgagaacagcguggccuacagcaacaacagcaucgcgaucccuaccaacuucaccaucagcgugaccaccgagauacugcccgugagcaugaccaagaccagcguggacuguaccauguacaucugcggcgacagcaccgagugcagcaaccugcugcugcaguacggcagcuucugcacccagcugaaccgggcccugaccggcaucgccguggagcaggacaagaacacccaagagguguucgcccaggugaagcagaucuacaagacucccccaaucaaggacuucggcggcuucaacuucagccagauccugcccgaccccagcaagcccagcaagcggagcuucaucgaggaccugcuguucaacaaggugacccuggccgacgccggcuucaucaagcaguacggcgacugccugggggauaucgccgcucgggaccugaucugcgcccagaaguucaacggccugaccgugcugcccccucugcugaccgacgagaugaucgcccaguacaccagcgcccugcuugccggcaccaucaccagcggcuggaccuucggcgccggcgcagcccugcagauccccuucgccaugcagauggccuaccgguucaacggcaucggcgugacccagaacgugcuguacgagaaccagaagcugaucgccaaccaguucaacagcgccaucggcaagauccaggacagccugagcagcaccgccagcgcccugggcaagcugcaggacguggugaaccagaacgcucaggcccugaacacccuggugaagcagcugagcagcaacuuuggcgccaucagcucagugcugaaugacauccugagcaggcuggaucccccagaggccgaggugcagaucgaccggcugaucaccggccggcugcagagccugcagaccuacgugacccagcagcugauccgggccgccgagauccgggccagcgccaaccuggcagccaccaagaugagcgagugcgugcugggccagagcaagcggguggacuucugcggcaagggcuaccaccugaugagcuucccccagagcgcuccccacggcgugguguuccuccacgugacauacguccccgcccaggagaagaacuucaccaccgcccccgccauuugccacgacggcaaggcccacuucccccgggagggaguguucgugagcaacggcacccacugguucgugacccagcggaacuucuacgagccucagaucaucaccaccgacaacaccuucgugagcggcaacugcgacguggugaucggcaucgugaacaacaccguguacgacccccugcagcccgagcuggacagcuucaaggaggagcuggacaaguacuucaagaaccacaccagcccagacguggaccugggcgacaucagcggcaucaacgccagcguggugaacauccagaaggagaucgaccggcugaacgagguggccaagaaccugaacgagagccugaucgaccugcaggagcugggcaaguacgagcaguacaucaaguggcccugguacaucuggcugggcuucaucgccggccugaucgccaucgugauggugaccaucaugcugugcugcaugaccagcugcuguagcugccugaagggcugcugcagcugcggcagcugcugcaaguucgacgaggacgacagcgagcccgugcugaagggcgugaagcugcacuacaccuga

SEQ ID NO: 23139 - RNA, 3822 nt, Artificial Sequence
  SARS-CoV-2/Wuhan/WIV05/2019__EPI_ISL_402128 spike protein CDS gc (1-1273)(K986P_V987P_D614G_I692V)
auguucguguuccuggugcugcugccccuggugagcagccagugcgugaaccugaccacccggacccagcugcccccugccuacaccaacagcuucacccggggcguguacuaccccgacaagguguuccggagcagcgugcugcacagcacccaggaccuguuccugcccuucuucagcaacgugaccugguuccacgccauccacgugagcggcaccaacggcaccaagcgguucgacaacccagugcugcccuucaacgacggcguguacuucgccagcaccgagaagucaaacaucauccggggcuggaucuucggcaccacccuggacagcaagacacagagccugcugaucgugaacaacgccaccaacguggugaucaaggugugcgaguuucaguucugcaacgaccccuuccugggcguguacuaccacaagaacaacaagagcuggauggagagcgaguuccgggucuacagcagcgcuaacaauugcaccuucgaguacgugagccagcccuuccugauggaccucgagggcaagcagggcaacuucaagaaccugcgggaguucguguucaagaacaucgauggcuacuucaagaucuacagcaagcacacccccaucaaccuggugcgggaccugccccagggauucagcgcccuggagccucugguggaccugcccaucggcaucaacaucaccagguuccagacccugcuggcccugcaccggagcuaccugacccccggcgacagcagcagcggcuggaccgccggcgccgccgcauacuacgugggcuaccugcagccacggaccuuccugcugaaguacaacgagaacggcaccaucaccgacgccguggacugcgcccuggacccccugagcgagaccaagugcacccuaaagagcuucaccguggagaagggcaucuaccagaccagcaacuuccgggugcagcccacugagagcaucgugcgguuccccaacauuaccaaccugugucccuucggcgagguguucaacgccacccgguucgccagcguguacgccuggaaccggaagcggaucagcaacugcguggccgacuacagcgugcuguacaacagcgccagcuucagcaccuucaagugcuacggcgugagcccuaccaagcugaacgaccugugcuucaccaacguguacgcugacagcuucgugauccggggcgacgaggugcggcagaucgcccccggccagaccggcaagaucgccgacuacaacuacaagcugcccgacgacuucaccggcugcgugaucgccuggaacagcaacaaccuggacagcaaggugggcggcaacuacaacuaccuguaccggcuguuccguaagagcaaccugaagccauucgagcgggacaucagcaccgagaucuaccaggccggcagcacccccugcaacgguguggagggcuuuaacugcuacuucccccugcagagcuacggcuuccagcccaccaacggcgugggcuaccagcccuaccgggugguggugcugagcuucgagcugcugcacgcccccgccaccgugugcggcccuaaaaagagcaccaaccuggugaagaacaagugcgugaacuucaauuucaacggccugaccggcaccggcgugcugaccgagagcaacaagaaguuccugcccuuccagcaguucggccgggauaucgccgacaccaccgacgcagugcgggacccccagacccuggagauccuggacaucaccccaugcagcuucggcggcgugagcgucaucacccccggcacaaacaccagcaaccagguggccgugcuguaccagggagugaacugcaccgaggugcccguggccauccacgccgaccagcugacccccaccuggcggguguacagcaccggcagcaacguguuccagacccgggccggcugccugaucggcgccgagcacgugaacaacuccuacgagugcgacauccccaucggcgcuggcaucugcgccagcuaccagacccagaccaacagcccccggcgggcccggagcguggccagccagagcgugaucgccuacaccaugagcuuaggcgccgagaacagcguggccuacagcaacaacagcaucgcgaucccuaccaacuucaccaucagcgugaccaccgagauccugcccgugagcaugaccaagaccagcguggacuguaccauguacauaugcggcgacagcaccgagugcagcaaccugcugcugcaguacggcagcuucugcacccagcugaaccgggcccugaccggcaucgccguggagcaggacaagaacacccaagagguguucgcccaggugaagcagaucuacaagacucccccaaucaaggacuucggcggcuucaacuucagccagauccugcccgaccccagcaagcccagcaagcggagcuucaucgaggaccugcuguucaacaaggugacccuggccgacgccggcuucaucaagcaguacggcgacugccugggggauaucgccgcucgggaccugaucugcgcccagaaguucaacggccugaccgugcugcccccucugcugaccgacgagaugaucgcccaguacaccagcgcccugcuugccggcaccaucaccagcggcuggaccuucggcgccggcgcagcccugcagauccccuucgccaugcagauggccuaccgguucaacggcaucggcgugacccagaacgugcuguacgagaaccagaagcugaucgccaaccaguucaacagcgccaucggcaagauccaggacagccugagcagcaccgccagcgcccugggcaagcugcaggacguggugaaccagaacgcucaggcccugaacacccuggugaagcagcugagcagcaacuucggcgccaucagcucagugcugaaugacauccugagcaggcuggaucccccagaggccgaggugcagaucgaccggcugaucaccggccggcugcagagccugcagaccuacgugacccagcagcugauccgggccgccgagauccgggccagcgccaaccuggcagccaccaagaugagcgagugcgugcugggccagagcaagcggguggacuuuugcggcaagggcuaccaccugaugagcuucccccagagcgcuccccacggcgugguguuccuccacgucacauacgugcccgcccaggagaagaacuucaccaccgcccccgccaucugccacgacggcaaggcccacuucccccgggagggaguguucgugagcaacggcacccacugguucgugacccagcggaacuucuacgagccucagauuaucaccaccgacaacaccuucgugagcggcaacugcgacguggugaucggcaucgugaacaacaccguguacgacccccugcagcccgagcuggacagcuucaaggaggagcuggacaaguacuucaagaaccacaccagcccagacguggaccugggcgacaucagcggcaucaacgccagcguggugaacauccagaaggagaucgaccggcugaacgagguggccaagaaccugaacgagagccugaucgaccugcaggagcugggcaaguacgagcaguacaucaaguggcccugguacaucuggcugggcuucaucgccggccugaucgccaucgugauggugaccaucaugcugugcugcaugaccagcugcuguagcugccugaagggcugcugcagcugcggcagcugcugcaaguucgacgaggacgacagcgagcccgugcugaagggcgugaagcugcacuacaccuga

SEQ ID NO: 23140 - RNA, 3822 nt, Artificial Sequence
  SARS-CoV-2/Wuhan/WIV05/2019__EPI_ISL_402128 spike protein CDS gc (1-1273)(K986P_V987P_D614G_M1229I)
auguucguguuccuggugcugcugccccuggugagcagccagugcgugaaccugaccacccggacccagcugcccccugccuacaccaacagcuucacccggggcguguacuaccccgacaagguguuccggagcagcgugcugcacagcacccaggaccuguuccugcccuucuucagcaacgugaccugguuccacgccauccacgugagcggcaccaacggcaccaagcgguucgacaacccagugcugcccuucaacgacggcguguacuucgccagcaccgagaagucaaacaucauccggggcuggaucuucggcaccacccuggacagcaagacacagagccugcugaucgugaacaacgccaccaacguggugaucaaggugugcgaguuucaguucugcaacgaccccuuccugggcguguacuaccacaagaacaacaagagcuggauggagagcgaguuccgggucuacagcagcgcuaacaauugcaccuucgaguacgugagccagcccuuccugauggaccucgagggcaagcagggcaacuucaagaaccugcgggaguucguguucaagaacaucgauggcuacuucaagaucuacagcaagcacacccccaucaaccuggugcgggaccugccccagggauucagcgcccuggagccucugguggaccugcccaucggcaucaacaucaccagguuccagacccugcuggcccugcaccggagcuaccugacccccggcgacagcagcagcggcuggaccgccggcgccgccgcauacuacgugggcuaccugcagccacggaccuuccugcugaaguacaacgagaacggcaccaucaccgacgccguggacugcgcccuggacccccugagcgagaccaagugcacccuaaagagcuucaccguggagaagggcaucuaccagaccagcaacuuccgggugcagcccacugagagcaucgugcgguuccccaacauuaccaaccugugucccuucggcgagguguucaacgccacccgguucgccagcguguacgccuggaaccggaagcggaucagcaacugcguggccgacuacagcgugcuguacaacagcgccagcuucagcaccuucaagugcuacggcgugagcccuaccaagcugaacgaccugugcuucaccaacguguacgcugacagcuucgugauccggggcgacgaggugcggcagaucgcccccggccagaccggcaagaucgccgacuacaacuacaagcugcccgacgacuucaccggcugcgugaucgccuggaacagcaacaaccuggacagcaaggugggcggcaacuacaacuaccuguaccggcuguuccguaagagcaaccugaagccauucgagcgggacaucagcaccgagaucuaccaggccggcagcacccccugcaacgguguggagggcuuuaacugcuacuucccccugcagagcuacggcuuccagcccaccaacggcgugggcuaccagcccuaccgggugguggugcugagcuucgagcugcugcacgcccccgccaccgugugcggcccuaaaaagagcaccaaccuggugaagaacaagugcgugaacuucaauuucaacggccugaccggcaccggcgugcugaccgagagcaacaagaaguuccugcccuuccagcaguucggccgggauaucgccgacaccaccgacgcagugcgggacccccagacccuggagauccuggacaucaccccaugcagcuucggcggcgugagcgucaucacccccggcacaaacaccagcaaccagguggccgugcuguaccagggagugaacugcaccgaggugcccguggccauccacgccgaccagcugacccccaccuggcggguguacagcaccggcagcaacguguuccagacccgggccggcugccugaucggcgccgagcacgugaacaacuccuacgagugcgacauccccaucggcgcuggcaucugcgccagcuaccagacccagaccaacagcccccggcgggcccggagcguggccagccagagcaucaucgccuacaccaugagcuuaggcgccgagaacagcguggccuacagcaacaacagcaucgcgaucccuaccaacuucaccaucagcgugaccaccgagauacugcccgugagcaugaccaagaccagcguggacuguaccauguacaucugcggcgacagcaccgagugcagcaaccugcugcugcaguacggcagcuucugcacccagcugaaccgggcccugaccggcaucgccguggagcaggacaagaacacccaagagguguucgcccaggugaagcagaucuacaagacucccccaaucaaggacuucggcggcuucaacuucagccagauccugcccgaccccagcaagcccagcaagcggagcuucaucgaggaccugcuguucaacaaggugacccuggccgacgccggcuucaucaagcaguacggcgacugccugggggauaucgccgcucgggaccugaucugcgcccagaaguucaacggccugaccgugcugcccccucugcugaccgacgagaugaucgcccaguacaccagcgcccugcuugccggcaccaucaccagcggcuggaccuucggcgccggcgcagcccugcagauccccuucgccaugcagauggccuaccgguucaacggcaucggcgugacccagaacgugcuguacgagaaccagaagcugaucgccaaccaguucaacagcgccaucggcaagauccaggacagccugagcagcaccgccagcgcccugggcaagcugcaggacguggugaaccagaacgcucaggcccugaacacccuggugaagcagcugagcagcaacuucggcgccaucagcucagugcugaaugacauccugagcaggcuggaucccccagaggccgaggugcagaucgaccggcugaucaccggccggcugcagagccugcagaccuacgugacccagcagcugauccgggccgccgagauccgggccagcgccaaccuggcagccaccaagaugagcgagugcgugcugggccagagcaagcggguggacuuuugcggcaagggcuaccaccugaugagcuucccccagagcgcuccccacggcgugguguuccuccacgugacauacguccccgcccaggagaagaacuucaccaccgcccccgccauuugccacgacggcaaggcccacuucccccgggagggaguguucgugagcaacggcacccacugguucgugacccagcggaacuucuacgagccucagaucaucaccaccgacaacaccuucgugagcggcaacugcgacguggugaucggcaucgugaacaacaccguguacgacccccugcagcccgagcuggacagcuucaaggaggagcuggacaaguacuucaagaaccacaccagcccagacguggaccugggcgacaucagcggcaucaacgccagcguggugaacauccagaaggagaucgaccggcugaacgagguggccaagaaccugaacgagagccugaucgaccugcaggagcugggcaaguacgagcaguacaucaaguggcccugguacaucuggcugggcuucaucgccggccugaucgccaucgugaucgugaccaucaugcugugcugcaugaccagcugcuguagcugccugaagggcugcugcagcugcggcagcugcugcaaguucgacgaggacgacagcgagcccgugcugaagggcgugaagcugcacuacaccuga

SEQ ID NO: 23141 - RNA, 3816 nt, Artificial Sequence
  SARS-CoV-2/Wuhan/WIV05/2019__EPI_ISL_402128 spike protein CDS gc (1-1273)(K986P_V987P_H69del_V70del_A222V_Y453F_S477N_D614G_I692V)
auguucguguuccuggugcugcugccccuggugagcagccagugcgugaaccugaccacccggacccagcugcccccugccuacaccaacagcuucacccggggcguguacuaccccgacaagguguuccggagcagcgugcugcacagcacccaggaccuguuccugcccuucuucagcaacgugaccugguuccacgccaucagcggcaccaacggcaccaagcgguucgacaacccagugcugcccuucaacgacggcguguacuucgccagcaccgagaagucaaacaucauccggggcuggaucuucggcaccacccuggacagcaagacacagagccugcugaucgugaacaacgccaccaacguggugaucaaggugugcgaguuucaguucugcaacgaccccuuccugggcguguacuaccacaagaacaacaagagcuggauggagagcgaguuccggguguacagcagcgcuaacaauugcaccuucgaguacgucagccagcccuuccugauggaccucgagggcaagcagggcaacuucaagaaccugcgggaguucguguucaagaacaucgauggcuacuucaagaucuacagcaagcacacccccaucaaccuggugcgggaccugccccagggauucagcgugcuggagccucugguggaccugcccaucggcaucaacaucaccagguuccagacccugcuggcccugcaccggagcuaccugacccccggcgacagcagcagcggcuggaccgccggcgccgccgccuacuacgugggcuaccugcagccacggaccuuccugcugaaguacaacgagaacggcaccaucaccgacgcaguggacugcgcccuggacccccugagcgagaccaagugcacccuaaagagcuucaccguggagaagggcaucuaccagaccagcaacuuccgggugcagcccacugagagcaucgugcgguuccccaacauuaccaaccugugucccuucggcgagguguucaacgccacccgguucgccagcguguacgccuggaaccggaagcggaucagcaacugcguggccgacuacagcgugcuguacaacagcgccagcuucagcaccuucaagugcuacggcgugagcccuaccaagcugaacgaccugugcuucaccaacguguacgccgacagcuucgugauccggggcgacgaggugcggcagaucgcucccggccagaccggcaagaucgccgacuacaacuacaagcugcccgacgacuucaccggcugcgugaucgccuggaacagcaacaaccuggacagcaaggugggcggcaacuacaacuaccuguuccggcuguuccguaagagcaaccugaagccauuugagcgggacaucagcaccgagaucuaccaggccggcaacacccccugcaacgguguggagggcuucaacugcuacuucccccugcagagcuacggcuuccagcccaccaacggcgugggcuaccagcccuaccgggugguggugcugagcuucgagcugcugcacgcccccgccaccgugugcggcccuaaaaagagcaccaaccuggugaagaacaagugcgugaauuucaacuucaacggccugaccggcaccggcgugcugaccgagagcaacaagaaguuccugcccuuccagcaguucggccgggauaucgccgacaccaccgacgccgugcgggacccccagacccuggagauccuggacaucaccccaugcagcuucggcggcgugagcgucaucacccccggcacaaacaccagcaaccagguggcagugcuguaccagggagugaacugcaccgaggugcccguggccauccacgccgaccagcugacccccaccuggcggguguacagcaccggcagcaacguguuccagacccgggccggcugccugaucggcgccgagcacgugaacaacagcuacgagugcgacauccccaucggcgccggcaucugcgcuuccuaccagacccagaccaacagcccccggcgggcccggagcguggccagccagagcgugaucgccuacaccaugagcuuaggcgccgagaacagcguggccuacagcaacaacagcaucgccaucccuaccaacuucaccaucagcgugaccaccgagauccugcccgugagcaugaccaagaccagcguggacuguaccauguacauaugcggcgacagcaccgagugcagcaaccugcugcugcaguacggcagcuucugcacccagcugaaccgggcgcugaccggcaucgccguggagcaggacaagaacacccaagagguguucgcccaggugaagcagaucuacaagacucccccaaucaaggacuucggcggcuucaacuucagccagauccugcccgaccccagcaagcccagcaagcggagcuucaucgaggaccugcuguucaacaaggugacccuggccgacgccggcuucaucaagcaguacggcgacugccugggggauaucgccgcccgggaccugaucugcgcucagaaguucaacggccugaccgugcugcccccucugcugaccgacgagaugaucgcccaguacaccagcgcccugcuugccggcaccaucaccagcggcuggaccuucggcgccggcgccgcacugcagauccccuucgccaugcagauggccuaccgguucaacggcaucggcgugacccagaacgugcuguacgagaaccagaagcugaucgccaaccaguucaacagcgccaucggcaagauccaggacagccugagcagcaccgccagcgcccugggcaagcugcaggacguggugaaccagaacgcccaggcucugaacacccuggugaagcagcugagcagcaauuuuggcgccaucagcagcgugcugaacgacauccugucaaggcuggaucccccagaggccgaggugcagaucgaccggcugaucaccggccggcugcagagccugcagaccuacgugacccagcagcugauccgggccgccgagauccgggccagcgccaaccuggccgcaaccaagaugagcgagugcgugcugggccagagcaagcggguggacuucugcggcaagggcuaccaccugaugagcuucccccagagcgcuccccacggcgugguguuccuccacgucacauacgugcccgcccaggagaagaacuucaccaccgcccccgccaucugccacgacggcaaggcccacuucccccgggagggaguguucgugagcaacggcacccacugguucgugacccagcggaacuucuacgagccucagauuaucaccaccgacaacaccuucgugagcggcaacugcgacguggugaucggcaucgugaacaacaccguguacgacccccugcagcccgagcuggacagcuucaaggaggagcuggacaaguacuucaagaaccacaccagcccagacguggaccugggcgacaucagcggcaucaacgccagcguggugaacauccagaaggagaucgaccggcugaacgagguggccaagaaccugaacgagagccugaucgaccugcaggagcugggcaaguacgagcaguacaucaaguggcccugguacaucuggcugggcuucaucgccggccugaucgccaucgugauggugaccaucaugcugugcugcaugaccagcugcuguagcugccugaagggcugcugcagcugcggcagcugcugcaaguucgacgaggacgacagcgagcccgugcugaagggcgugaagcugcacuacaccuga

SEQ ID NO: 23142 - RNA, 3816 nt, Artificial Sequence
  SARS-CoV-2/Wuhan/WIV05/2019__EPI_ISL_402128 spike protein CDS gc (1-1273)(K986P_V987P_H69del_V70del_Y453F_D614G_I692V_M1229I)
auguucguguuccuggugcugcugccccuggugagcagccagugcgugaaccugaccacccggacccagcugcccccugccuacaccaacagcuucacccggggcguguacuaccccgacaagguguuccggagcagcgugcugcacagcacccaggaccuguuccugcccuucuucagcaacgugaccugguuccacgccaucagcggcaccaacggcaccaagcgguucgacaacccagugcugcccuucaacgacggcguguacuucgccagcaccgagaagucaaacaucauccggggcuggaucuucggcaccacccuggacagcaagacacagagccugcugaucgugaacaacgccaccaacguggugaucaaggugugcgaguuucaguucugcaacgaccccuuccugggcguguacuaccacaagaacaacaagagcuggauggagagcgaguuccggguguacagcagcgcuaacaauugcaccuucgaguacgucagccagcccuuccugauggaccucgagggcaagcagggcaacuucaagaaccugcgggaguucguguucaagaacaucgauggcuacuucaagaucuacagcaagcacacccccaucaaccuggugcgggaccugccccagggauucagcgcccuggagccucugguggaccugcccaucggcaucaacaucaccagguuccagacccugcuggcccugcaccggagcuaccugacccccggcgacagcagcagcggcuggaccgccggcgccgccgcauacuacgugggcuaccugcagccacggaccuuccugcugaaguacaacgagaacggcaccaucaccgacgccguggacugcgcccuggacccccugagcgagaccaagugcacccuaaagagcuucaccguggagaagggcaucuaccagaccagcaacuuccgggugcagcccacugagagcaucgugcgguuccccaacauuaccaaccugugucccuucggcgagguguucaacgccacccgguucgccagcguguacgccuggaaccggaagcggaucagcaacugcguggccgacuacagcgugcuguacaacagcgccagcuucagcaccuucaagugcuacggcgugagcccuaccaagcugaacgaccugugcuucaccaacguguacgcugacagcuucgugauccggggcgacgaggugcggcagaucgcccccggccagaccggcaagaucgccgacuacaacuacaagcugcccgacgacuucaccggcugcgugaucgccuggaacagcaacaaccuggacagcaaggugggcggcaacuacaacuaccuguuccggcuguuccguaagagcaaccugaagccauuugagcgggacaucagcaccgagaucuaccaggccggcagcacccccugcaacgguguggagggcuucaacugcuacuucccccugcagagcuacggcuuccagcccaccaacggcgugggcuaccagcccuaccgggugguggugcugagcuucgagcugcugcacgcccccgccaccgugugcggcccuaaaaagagcaccaaccuggugaagaacaagugcgugaacuucaauuucaacggccugaccggcaccggcgugcugaccgagagcaacaagaaguuccugcccuuccagcaguucggccgggauaucgccgacaccaccgacgcagugcgggacccccagacccuggagauccuggacaucaccccaugcagcuucggcggcgugagcgugaucacccccggcacaaacaccagcaaccaggucgccgugcuguaccagggagugaacugcaccgaggugcccguggccauccacgccgaccagcugacccccaccuggcggguguacagcaccggcagcaacguguuccagacccgggccggcugccugaucggcgccgagcacgugaacaacuccuacgagugcgacauccccaucggcgcuggcaucugcgccagcuaccagacccagaccaacagcccccggcgggcccggagcguggccagccagagcgugaucgccuacaccaugagcuuaggcgccgagaacagcguggccuacagcaacaacagcaucgcgaucccuaccaacuucaccaucagcgugaccaccgagauccugcccgugagcaugaccaagaccagcguggacuguaccauguacauaugcggcgacagcaccgagugcagcaaccugcugcugcaguacggcagcuucugcacccagcugaaccgggcccugaccggcaucgccguggagcaggacaagaacacccaagagguguucgcccaggugaagcagaucuacaagacucccccaaucaaggacuucggcggcuucaacuucagccagauccugcccgaccccagcaagcccagcaagcggagcuucaucgaggaccugcuguucaacaaggugacccuggccgacgccggcuucaucaagcaguacggcgacugccugggggauaucgccgcucgggaccugaucugcgcccagaaguucaacggccugaccgugcugcccccucugcugaccgacgagaugaucgcccaguacaccagcgcccugcuugccggcaccaucaccagcggcuggaccuucggcgccggcgcagcccugcagauccccuucgccaugcagauggccuaccgguucaacggcaucggcgugacccagaacgugcuguacgagaaccagaagcugaucgccaaccaguucaacagcgccaucggcaagauccaggacagccugagcagcaccgccagcgcccugggcaagcugcaggacguggugaaccagaacgcucaggcccugaacacccuggugaagcagcugagcagcaacuuuggcgccaucagcucagugcugaaugacauccugagcaggcuggaucccccagaggccgaggugcagaucgaccggcugaucaccggccggcugcagagccugcagaccuacgugacccagcagcugauccgggccgccgagauccgggccagcgccaaccuggcagccaccaagaugagcgagugcgugcugggccagagcaagcggguggacuucugcggcaagggcuaccaccugaugagcuucccccagagcgcuccccacggcgugguguuccuccacgugacauacguccccgcccaggagaagaacuucaccaccgcccccgccaucugccacgacggcaaggcccacuucccccgggagggaguguucgugagcaacggcacccacugguucgugacccagcggaacuucuacgagccucagauuaucaccaccgacaacaccuucgugagcggcaacugcgacguggugaucggcaucgugaacaacaccguguacgacccccugcagcccgagcuggacagcuucaaggaggagcuggacaaguacuucaagaaccacaccagcccagacguggaccugggcgacaucagcggcaucaacgccagcguggugaacauccagaaggagaucgaccggcugaacgagguggccaagaaccugaacgagagccugaucgaccugcaggagcugggcaaguacgagcaguacaucaaguggcccugguacaucuggcugggcuucaucgccggccugaucgccaucgugaucgugaccaucaugcugugcugcaugaccagcugcuguagcugccugaagggcugcugcagcugcggcagcugcugcaaguucgacgaggacgacagcgagcccgugcugaagggcgugaagcugcacuacaccuga

SEQ ID NO: 23143 - RNA, 3813 nt, Artificial Sequence
  SARS-CoV-2/Wuhan/WIV05/2019__EPI_ISL_402128 spike protein CDS gc (1-1273)(K986P_V987P_K986P_V987P_H69del_V70del_Y144del_N501Y_A570 D_D614G_P681H_T716I_S982A_D1118H)
auguucguguuccuggugcugcugccccuggugagcagccagugcgugaaccugaccacccggacccagcugcccccugccuacaccaacagcuucacccggggcguguacuaccccgacaagguguuccggagcagcgugcugcacagcacccaggaccuguuccugcccuucuucagcaacgugaccugguuccacgccaucagcggcaccaacggcaccaagcgguucgacaacccagugcugcccuucaacgacggcguguacuucgccagcaccgagaagucaaacaucauccggggcuggaucuucggcaccacccuggacagcaagacacagagccugcugaucgugaacaacgccaccaacguggugaucaaggugugcgaguuucaguucugcaacgaccccuuccugggcguguaccacaagaacaacaagagcuggauggagagcgaguuccggguguacagcagcgcuaacaauugcaccuucgaguacgucagccagcccuuccugauggaccucgagggcaagcagggcaacuucaagaaccugcgggaguucguguucaagaacaucgauggcuacuucaagaucuacagcaagcacacccccaucaaccuggugcgggaccugccccagggauucagcgcccuggagccucugguggaccugcccaucggcaucaacaucaccagguuccagacccugcuggcccugcaccggagcuaccugacccccggcgacagcagcagcggcuggaccgccggcgccgccgcauacuacgugggcuaccugcagccacggaccuuccugcugaaguacaacgagaacggcaccaucaccgacgccguggacugcgcccuggacccccugagcgagaccaagugcacccuaaagagcuucaccguggagaagggcaucuaccagaccagcaacuuccgggugcagcccacugagagcaucgugcgguuccccaacauuaccaaccugugucccuucggcgagguguucaacgccacccgguucgccagcguguacgccuggaaccggaagcggaucagcaacugcguggccgacuacagcgugcuguacaacagcgccagcuucagcaccuucaagugcuacggcgugagcccuaccaagcugaacgaccugugcuucaccaacguguacgcugacagcuucgugauccggggcgacgaggugcggcagaucgcccccggccagaccggcaagaucgccgacuacaacuacaagcugcccgacgacuucaccggcugcgugaucgccuggaacagcaacaaccuggacagcaaggugggcggcaacuacaacuaccuguaccggcuguuccguaagagcaaccugaagccauucgagcgggacaucagcaccgagaucuaccaggccggcagcacccccugcaacgguguggagggcuuuaacugcuacuucccccugcagagcuacggcuuccagcccaccuacggcgugggcuaccagcccuaccgggugguggugcugagcuucgagcugcugcacgcccccgccaccgugugcggcccuaaaaagagcaccaaccuggugaagaacaagugcgugaacuucaacuucaauggccugaccggcaccggcgugcugaccgagagcaacaagaaguuccugcccuuccagcaguucggccgggauaucgacgacaccaccgacgccgugcgggacccccagacccuggagauccuggacaucaccccaugcagcuucggcggcgugagcgugaucacccccggcacaaacaccagcaaccaggucgcagugcuguaccagggagugaacugcaccgaggugcccguggccauccacgccgaccagcugacccccaccuggcggguguacagcaccggcagcaacguguuccagacccgggccggcugccugaucggcgccgagcacgugaacaacuccuacgagugcgacauccccaucggcgccggcaucugcgcuagcuaccagacccagaccaacagccaccggcgggcccggagcguggccagccagagcaucaucgccuacaccaugagcuuaggcgccgagaacagcguggccuacagcaacaacagcaucgccauccccaucaacuucaccauaagcgugaccaccgagauccugccugugagcaugaccaagaccagcguggacuguaccauguacaucugcggcgacagcaccgagugcagcaaccugcugcugcaguacggcagcuucugcacccagcugaaccgggcgcugaccggcaucgccguggagcaggacaagaacacccaagagguguucgcccaggugaagcagaucuacaagaccccacccaucaaggacuucggcggcuucaacuucagccagauccugcccgaccccagcaagcccagcaagcggagcuucaucgaggaccugcuguucaacaaggugacucuggccgacgccggcuucaucaagcaguacggcgauugccugggggacaucgccgcccgggaccugaucugcgcucagaaguucaacggccugaccgugcugccuccccugcugaccgacgagaugaucgcccaguacaccagcgcccugcuugccggcaccaucaccagcggcuggaccuucggcgccggcgccgcacugcagauccccuucgccaugcagauggccuaccgguucaacggcaucggcgugacccagaacgugcuguacgagaaccagaagcugaucgccaaccaguucaacagcgccaucggcaagauccaggacagccugagcagcaccgccagcgcccugggcaagcugcaggacguggugaaccagaacgcccaggcucugaacacccuggugaagcagcugagcagcaacuucggcgccaucagcucagugcugaacgacauccuggccaggcuggacccacccgaggccgaggugcagaucgaccggcugaucaccggccggcugcagagccugcagaccuacgugacccagcagcugauccgggccgccgagauucgggccagcgccaaucuggcagccaccaagaugagcgagugcgugcugggccagagcaagcggguggacuuuugcggcaagggcuaccaccugaugagcuucccccagagcgcuccccacggcgugguguuccuccacgugaccuacgugcccgcccaggagaagaacuucacaaccgcccccgccaucugccacgacggcaaggcccacuucccccgggagggagucuucgugagcaacggcacccacugguucgugacccagcggaacuucuacgagccccagaucaucaccacccacaacaccuucgugagcggcaacugcgacguggugaucggcaucgugaacaacaccguguacgacccucugcagcccgagcuggacagcuucaaggaggagcuggacaaguacuucaagaaccacaccagccccgacguggaucugggcgacaucagcggcaucaacgccagcguggugaacauccagaaggagaucgaccggcugaacgagguggccaagaaccugaacgagagccugaucgaccugcaggagcugggcaaguacgagcaguacaucaaguggccaugguacaucuggcugggcuucaucgccggccugaucgccaucgugauggugaccaucaugcugugcugcaugaccagcugcuguagcugccugaagggcugcugcagcugcggcagcugcugcaaguucgacgaggacgacagcgagcccgugcugaagggcgugaagcugcacuacaccuga

SEQ ID NO: 23144 - RNA, 3822 nt, Artificial Sequence
  SARS-CoV-2/Wuhan/WIV05/2019__EPI_ISL_402128 spike protein CDS gc (1-1273)(K986P_V987P_K986P_V987P_K417N_E484K_N501Y_D614G)
auguucguguuccuggugcugcugccccuggugagcagccagugcgugaaccugaccacccggacccagcugcccccugccuacaccaacagcuucacccggggcguguacuaccccgacaagguguuccggagcagcgugcugcacagcacccaggaccuguuccugcccuucuucagcaacgugaccugguuccacgccauccacgugagcggcaccaacggcaccaagcgguucgacaacccagugcugcccuucaacgacggcguguacuucgccagcaccgagaagucaaacaucauccggggcuggaucuucggcaccacccuggacagcaagacacagagccugcugaucgugaacaacgccaccaacguggugaucaaggugugcgaguuucaguucugcaacgaccccuuccugggcguguacuaccacaagaacaacaagagcuggauggagagcgaguuccgggucuacagcagcgcuaacaauugcaccuucgaguacgugagccagcccuuccugauggaccucgagggcaagcagggcaacuucaagaaccugcgggaguucguguucaagaacaucgauggcuacuucaagaucuacagcaagcacacccccaucaaccuggugcgggaccugccccagggauucagcgcccuggagccucugguggaccugcccaucggcaucaacaucaccagguuccagacccugcuggcccugcaccggagcuaccugacccccggcgacagcagcagcggcuggaccgccggcgccgccgcauacuacgugggcuaccugcagccacggaccuuccugcugaaguacaacgagaacggcaccaucaccgacgccguggacugcgcccuggacccccugagcgagaccaagugcacccuaaagagcuucaccguggagaagggcaucuaccagaccagcaacuuccgggugcagcccacugagagcaucgugcgguuccccaacauuaccaaccugugucccuucggcgagguguucaacgccacccgguucgccagcguguacgccuggaaccggaagcggaucagcaacugcguggccgacuacagcgugcuguacaacagcgccagcuucagcaccuucaagugcuacggcgugagcccuaccaagcugaacgaccugugcuucaccaacguguacgcugacagcuucgugauccggggcgacgaggugcggcagaucgcccccggccagaccggcaacaucgccgacuacaacuacaagcugcccgacgacuucaccggcugcgugaucgccuggaacagcaacaaccuggacagcaaggugggcggcaacuacaacuaccuguaccggcuguuccguaagagcaaccugaagccauucgagcgggacaucagcaccgagaucuaccaggccggcagcacccccugcaacggugugaagggcuuuaacugcuacuucccccugcagagcuacggcuuccagcccaccuacggcgugggcuaccagcccuaccgggugguggugcugagcuucgagcugcugcacgcccccgccaccgugugcggcccuaaaaagagcaccaaccuggugaagaacaagugcgugaacuucaauuucaacggccugaccggcaccggcgugcugaccgagagcaacaagaaguuccugcccuuccagcaguucggccgggauaucgccgacaccaccgacgcagugcgggacccccagacccuggagauccuggacaucaccccaugcagcuucggcggcgugagcgucaucacccccggcacaaacaccagcaaccagguggccgugcuguaccagggagugaacugcaccgaggugcccguggccauccacgccgaccagcugacccccaccuggcggguguacagcaccggcagcaacguguuccagacccgggccggcugccugaucggcgccgagcacgugaacaacuccuacgagugcgacauccccaucggcgcuggcaucugcgccagcuaccagacccagaccaacagcccccggcgggcccggagcguggccagccagagcaucaucgccuacaccaugagcuuaggcgccgagaacagcguggccuacagcaacaacagcaucgcgaucccuaccaacuucaccaucagcgugaccaccgagauacugcccgugagcaugaccaagaccagcguggacuguaccauguacaucugcggcgacagcaccgagugcagcaaccugcugcugcaguacggcagcuucugcacccagcugaaccgggcccugaccggcaucgccguggagcaggacaagaacacccaagagguguucgcccaggugaagcagaucuacaagacucccccaaucaaggacuucggcggcuucaacuucagccagauccugcccgaccccagcaagcccagcaagcggagcuucaucgaggaccugcuguucaacaaggugacccuggccgacgccggcuucaucaagcaguacggcgacugccugggggauaucgccgcucgggaccugaucugcgcccagaaguucaacggccugaccgugcugcccccucugcugaccgacgagaugaucgcccaguacaccagcgcccugcuugccggcaccaucaccagcggcuggaccuucggcgccggcgcagcccugcagauccccuucgccaugcagauggccuaccgguucaacggcaucggcgugacccagaacgugcuguacgagaaccagaagcugaucgccaaccaguucaacagcgccaucggcaagauccaggacagccugagcagcaccgccagcgcccugggcaagcugcaggacguggugaaccagaacgcucaggcccugaacacccuggugaagcagcugagcagcaacuucggcgccaucagcucagugcugaaugacauccugagcaggcuggaucccccagaggccgaggugcagaucgaccggcugaucaccggccggcugcagagccugcagaccuacgugacccagcagcugauccgggccgccgagauccgggccagcgccaaccuggcagccaccaagaugagcgagugcgugcugggccagagcaagcggguggacuuuugcggcaagggcuaccaccugaugagcuucccccagagcgcuccccacggcgugguguuccuccacgugacauacguccccgcccaggagaagaacuucaccaccgcccccgccauuugccacgacggcaaggcccacuucccccgggagggaguguucgugagcaacggcacccacugguucgugacccagcggaacuucuacgagccucagaucaucaccaccgacaacaccuucgugagcggcaacugcgacguggugaucggcaucgugaacaacaccguguacgacccccugcagcccgagcuggacagcuucaaggaggagcuggacaaguacuucaagaaccacaccagcccagacguggaccugggcgacaucagcggcaucaacgccagcguggugaacauccagaaggagaucgaccggcugaacgagguggccaagaaccugaacgagagccugaucgaccugcaggagcugggcaaguacgagcaguacaucaaguggcccugguacaucuggcugggcuucaucgccggccugaucgccaucgugauggugaccaucaugcugugcugcaugaccagcugcuguagcugccugaagggcugcugcagcugcggcagcugcugcaaguucgacgaggacgacagcgagcccgugcugaagggcgugaagcugcacuacaccuga

SEQ ID NO: 23145 - RNA, 3813 nt, Artificial Sequence
  SARS-CoV-2/Wuhan/WIV05/2019__EPI_ISL_402128 spike protein CDS gc (1-1273)(K986P_V987P_K986P_V987P_L18F_D80A_D215G_L242del_A243del_ L244del_R246I_K417N_E484K_N501Y_D614G_A701V)
auguucguguuccuggugcugcugccccuggugagcagccagugcgugaacuucaccacccggacccagcugcccccugccuacaccaacagcuucacccggggcguguacuaccccgacaagguguuccggagcagcgugcugcacagcacccaggaccuguuccugcccuucuucagcaacgugaccugguuccacgccauccacgugagcggcaccaacggcaccaagcgguucgccaacccagugcugcccuucaacgacggcguguacuucgccagcaccgagaagucaaacaucauccggggcuggaucuuuggcaccacccuggacagcaagacacagagccugcugaucgugaacaacgcuaccaacguggugaucaaggugugcgaguuccaguucugcaacgaccccuuccugggcguguacuaccacaagaacaacaagagcuggauggagagcgaguuccgggucuacagcagcgccaacaauugcaccuucgaguacgugagccagcccuuccugauggaccuggagggcaagcagggcaacuucaagaaccuccgggaguucguguucaagaacaucgacggcuacuucaagaucuacagcaagcacacccccaucaaccuggugcggggacugccccagggcuucagcgcccuggagccucugguggaucugcccaucggcaucaacaucaccagguuccagacccugcacaucagcuaccugacccccggcgacagcagcagcggcuggaccgccggcgccgccgcauacuacgugggcuaccugcagccacggaccuuccugcugaaguacaacgagaacggcaccaucaccgacgccguggacugcgcccuggacccccugagcgagaccaagugcacccuuaagagcuucaccguggagaagggcaucuaccagaccagcaacuuccgggugcagcccacugagagcauugugcgguuccccaacaucaccaaccugugucccuucggcgagguguucaacgccacccgguucgccagcguguacgccuggaaccggaagcggaucagcaacugcguggccgacuacagcgugcuguacaacagcgccagcuucagcaccuucaagugcuacggcgugagcccuaccaagcugaacgaccugugcuucaccaacguguacgcugacagcuucgugauccggggcgacgaggugcggcagaucgcccccggccagaccggcaacaucgccgacuacaacuacaagcugcccgacgacuucaccggcugcgugaucgccuggaacagcaacaaccuggacagcaaggugggcggcaacuacaacuaccuguaccggcuauuccguaagagcaaccugaagccauuugagcgggacaucagcaccgagaucuaccaggccgguagcacccccugcaacggcgugaagggcuucaacugcuacuucccccugcagagcuacggcuuccagcccaccuacggcgugggcuaccagcccuaccgggugguggugcugagcuucgagcugcugcacgcccccgccaccgugugcggcccuaaaaagagcaccaaccuggugaagaacaagugcgugaacuucaauuucaacggccugaccggcaccggcgugcugaccgagagcaacaagaaguuccugcccuuccagcaguucggccgggacaucgccgacaccaccgaugcagugcgggacccccagacccuggagauccuggacaucaccccaugcagcuucggcggcgugagcgucaucacccccggaacaaacaccagcaaccagguggccgugcuguaccagggcgugaacugcaccgaggugcccguggccauccacgccgaccagcugacccccaccuggcggguguacagcaccggcagcaacguguuccagacccgggccggcugccugaucggcgccgagcacgugaacaacuccuacgagugcgacauccccaucggcgcuggcaucugcgccagcuaccagacccagaccaacagcccccggcgggcccggagcguggccagccagagcaucaucgccuacaccaugagccugggcguggagaacagcguggccuacagcaacaacagcaucgccaucccuaccaacuucaccauaagcgugaccaccgagauccugcccgugagcaugaccaagaccagcguggacuguaccauguacaucugcggcgacagcaccgagugcagcaaccuguuacugcaguacggcagcuucugcacccagcugaaccgggcgcugaccggcaucgccguggagcaggacaagaacacccaagagguguucgcccaggugaagcagaucuacaagacucccccaaucaaggacuucggcggcuucaacuucagccagauccugcccgaccccagcaagcccagcaagcggagcuucaucgaggaccugcuguucaacaaggugacccuggccgacgccggcuucaucaagcaguacggggacugccugggcgacaucgccgcccgggaccugaucugcgcucagaaguucaacggccugaccgugcugcccccucugcugaccgaugagaugaucgcccaguacaccagcgcccugcuggccggcaccaucaccagcggcuggaccuucggcgccggcgccgcacugcagauccccuucgccaugcagauggccuaccgguucaacggcaucggcgugacccagaacgugcuguacgagaaccagaagcugaucgccaaccaguucaacagcgccaucggcaagauccaggacagccugagcagcaccgccagcgcccugggcaagcugcaggacguggugaaccagaacgcccaggcucugaacacccuggugaagcagcugagcagcaacuuuggcgccaucagcucagugcugaaugacauccugagccggcuggaucccccagaggccgaggugcagaucgacaggcugaucaccggccggcugcagagccugcagaccuacgugacccagcagcugauccgggccgccgagauucgggccagcgccaaccuggccgcaaccaagaugagcgagugcgugcugggccagagcaagcggguggacuucugcggcaagggcuaccaccugaugagcuucccccagagcgcuccccacggcgugguguuccugcacgucacauacgugcccgcccaggagaagaacuucaccaccgcccccgccaucugccacgacggaaaggcccacuucccccgggagggcguguucgugagcaacggcacccacugguucgugacccagcggaacuucuacgagccucagaucaucaccaccgacaacaccuucgugagcggcaacugcgacguggugaucggcaucgugaacaacaccguguacgacccccugcagcccgagcuggacagcuucaaggaggagcucgacaaguacuucaagaaccacaccagcccagacguggaccugggcgacaucagcggcaucaacgccagcguggugaacauccagaaggagaucgaccggcugaacgagguggccaagaaccugaacgagagccugaucgaccugcaggagcugggcaaguacgagcaguacaucaaguggcccugguacaucuggcugggcuucaucgccggccugaucgccaucgugauggugaccaucaugcugugcugcaugaccagcugcuguagcugccugaagggcugcugcagcugcggcagcugcugcaaguucgacgaggacgacagcgagcccgugcugaagggcgugaagcugcacuacaccuga

SEQ ID NO: 23146 - RNA, 3822 nt, Artificial Sequence
  SARS-CoV-2/Wuhan/WIV05/2019__EPI_ISL_402128 spike protein CDS gc (1-1273)(K986P_V987P_K986P_V987P_E484K_D614G)
auguucguguuccuggugcugcugccccuggugagcagccagugcgugaaccugaccacccggacccagcugcccccugccuacaccaacagcuucacccggggcguguacuaccccgacaagguguuccggagcagcgugcugcacagcacccaggaccuguuccugcccuucuucagcaacgugaccugguuccacgccauccacgugagcggcaccaacggcaccaagcgguucgacaacccagugcugcccuucaacgacggcguguacuucgccagcaccgagaagucaaacaucauccggggcuggaucuucggcaccacccuggacagcaagacacagagccugcugaucgugaacaacgccaccaacguggugaucaaggugugcgaguuucaguucugcaacgaccccuuccugggcguguacuaccacaagaacaacaagagcuggauggagagcgaguuccgggucuacagcagcgcuaacaauugcaccuucgaguacgugagccagcccuuccugauggaccucgagggcaagcagggcaacuucaagaaccugcgggaguucguguucaagaacaucgauggcuacuucaagaucuacagcaagcacacccccaucaaccuggugcgggaccugccccagggauucagcgcccuggagccucugguggaccugcccaucggcaucaacaucaccagguuccagacccugcuggcccugcaccggagcuaccugacccccggcgacagcagcagcggcuggaccgccggcgccgccgcauacuacgugggcuaccugcagccacggaccuuccugcugaaguacaacgagaacggcaccaucaccgacgccguggacugcgcccuggacccccugagcgagaccaagugcacccuaaagagcuucaccguggagaagggcaucuaccagaccagcaacuuccgggugcagcccacugagagcaucgugcgguuccccaacauuaccaaccugugucccuucggcgagguguucaacgccacccgguucgccagcguguacgccuggaaccggaagcggaucagcaacugcguggccgacuacagcgugcuguacaacagcgccagcuucagcaccuucaagugcuacggcgugagcccuaccaagcugaacgaccugugcuucaccaacguguacgcugacagcuucgugauccggggcgacgaggugcggcagaucgcccccggccagaccggcaagaucgccgacuacaacuacaagcugcccgacgacuucaccggcugcgugaucgccuggaacagcaacaaccuggacagcaaggugggcggcaacuacaacuaccuguaccggcuguuccguaagagcaaccugaagccauucgagcgggacaucagcaccgagaucuaccaggccggcagcacccccugcaacggugugaagggcuuuaacugcuacuucccccugcagagcuacggcuuccagcccaccaacggcgugggcuaccagcccuaccgggugguggugcugagcuucgagcugcugcacgcccccgccaccgugugcggcccuaaaaagagcaccaaccuggugaagaacaagugcgugaacuucaauuucaacggccugaccggcaccggcgugcugaccgagagcaacaagaaguuccugcccuuccagcaguucggccgggauaucgccgacaccaccgacgcagugcgggacccccagacccuggagauccuggacaucaccccaugcagcuucggcggcgugagcgucaucacccccggcacaaacaccagcaaccagguggccgugcuguaccagggagugaacugcaccgaggugcccguggccauccacgccgaccagcugacccccaccuggcggguguacagcaccggcagcaacguguuccagacccgggccggcugccugaucggcgccgagcacgugaacaacuccuacgagugcgacauccccaucggcgcuggcaucugcgccagcuaccagacccagaccaacagcccccggcgggcccggagcguggccagccagagcaucaucgccuacaccaugagcuuaggcgccgagaacagcguggccuacagcaacaacagcaucgcgaucccuaccaacuucaccaucagcgugaccaccgagauacugcccgugagcaugaccaagaccagcguggacuguaccauguacaucugcggcgacagcaccgagugcagcaaccugcugcugcaguacggcagcuucugcacccagcugaaccgggcccugaccggcaucgccguggagcaggacaagaacacccaagagguguucgcccaggugaagcagaucuacaagacucccccaaucaaggacuucggcggcuucaacuucagccagauccugcccgaccccagcaagcccagcaagcggagcuucaucgaggaccugcuguucaacaaggugacccuggccgacgccggcuucaucaagcaguacggcgacugccugggggauaucgccgcucgggaccugaucugcgcccagaaguucaacggccugaccgugcugcccccucugcugaccgacgagaugaucgcccaguacaccagcgcccugcuugccggcaccaucaccagcggcuggaccuucggcgccggcgcagcccugcagauccccuucgccaugcagauggccuaccgguucaacggcaucggcgugacccagaacgugcuguacgagaaccagaagcugaucgccaaccaguucaacagcgccaucggcaagauccaggacagccugagcagcaccgccagcgcccugggcaagcugcaggacguggugaaccagaacgcucaggcccugaacacccuggugaagcagcugagcagcaacuucggcgccaucagcucagugcugaaugacauccugagcaggcuggaucccccagaggccgaggugcagaucgaccggcugaucaccggccggcugcagagccugcagaccuacgugacccagcagcugauccgggccgccgagauccgggccagcgccaaccuggcagccaccaagaugagcgagugcgugcugggccagagcaagcggguggacuuuugcggcaagggcuaccaccugaugagcuucccccagagcgcuccccacggcgugguguuccuccacgugacauacguccccgcccaggagaagaacuucaccaccgcccccgccauuugccacgacggcaaggcccacuucccccgggagggaguguucgugagcaacggcacccacugguucgugacccagcggaacuucuacgagccucagaucaucaccaccgacaacaccuucgugagcggcaacugcgacguggugaucggcaucgugaacaacaccguguacgacccccugcagcccgagcuggacagcuucaaggaggagcuggacaaguacuucaagaaccacaccagcccagacguggaccugggcgacaucagcggcaucaacgccagcguggugaacauccagaaggagaucgaccggcugaacgagguggccaagaaccugaacgagagccugaucgaccugcaggagcugggcaaguacgagcaguacaucaaguggcccugguacaucuggcugggcuucaucgccggccugaucgccaucgugauggugaccaucaugcugugcugcaugaccagcugcuguagcugccugaagggcugcugcagcugcggcagcugcugcaaguucgacgaggacgacagcgagcccgugcugaagggcgugaagcugcacuacaccuga

SEQ ID NO: 23147 - RNA, 3822 nt, Artificial Sequence
  SARS-CoV-2/Wuhan/WIV05/2019__EPI_ISL_402128 spike protein CDS gc (1-1273)(K986P_V987P_K986P_V987P_L18F_T20N_P26S_D138Y_R190S_K417T _E484K_N501Y_D614G_H655Y_T1027I)
auguucguguuccuggugcugcugccccuggugagcagccagugcgugaacuucaccaaccggacccagcugcccagcgccuacaccaacagcuucacccggggcguguacuacccugacaagguguuccggagcagcgugcugcacagcacccaggaccuguuccugcccuucuucagcaacgugaccugguuccacgccauccacgugagcggcaccaacggcaccaagcgguucgacaaccccgugcugccauucaacgacggcguguacuucgccagcaccgagaagucaaacaucauccggggcuggaucuuuggcaccacccuggacagcaagacccagagccugcugaucgugaacaacgccacaaacguggugaucaaggugugcgaguuccaguucugcaacuaccccuuccugggcguguacuaccacaagaacaacaagagcuggauggagagcgaguuccgggucuacagcagcgcuaauaacugcaccuucgaguacgugagccagcccuuccugauggaccuggagggcaagcagggcaacuucaagaaccucagcgaguucguguucaagaacaucgacggcuacuucaagaucuacagcaagcacacccccaucaaccuggugcgggaucugccccagggauucagcgcccuggagccccugguggaccugccuaucggcaucaacaucacccgguuccagacccugcuggcccugcacaggagcuaccugacccccggcgacagcagcagcggcuggaccgccggcgccgccgcauacuacgugggcuaccugcagccccggaccuuccugcugaaguacaacgagaacggcaccaucaccgacgccguggacugcgcccuggacccacugagcgagaccaagugcacccuaaagagcuucaccguggagaagggcaucuaccagaccagcaacuuccgggugcagcccaccgagagcaucgugcgguuccccaacauuacuaaccugugucccuucggcgagguguucaacgccacccgguucgccagcguguacgccuggaaccggaagcggaucagcaacugcguggccgacuacagcgugcuguacaacagcgccagcuucagcaccuucaagugcuacggcgugagccccaccaagcugaacgaccugugcuucaccaacguguacgcugacagcuucgugauccggggcgacgaggugcggcagaucgccccuggccagaccggcaccaucgccgacuacaacuacaagcugcccgacgacuucaccggcugcgugaucgccuggaacagcaacaaccuggacagcaaggugggcggcaacuacaacuaccuguaccggcuguuccguaagagcaaccugaagcccuuugagcgggacaucagcaccgagaucuaccaggccggcagcaccccaugcaacggugugaagggcuucaacugcuacuucccccugcagagcuacggcuuccagcccaccuacggcgugggcuaccagcccuaccgggugguggugcugagcuucgagcugcugcacgcccccgccaccgugugcggccccaaaaagagcaccaaccuggugaagaacaagugcgugaacuucaauuucaacggccugaccggcaccggcgugcugaccgagagcaacaagaaguuccugccuuuccagcaguucggccgggacaucgccgauaccaccgacgcagugcgggacccccagacccuggagauccuggacaucacccccugcagcuucggcggcgugagcgucaucaccccaggcacaaacaccagcaaccagguggccgugcuguaccagggagugaacugcaccgaggugcccguggccauccacgccgaccagcugacccccaccuggcggguguacuccaccggcagcaacguguuccagacccgggccggcugccugaucggcgccgaguacgugaacaacagcuacgagugcgacauccccaucggcgcuggcaucugcgccagcuaccagacccagaccaacagcccccggcgggcccggagcguggccagccagagcaucaucgccuacaccaugagccugggcgccgagaacagcguggccuacagcaacaacagcaucgcgauccccaccaacuucaccaucagcgugaccaccgagauauuaccugugagcaugaccaagaccagcguggacuguaccauguacaucugcggcgacagcaccgagugcagcaaccugcugcugcaguacggcagcuucugcacccagcugaaccgggcccugaccggcaucgccguggagcaggacaagaacacccaagagguguucgcccaggugaagcagaucuacaagacuccacccaucaaggacuucggcggcuucaacuucagccagauccugcccgaccccagcaagcccagcaagcggagcuucaucgaggaccugcuguucaacaaggugacccuggccgacgccggcuucaucaagcaguacggcgacugccugggggacaucgccgcucgggaucugaucugcgcccagaaguucaacggccugaccgugcugccuccccugcugaccgacgagaugaucgcccaguacaccagcgcccugcuggccggcaccaucaccagcggcuggaccuucggcgccggcgcagcccuucagauccccuucgccaugcagauggccuaccgguucaacggcaucggcgugacccagaacgugcuguacgagaaccagaagcugaucgccaaccaguucaacagcgccaucggcaagauccaggacagccugagcagcaccgccagcgcccugggcaagcugcaggacguggugaaccagaacgcucaggcccugaacacccuggugaagcagcugagcucaaacuuuggcgccaucagcagcgugcugaaugacauccugagccggcuggacccacccgaggccgaggugcagaucgacaggcugaucaccggccggcugcagagccugcagaccuacgugacccagcagcugauccgggccgccgagauccgggccagcgccaaccuggcagccauuaagaugagcgagugcgugcugggccagagcaagcggguggacuucugcggcaagggcuaccaccugaugagcuucccccagagcgcuccccacggcgugguguuccugcacgugaccuacguccccgcccaggagaagaacuucacaaccgcccccgccaucugccacgacggcaaggcccacuucccccgggagggaguguucgugagcaacggcacccacugguucgugacccagcggaacuucuacgagccccagaucaucaccaccgacaacaccuucgugagcggcaacugcgacguggugaucggcaucgugaacaacaccguguacgacccucuccagcccgagcuggacagcuucaaggaggagcuggacaaguacuucaagaaccacaccagccccgacguggaccugggcgauaucagcggcaucaacgccagcguggugaacauccagaaggagaucgaccggcugaacgagguggccaagaaccugaacgagagccugaucgaccugcaggagcugggcaaguacgagcaguacaucaaguggccaugguacaucuggcugggcuucaucgccggccugaucgccaucgugauggugaccaucaugcugugcugcaugaccagcugcuguagcugccugaagggcugcugcagcugcggcagcugcugcaaguucgacgaggacgacagcgagcccgugcugaagggcgugaagcugcacuacaccuga

SEQ ID NO: 23148 - RNA, 3822 nt, Artificial Sequence
  SARS-CoV-2/Wuhan/WIV05/2019__EPI_ISL_402128 spike protein CDS gc (1-1273)(K986P_V987P_K986P_V987P_S13I_W152C_L452R_D614G)
auguucguguuccuggugcugcugccccuggugagcauccagugcgugaaccugaccacccggacccagcugcccccugccuacaccaacagcuucacccggggcguguacuaccccgacaagguguuccggagcagcgugcugcacagcacccaggaccuguuccugcccuucuucagcaacgugaccugguuccacgccauccacgugagcggcaccaacggcaccaagcgguucgacaacccagugcugcccuucaacgacggcguguacuucgccagcaccgagaagucaaacaucauccggggcuggaucuucggcaccacccuggacagcaagacacagagccugcugaucgugaacaacgccaccaacguggugaucaaggugugcgaguuucaguucugcaacgaccccuuccugggcguguacuaccacaagaacaacaagagcugcauggagagcgaguuccgggucuacagcagcgcuaacaauugcaccuucgaguacgugagccagcccuuccugauggaccucgagggcaagcagggcaacuucaagaaccugcgggaguucguguucaagaacaucgauggcuacuucaagaucuacagcaagcacacccccaucaaccuggugcgggaccugccccagggauucagcgcccuggagccucugguggaccugcccaucggcaucaacaucaccagguuccagacccugcuggcccugcaccggagcuaccugacccccggcgacagcagcagcggcuggaccgccggcgccgccgcauacuacgugggcuaccugcagccacggaccuuccugcugaaguacaacgagaacggcaccaucaccgacgccguggacugcgcccuggacccccugagcgagaccaaguguacccuaaagagcuucaccguggagaagggcaucuaccagaccagcaacuuccgggugcagcccacugagagcauugugcgguuccccaacaucaccaaccugugccccuucggcgagguguucaacgccacccgguucgccagcguguacgccuggaaccggaagcggaucagcaacugcguggccgacuacagcgugcuguacaacagcgccagcuucagcaccuucaagugcuacggcgugagcccuaccaagcugaacgaccugugcuucaccaacguguacgcugacagcuucgugauccggggcgacgaggugcggcagaucgcccccggccagaccggcaagaucgccgacuacaacuacaagcugcccgacgacuucaccggcugcgugaucgccuggaacagcaacaaccuggacagcaaggugggcggcaacuacaacuaccgguaccggcuguuccguaagagcaaccugaagccauucgagcgggacaucagcaccgagaucuaccaggccggcagcacccccugcaacgguguggagggcuuuaacugcuacuucccccugcagagcuacggcuuccagcccaccaacggcgugggcuaccagcccuaccgggugguggugcugagcuucgagcugcugcacgcccccgccaccgugugcggcccuaaaaagagcaccaaccuggugaagaacaagugcgugaacuucaauuucaacggccugaccggcaccggcgugcugaccgagagcaacaagaaguuccugcccuuccagcaguucggccgggauaucgccgacaccaccgacgcagugcgggacccccagacccuggagauccuggacaucaccccaugcagcuucggcggcgugagcgucaucacccccggcacaaacaccagcaaccagguggccgugcuguaccagggagugaacugcaccgaggugcccguggccauccacgccgaccagcugacccccaccuggcggguguacagcaccggcagcaacguguuccagacccgggccggcugccugaucggcgccgagcacgugaacaacagcuacgagugcgacauccccaucggcgcuggcaucugugccuccuaccagacccagaccaacagcccccggcgggcccggagcguggccagccagagcaucaucgccuacaccaugagccugggcgccgagaacagcguggccuacagcaacaacagcaucgcgaucccuaccaacuucaccauaagcgugaccaccgagaucuuacccgugagcaugaccaagaccagcguggacugcaccauguacaucugcggcgacagcaccgagugcagcaaccugcugcugcaguacggcagcuucugcacccagcugaaccgggcccugaccggcaucgccguggagcaggacaagaacacccaagagguguucgcccaggugaagcagaucuacaagacucccccaaucaaggacuucggcggcuucaacuucagccagauccugcccgaccccagcaagcccagcaagcggagcuucaucgaggaccugcuguucaacaaggugacccuggccgacgccggcuucaucaagcaguacggcgacugccugggggauaucgccgcucgggaccugaucugcgcccagaaguucaacggccugaccgugcugcccccucugcugaccgacgagaugaucgcccaguacaccagcgcccugcuggccggcaccaucaccagcggcuggaccuucggcgccggcgcagcccuucagauccccuucgccaugcagauggccuacagguucaacggcaucggcgugacccagaacgugcuguacgagaaccagaagcugaucgccaaccaguucaacagcgccaucggcaagauccaggacagccugagcagcaccgccagcgcccugggcaagcugcaggacguggugaaccagaacgcucaggcccugaacacccuggugaagcagcugagcagcaacuucggcgccaucagcagcgugcugaaugacauccugucacggcuggaucccccagaggccgaggugcagaucgaccggcugaucaccggccggcugcagagccugcagaccuacgugacccagcagcugauccgggccgccgagauucgggccagcgccaaccuggcagccaccaagaugagcgagugcgugcugggccagagcaagcggguggacuuuugcggcaagggcuaccaccugaugagcuucccccagagcgcuccccacggcgugguguuccugcacgugacauacguccccgcccaggagaagaacuucaccaccgcccccgccaucugccacgacggcaaggcccacuucccccgggagggaguguucgugagcaacggcacccacugguucgugacccagcggaacuucuacgagccucagaucaucaccaccgacaacaccuucgugagcggcaacugcgacguggugaucggcaucgugaacaacaccguguacgacccccuccagcccgagcuggacagcuucaaggaggagcuggacaaguacuucaagaaccacaccagcccagacguggaccugggcgacaucagcggcaucaacgccagcguggugaacauccagaaggagaucgaccggcugaacgagguggccaagaaccugaacgagagccugaucgaccugcaggagcugggcaaguacgagcaguacaucaaguggcccugguacaucuggcugggcuucaucgccggccugaucgccaucgugauggugaccaucaugcugugcugcaugaccagcuguugcagcugccugaagggcugcugcagcugcggcagcugcugcaaguucgacgaggacgacagcgagcccgugcugaagggcgugaagcugcacuacaccuga

SEQ ID NO: 23149 - RNA, 3822 nt, Artificial Sequence; identical to SEQ ID NO: 146
  SARS-CoV-2/Wuhan/WIV05/2019__EPI_ISL_402128 spike protein CDS gc mod (1-1273)(K986P_V987P)

SEQ ID NO: 23150 - RNA, 3822 nt, Artificial Sequence
  SARS-CoV-2/Wuhan/WIV05/2019__EPI_ISL_402128 spike protein CDS gc mod (1-1273)(K986P_V987P_ D614G)
auguucguguuucuggugcugcugccccugguguccagccagugugugaaccugaccaccagaacacagcugccuccagccuacaccaacagcuucaccagaggcguguacuaccccgacaagguguucagauccagcgugcugcacucuacccaggaccuguuccugccuuucuucagcaacgugaccugguuccacgccauccacguguccggcaccaauggcaccaagagauucgacaaccccgugcugcccuucaacgacgggguguacuuugccagcaccgagaaguccaacaucaucagaggcuggaucuucggcaccacacuggacagcaagacccagagccugcugaucgugaacaacgccaccaacguggucaucaaagugugcgaguuccaguucugcaacgaccccuuccugggcgucuacuaccacaagaacaacaagagcuggauggaaagcgaguuccggguguacagcagcgccaacaacugcaccuucgaguacgugucccagccuuuccugauggaccuggaaggcaagcagggcaacuucaagaaccugcgcgaguucguguucaagaacaucgacggcuacuucaaaaucuacagcaagcacaccccuaucaaccucgugcgggaucugccucagggcuucucugcucuggaaccccugguggaucugcccaucggcaucaacaucacccgguuucagacacugcuggcccugcacagaagcuaccugacaccuggcgauagcagcagcggauggacagcuggugccgccgcuuacuaugugggcuaccugcagccuagaaccuuccugcugaaguacaacgagaacggcaccaucaccgacgccguggauugugcucuggauccucugagcgagacaaagugcacccugaaguccuucaccguggaaaagggcaucuaccagaccagcaacuuccgggugcagcccaccgaauccaucgugcgguuccccaauaucaccaaucugugccccuucggcgagguguucaaugccaccagauucgccucuguguacgccuggaaccggaagcggaucagcaauugcguggccgacuacuccgugcuguacaacuccgccagcuucagcaccuucaagugcuacggcguguccccuaccaagcugaacgaccugugcuucacaaacguguacgccgacagcuucgugauccggggagaugaagugcggcagauugccccuggacagacaggcaagaucgccgacuacaacuacaagcugcccgacgacuucaccggcugugugauugccuggaacagcaacaaccuggacuccaaagucggcggcaacuacaauuaccuguaccggcuguuccggaaguccaaucugaagcccuucgagcgggacaucagcaccgaaaucuaucaggccggcagcaccccuugcaacggcguggaaggcuucaacugcuacuucccacugcaguccuacggcuuucagcccacaaauggcgugggcuaucagcccuacagagugguggugcugagcuucgaacugcugcaugcuccugccacagugugcggcccuaagaaaagcaccaaucucgugaagaacaaaugcgugaacuucaacuucaacggccugaccggcaccggcgugcugacagagagcaacaagaaguuccugccauuccagcaguuuggccgggauaucgccgauaccacagacgccguuagagauccccagacacuggaaauccuggacaucaccccaugcagcuucggcggagugucugugaucaccccuggcaccaacaccagcaaucagguggcagugcuguaccagggcgugaacuguaccgaagugcccguggccauucacgccgaucagcugacaccuacauggcggguguacuccaccggcagcaauguguuucagaccagagccggcugucugaucggagccgagcacgugaacaauagcuacgagugcgacauccccaucggcgcuggcaucugugccagcuaccagacacagacaaacagccccagacgggcuagaagcguggccagccagagcaucauugccuacacaaugucucugggcgccgagaacagcguggccuacuccaacaacucuaucgcuauccccaccaacuucaccaucagcgugaccaccgagauccugccuguguccaugaccaagaccagcguggacugcaccauguacaucugcggcgauuccaccgagugcuccaaccugcugcugcaguacggcagcuucugcacccagcugaauagagcccugacagggaucgccguggaacaggacaagaacacccaagagguguucgcccaagugaagcaaaucuacaagaccccuccuaucaaggacuucggcggcuucaauuucagccagauucugcccgauccuagcaagcccagcaagcggagcuucaucgaggaccugcuguucaacaaagugacacuggccgacgccggcuucaucaagcaguauggcgauugucugggcgacauugccgccagggaucugauuugcgcccagaaguuuaacggacugacagugcugccuccucugcugaccgaugagaugaucgcccaguacacaucugcccugcuggccggcacaaucacaagcggcuggacauuuggagcuggcgccgcucugcagauccccuuugcuaugcagauggccuaccgguucaacggcaucggagugacccagaaugugcuguacgagaaccagaagcugaucgccaaccaguucaacagcgccaucggcaagauccaggacagccugagcagcacagcaagcgcccugggaaagcugcaggacguggucaaccagaaugcccaggcacugaacacccuggucaagcagcuguccuccaacuucggcgccaucagcucugugcugaacgauauccugagcagacuggacccuccugaggccgaggugcagaucgacagacugaucacaggcagacugcagagccuccagacauacgugacccagcagcugaucagagccgccgagauuagagccucugccaaucuggccgccaccaagaugucugagugugugcugggccagagcaagagaguggacuuuugcggcaagggcuaccaccugaugagcuucccucagucugccccucacggcgugguguuucugcacgugacauaugugcccgcucaagagaagaauuucaccaccgcuccagccaucugccacgacggcaaagcccacuuuccuagagaaggcguguucguguccaacggcacccauugguucgugacacagcggaacuucuacgagccccagaucaucaccaccgacaacaccuucgugucuggcaacugcgacguugugaucggcauugugaacaauaccguguacgacccucugcagcccgagcuggacagcuucaaagaggaacuggacaaguacuuuaagaaccacacaagccccgacguggaccugggcgauaucagcggaaucaaugccagcgucgugaacauccagaaagagaucgaccggcugaacgagguggccaagaaucugaacgagagccugaucgaccugcaagaacuggggaaguacgagcaguacaucaaguggcccugguacaucuggcugggcuuuaucgccggacugauugccaucgugauggucacaaucaugcuguguugcaugaccagcugcuguagcugccugaagggcuguuguagcuguggcagcugcugcaaguucgacgaggacgauucugagcccgugcugaagggcgugaaacugcacuacaccuga

SEQ ID NO: 23151 - RNA, 3822 nt, Artificial Sequence
  SARS-CoV-2/Wuhan/WIV05/2019__EPI_ISL_402128 spike protein CDS gc mod (1-1273)(K986P_V987P_A222V_D614G)
auguucguguuucuggugcugcugccccugguguccagccagugugugaaccugaccaccagaacacagcugccuccagccuacaccaacagcuucaccagaggcguguacuaccccgacaagguguucagauccagcgugcugcacucuacccaggaccuguuccugccuuucuucagcaacgugaccugguuccacgccauccacguguccggcaccaauggcaccaagagauucgacaaccccgugcugcccuucaacgacgggguguacuuugccagcaccgagaaguccaacaucaucagaggcuggaucuucggcaccacacuggacagcaagacccagagccugcugaucgugaacaacgccaccaacguggucaucaaagugugcgaguuccaguucugcaacgaccccuuccugggcgucuacuaccacaagaacaacaagagcuggauggaaagcgaguuccggguguacagcagcgccaacaacugcaccuucgaguacgugucccagccuuuccugauggaccuggaaggcaagcagggcaacuucaagaaccugcgcgaguucguguucaagaacaucgacggcuacuucaaaaucuacagcaagcacaccccuaucaaccucgugcgggaucugccucagggcuucucugugcuggaaccccugguggaucugcccaucggcaucaacaucacccgguuucagacacugcuggcccugcacagaagcuaccugacaccuggcgauagcagcagcggauggacagcuggugccgccgcuuacuaugugggcuaccugcagccuagaaccuuccugcugaaguacaacgagaacggcaccaucaccgacgccguggauugugcucuggauccucugagcgagacaaagugcacccugaaguccuucaccguggaaaagggcaucuaccagaccagcaacuuccgggugcagcccaccgaauccaucgugcgguuccccaauaucaccaaucugugccccuucggcgagguguucaaugccaccagauucgccucuguguacgccuggaaccggaagcggaucagcaauugcguggccgacuacuccgugcuguacaacuccgccagcuucagcaccuucaagugcuacggcguguccccuaccaagcugaacgaccugugcuucacaaacguguacgccgacagcuucgugauccggggagaugaagugcggcagauugccccuggacagacaggcaagaucgccgacuacaacuacaagcugcccgacgacuucaccggcugugugauugccuggaacagcaacaaccuggacuccaaagucggcggcaacuacaauuaccuguaccggcuguuccggaaguccaaucugaagcccuucgagcgggacaucagcaccgaaaucuaucaggccggcagcaccccuugcaacggcguggaaggcuucaacugcuacuucccacugcaguccuacggcuuucagcccacaaauggcgugggcuaucagcccuacagagugguggugcugagcuucgaacugcugcaugcuccugccacagugugcggcccuaagaaaagcaccaaucucgugaagaacaaaugcgugaacuucaacuucaacggccugaccggcaccggcgugcugacagagagcaacaagaaguuccugccauuccagcaguuuggccgggauaucgccgauaccacagacgccguuagagauccccagacacuggaaauccuggacaucaccccaugcagcuucggcggagugucugugaucaccccuggcaccaacaccagcaaucagguggcagugcuguaccagggcgugaacuguaccgaagugcccguggccauucacgccgaucagcugacaccuacauggcggguguacuccaccggcagcaauguguuucagaccagagccggcugucugaucggagccgagcacgugaacaauagcuacgagugcgacauccccaucggcgcuggcaucugugccagcuaccagacacagacaaacagccccagacgggcuagaagcguggccagccagagcaucauugccuacacaaugucucugggcgccgagaacagcguggccuacuccaacaacucuaucgcuauccccaccaacuucaccaucagcgugaccaccgagauccugccuguguccaugaccaagaccagcguggacugcaccauguacaucugcggcgauuccaccgagugcuccaaccugcugcugcaguacggcagcuucugcacccagcugaauagagcccugacagggaucgccguggaacaggacaagaacacccaagagguguucgcccaagugaagcaaaucuacaagaccccuccuaucaaggacuucggcggcuucaauuucagccagauucugcccgauccuagcaagcccagcaagcggagcuucaucgaggaccugcuguucaacaaagugacacuggccgacgccggcuucaucaagcaguauggcgauugucugggcgacauugccgccagggaucugauuugcgcccagaaguuuaacggacugacagugcugccuccucugcugaccgaugagaugaucgcccaguacacaucugcccugcuggccggcacaaucacaagcggcuggacauuuggagcuggcgccgcucugcagauccccuuugcuaugcagauggccuaccgguucaacggcaucggagugacccagaaugugcuguacgagaaccagaagcugaucgccaaccaguucaacagcgccaucggcaagauccaggacagccugagcagcacagcaagcgcccugggaaagcugcaggacguggucaaccagaaugcccaggcacugaacacccuggucaagcagcuguccuccaacuucggcgccaucagcucugugcugaacgauauccugagcagacuggacccuccugaggccgaggugcagaucgacagacugaucacaggcagacugcagagccuccagacauacgugacccagcagcugaucagagccgccgagauuagagccucugccaaucuggccgccaccaagaugucugagugugugcugggccagagcaagagaguggacuuuugcggcaagggcuaccaccugaugagcuucccucagucugccccucacggcgugguguuucugcacgugacauaugugcccgcucaagagaagaauuucaccaccgcuccagccaucugccacgacggcaaagcccacuuuccuagagaaggcguguucguguccaacggcacccauugguucgugacacagcggaacuucuacgagccccagaucaucaccaccgacaacaccuucgugucuggcaacugcgacguugugaucggcauugugaacaauaccguguacgacccucugcagcccgagcuggacagcuucaaagaggaacuggacaaguacuuuaagaaccacacaagccccgacguggaccugggcgauaucagcggaaucaaugccagcgucgugaacauccagaaagagaucgaccggcugaacgagguggccaagaaucugaacgagagccugaucgaccugcaagaacuggggaaguacgagcaguacaucaaguggcccugguacaucuggcugggcuuuaucgccggacugauugccaucgugauggucacaaucaugcuguguugcaugaccagcugcuguagcugccugaagggcuguuguagcuguggcagcugcugcaaguucgacgaggacgauucugagcccgugcugaagggcgugaaacugcacuacaccuga

SEQ ID NO: 23152 - RNA, 3822 nt, Artificial Sequence
  SARS-CoV-2/Wuhan/WIV05/2019__EPI_ISL_402128 spike protein CDS gc mod (1-1273)(K986P_V987P_N439K_D614G)
auguucguguuucuggugcugcugccccugguguccagccagugugugaaccugaccaccagaacacagcugccuccagccuacaccaacagcuucaccagaggcguguacuaccccgacaagguguucagauccagcgugcugcacucuacccaggaccuguuccugccuuucuucagcaacgugaccugguuccacgccauccacguguccggcaccaauggcaccaagagauucgacaaccccgugcugcccuucaacgacgggguguacuuugccagcaccgagaaguccaacaucaucagaggcuggaucuucggcaccacacuggacagcaagacccagagccugcugaucgugaacaacgccaccaacguggucaucaaagugugcgaguuccaguucugcaacgaccccuuccugggcgucuacuaccacaagaacaacaagagcuggauggaaagcgaguuccggguguacagcagcgccaacaacugcaccuucgaguacgugucccagccuuuccugauggaccuggaaggcaagcagggcaacuucaagaaccugcgcgaguucguguucaagaacaucgacggcuacuucaaaaucuacagcaagcacaccccuaucaaccucgugcgggaucugccucagggcuucucugcucuggaaccccugguggaucugcccaucggcaucaacaucacccgguuucagacacugcuggcccugcacagaagcuaccugacaccuggcgauagcagcagcggauggacagcuggugccgccgcuuacuaugugggcuaccugcagccuagaaccuuccugcugaaguacaacgagaacggcaccaucaccgacgccguggauugugcucuggauccucugagcgagacaaagugcacccugaaguccuucaccguggaaaagggcaucuaccagaccagcaacuuccgggugcagcccaccgaauccaucgugcgguuccccaauaucaccaaucugugccccuucggcgagguguucaaugccaccagauucgccucuguguacgccuggaaccggaagcggaucagcaauugcguggccgacuacuccgugcuguacaacuccgccagcuucagcaccuucaagugcuacggcguguccccuaccaagcugaacgaccugugcuucacaaacguguacgccgacagcuucgugauccggggagaugaagugcggcagauugccccuggacagacaggcaagaucgccgacuacaacuacaagcugcccgacgacuucaccggcugugugauugccuggaacagcaagaaccuggacuccaaagucggcggcaacuacaauuaccuguaccggcuguuccggaaguccaaucugaagcccuucgagcgggacaucagcaccgaaaucuaucaggccggcagcaccccuugcaacggcguggaaggcuucaacugcuacuucccacugcaguccuacggcuuucagcccacaaauggcgugggcuaucagcccuacagagugguggugcugagcuucgaacugcugcaugcuccugccacagugugcggcccuaagaaaagcaccaaucucgugaagaacaaaugcgugaacuucaacuucaacggccugaccggcaccggcgugcugacagagagcaacaagaaguuccugccauuccagcaguuuggccgggauaucgccgauaccacagacgccguuagagauccccagacacuggaaauccuggacaucaccccaugcagcuucggcggagugucugugaucaccccuggcaccaacaccagcaaucagguggcagugcuguaccagggcgugaacuguaccgaagugcccguggccauucacgccgaucagcugacaccuacauggcggguguacuccaccggcagcaauguguuucagaccagagccggcugucugaucggagccgagcacgugaacaauagcuacgagugcgacauccccaucggcgcuggcaucugugccagcuaccagacacagacaaacagccccagacgggcuagaagcguggccagccagagcaucauugccuacacaaugucucugggcgccgagaacagcguggccuacuccaacaacucuaucgcuauccccaccaacuucaccaucagcgugaccaccgagauccugccuguguccaugaccaagaccagcguggacugcaccauguacaucugcggcgauuccaccgagugcuccaaccugcugcugcaguacggcagcuucugcacccagcugaauagagcccugacagggaucgccguggaacaggacaagaacacccaagagguguucgcccaagugaagcaaaucuacaagaccccuccuaucaaggacuucggcggcuucaauuucagccagauucugcccgauccuagcaagcccagcaagcggagcuucaucgaggaccugcuguucaacaaagugacacuggccgacgccggcuucaucaagcaguauggcgauugucugggcgacauugccgccagggaucugauuugcgcccagaaguuuaacggacugacagugcugccuccucugcugaccgaugagaugaucgcccaguacacaucugcccugcuggccggcacaaucacaagcggcuggacauuuggagcuggcgccgcucugcagauccccuuugcuaugcagauggccuaccgguucaacggcaucggagugacccagaaugugcuguacgagaaccagaagcugaucgccaaccaguucaacagcgccaucggcaagauccaggacagccugagcagcacagcaagcgcccugggaaagcugcaggacguggucaaccagaaugcccaggcacugaacacccuggucaagcagcuguccuccaacuucggcgccaucagcucugugcugaacgauauccugagcagacuggacccuccugaggccgaggugcagaucgacagacugaucacaggcagacugcagagccuccagacauacgugacccagcagcugaucagagccgccgagauuagagccucugccaaucuggccgccaccaagaugucugagugugugcugggccagagcaagagaguggacuuuugcggcaagggcuaccaccugaugagcuucccucagucugccccucacggcgugguguuucugcacgugacauaugugcccgcucaagagaagaauuucaccaccgcuccagccaucugccacgacggcaaagcccacuuuccuagagaaggcguguucguguccaacggcacccauugguucgugacacagcggaacuucuacgagccccagaucaucaccaccgacaacaccuucgugucuggcaacugcgacguugugaucggcauugugaacaauaccguguacgacccucugcagcccgagcuggacagcuucaaagaggaacuggacaaguacuuuaagaaccacacaagccccgacguggaccugggcgauaucagcggaaucaaugccagcgucgugaacauccagaaagagaucgaccggcugaacgagguggccaagaaucugaacgagagccugaucgaccugcaagaacuggggaaguacgagcaguacaucaaguggcccugguacaucuggcugggcuuuaucgccggacugauugccaucgugauggucacaaucaugcuguguugcaugaccagcugcuguagcugccugaagggcuguuguagcuguggcagcugcugcaaguucgacgaggacgauucugagcccgugcugaagggcgugaaacugcacuacaccuga

SEQ ID NO: 23153 - RNA, 3822 nt, Artificial Sequence
  SARS-CoV-2/Wuhan/WIV05/2019__EPI_ISL_402128 spike protein CDS gc mod (1-1273)(K986P_V987P_S477N_D614G)
auguucguguuucuggugcugcugccccugguguccagccagugugugaaccugaccaccagaacacagcugccuccagccuacaccaacagcuucaccagaggcguguacuaccccgacaagguguucagauccagcgugcugcacucuacccaggaccuguuccugccuuucuucagcaacgugaccugguuccacgccauccacguguccggcaccaauggcaccaagagauucgacaaccccgugcugcccuucaacgacgggguguacuuugccagcaccgagaaguccaacaucaucagaggcuggaucuucggcaccacacuggacagcaagacccagagccugcugaucgugaacaacgccaccaacguggucaucaaagugugcgaguuccaguucugcaacgaccccuuccugggcgucuacuaccacaagaacaacaagagcuggauggaaagcgaguuccggguguacagcagcgccaacaacugcaccuucgaguacgugucccagccuuuccugauggaccuggaaggcaagcagggcaacuucaagaaccugcgcgaguucguguucaagaacaucgacggcuacuucaaaaucuacagcaagcacaccccuaucaaccucgugcgggaucugccucagggcuucucugcucuggaaccccugguggaucugcccaucggcaucaacaucacccgguuucagacacugcuggcccugcacagaagcuaccugacaccuggcgauagcagcagcggauggacagcuggugccgccgcuuacuaugugggcuaccugcagccuagaaccuuccugcugaaguacaacgagaacggcaccaucaccgacgccguggauugugcucuggauccucugagcgagacaaagugcacccugaaguccuucaccguggaaaagggcaucuaccagaccagcaacuuccgggugcagcccaccgaauccaucgugcgguuccccaauaucaccaaucugugccccuucggcgagguguucaaugccaccagauucgccucuguguacgccuggaaccggaagcggaucagcaauugcguggccgacuacuccgugcuguacaacuccgccagcuucagcaccuucaagugcuacggcguguccccuaccaagcugaacgaccugugcuucacaaacguguacgccgacagcuucgugauccggggagaugaagugcggcagauugccccuggacagacaggcaagaucgccgacuacaacuacaagcugcccgacgacuucaccggcugugugauugccuggaacagcaacaaccuggacuccaaagucggcggcaacuacaauuaccuguaccggcuguuccggaaguccaaucugaagcccuucgagcgggacaucagcaccgaaaucuaucaggccggcaacaccccuugcaacggcguggaaggcuucaacugcuacuucccacugcaguccuacggcuuucagcccacaaauggcgugggcuaucagcccuacagagugguggugcugagcuucgaacugcugcaugcuccugccacagugugcggcccuaagaaaagcaccaaucucgugaagaacaaaugcgugaacuucaacuucaacggccugaccggcaccggcgugcugacagagagcaacaagaaguuccugccauuccagcaguuuggccgggauaucgccgauaccacagacgccguuagagauccccagacacuggaaauccuggacaucaccccaugcagcuucggcggagugucugugaucaccccuggcaccaacaccagcaaucagguggcagugcuguaccagggcgugaacuguaccgaagugcccguggccauucacgccgaucagcugacaccuacauggcggguguacuccaccggcagcaauguguuucagaccagagccggcugucugaucggagccgagcacgugaacaauagcuacgagugcgacauccccaucggcgcuggcaucugugccagcuaccagacacagacaaacagccccagacgggcuagaagcguggccagccagagcaucauugccuacacaaugucucugggcgccgagaacagcguggccuacuccaacaacucuaucgcuauccccaccaacuucaccaucagcgugaccaccgagauccugccuguguccaugaccaagaccagcguggacugcaccauguacaucugcggcgauuccaccgagugcuccaaccugcugcugcaguacggcagcuucugcacccagcugaauagagcccugacagggaucgccguggaacaggacaagaacacccaagagguguucgcccaagugaagcaaaucuacaagaccccuccuaucaaggacuucggcggcuucaauuucagccagauucugcccgauccuagcaagcccagcaagcggagcuucaucgaggaccugcuguucaacaaagugacacuggccgacgccggcuucaucaagcaguauggcgauugucugggcgacauugccgccagggaucugauuugcgcccagaaguuuaacggacugacagugcugccuccucugcugaccgaugagaugaucgcccaguacacaucugcccugcuggccggcacaaucacaagcggcuggacauuuggagcuggcgccgcucugcagauccccuuugcuaugcagauggccuaccgguucaacggcaucggagugacccagaaugugcuguacgagaaccagaagcugaucgccaaccaguucaacagcgccaucggcaagauccaggacagccugagcagcacagcaagcgcccugggaaagcugcaggacguggucaaccagaaugcccaggcacugaacacccuggucaagcagcuguccuccaacuucggcgccaucagcucugugcugaacgauauccugagcagacuggacccuccugaggccgaggugcagaucgacagacugaucacaggcagacugcagagccuccagacauacgugacccagcagcugaucagagccgccgagauuagagccucugccaaucuggccgccaccaagaugucugagugugugcugggccagagcaagagaguggacuuuugcggcaagggcuaccaccugaugagcuucccucagucugccccucacggcgugguguuucugcacgugacauaugugcccgcucaagagaagaauuucaccaccgcuccagccaucugccacgacggcaaagcccacuuuccuagagaaggcguguucguguccaacggcacccauugguucgugacacagcggaacuucuacgagccccagaucaucaccaccgacaacaccuucgugucuggcaacugcgacguugugaucggcauugugaacaauaccguguacgacccucugcagcccgagcuggacagcuucaaagaggaacuggacaaguacuuuaagaaccacacaagccccgacguggaccugggcgauaucagcggaaucaaugccagcgucgugaacauccagaaagagaucgaccggcugaacgagguggccaagaaucugaacgagagccugaucgaccugcaagaacuggggaaguacgagcaguacaucaaguggcccugguacaucuggcugggcuuuaucgccggacugauugccaucgugauggucacaaucaugcuguguugcaugaccagcugcuguagcugccugaagggcuguuguagcuguggcagcugcugcaaguucgacgaggacgauucugagcccgugcugaagggcgugaaacugcacuacaccuga

SEQ ID NO: 23154 - RNA, 3822 nt, Artificial Sequence
  SARS-CoV-2/Wuhan/WIV05/2019__EPI_ISL_402128 spike protein CDS gc mod (1-1273)(K986P_V987P_N501Y_D614G)
auguucguguuucuggugcugcugccccugguguccagccagugugugaaccugaccaccagaacacagcugccuccagccuacaccaacagcuucaccagaggcguguacuaccccgacaagguguucagauccagcgugcugcacucuacccaggaccuguuccugccuuucuucagcaacgugaccugguuccacgccauccacguguccggcaccaauggcaccaagagauucgacaaccccgugcugcccuucaacgacgggguguacuuugccagcaccgagaaguccaacaucaucagaggcuggaucuucggcaccacacuggacagcaagacccagagccugcugaucgugaacaacgccaccaacguggucaucaaagugugcgaguuccaguucugcaacgaccccuuccugggcgucuacuaccacaagaacaacaagagcuggauggaaagcgaguuccggguguacagcagcgccaacaacugcaccuucgaguacgugucccagccuuuccugauggaccuggaaggcaagcagggcaacuucaagaaccugcgcgaguucguguucaagaacaucgacggcuacuucaaaaucuacagcaagcacaccccuaucaaccucgugcgggaucugccucagggcuucucugcucuggaaccccugguggaucugcccaucggcaucaacaucacccgguuucagacacugcuggcccugcacagaagcuaccugacaccuggcgauagcagcagcggauggacagcuggugccgccgcuuacuaugugggcuaccugcagccuagaaccuuccugcugaaguacaacgagaacggcaccaucaccgacgccguggauugugcucuggauccucugagcgagacaaagugcacccugaaguccuucaccguggaaaagggcaucuaccagaccagcaacuuccgggugcagcccaccgaauccaucgugcgguuccccaauaucaccaaucugugccccuucggcgagguguucaaugccaccagauucgccucuguguacgccuggaaccggaagcggaucagcaauugcguggccgacuacuccgugcuguacaacuccgccagcuucagcaccuucaagugcuacggcguguccccuaccaagcugaacgaccugugcuucacaaacguguacgccgacagcuucgugauccggggagaugaagugcggcagauugccccuggacagacaggcaagaucgccgacuacaacuacaagcugcccgacgacuucaccggcugugugauugccuggaacagcaacaaccuggacuccaaagucggcggcaacuacaauuaccuguaccggcuguuccggaaguccaaucugaagcccuucgagcgggacaucagcaccgaaaucuaucaggccggcagcaccccuugcaacggcguggaaggcuucaacugcuacuucccacugcaguccuacggcuuucagcccacauacggcgugggcuaucagcccuacagagugguggugcugagcuucgaacugcugcaugcuccugccacagugugcggcccuaagaaaagcaccaaucucgugaagaacaaaugcgugaacuucaacuucaacggccugaccggcaccggcgugcugacagagagcaacaagaaguuccugccauuccagcaguuuggccgggauaucgccgauaccacagacgccguuagagauccccagacacuggaaauccuggacaucaccccaugcagcuucggcggagugucugugaucaccccuggcaccaacaccagcaaucagguggcagugcuguaccagggcgugaacuguaccgaagugcccguggccauucacgccgaucagcugacaccuacauggcggguguacuccaccggcagcaauguguuucagaccagagccggcugucugaucggagccgagcacgugaacaauagcuacgagugcgacauccccaucggcgcuggcaucugugccagcuaccagacacagacaaacagccccagacgggcuagaagcguggccagccagagcaucauugccuacacaaugucucugggcgccgagaacagcguggccuacuccaacaacucuaucgcuauccccaccaacuucaccaucagcgugaccaccgagauccugccuguguccaugaccaagaccagcguggacugcaccauguacaucugcggcgauuccaccgagugcuccaaccugcugcugcaguacggcagcuucugcacccagcugaauagagcccugacagggaucgccguggaacaggacaagaacacccaagagguguucgcccaagugaagcaaaucuacaagaccccuccuaucaaggacuucggcggcuucaauuucagccagauucugcccgauccuagcaagcccagcaagcggagcuucaucgaggaccugcuguucaacaaagugacacuggccgacgccggcuucaucaagcaguauggcgauugucugggcgacauugccgccagggaucugauuugcgcccagaaguuuaacggacugacagugcugccuccucugcugaccgaugagaugaucgcccaguacacaucugcccugcuggccggcacaaucacaagcggcuggacauuuggagcuggcgccgcucugcagauccccuuugcuaugcagauggccuaccgguucaacggcaucggagugacccagaaugugcuguacgagaaccagaagcugaucgccaaccaguucaacagcgccaucggcaagauccaggacagccugagcagcacagcaagcgcccugggaaagcugcaggacguggucaaccagaaugcccaggcacugaacacccuggucaagcagcuguccuccaacuucggcgccaucagcucugugcugaacgauauccugagcagacuggacccuccugaggccgaggugcagaucgacagacugaucacaggcagacugcagagccuccagacauacgugacccagcagcugaucagagccgccgagauuagagccucugccaaucuggccgccaccaagaugucugagugugugcugggccagagcaagagaguggacuuuugcggcaagggcuaccaccugaugagcuucccucagucugccccucacggcgugguguuucugcacgugacauaugugcccgcucaagagaagaauuucaccaccgcuccagccaucugccacgacggcaaagcccacuuuccuagagaaggcguguucguguccaacggcacccauugguucgugacacagcggaacuucuacgagccccagaucaucaccaccgacaacaccuucgugucuggcaacugcgacguugugaucggcauugugaacaauaccguguacgacccucugcagcccgagcuggacagcuucaaagaggaacuggacaaguacuuuaagaaccacacaagccccgacguggaccugggcgauaucagcggaaucaaugccagcgucgugaacauccagaaagagaucgaccggcugaacgagguggccaagaaucugaacgagagccugaucgaccugcaagaacuggggaaguacgagcaguacaucaaguggcccugguacaucuggcugggcuuuaucgccggacugauugccaucgugauggucacaaucaugcuguguugcaugaccagcugcuguagcugccugaagggcuguuguagcuguggcagcugcugcaaguucgacgaggacgauucugagcccgugcugaagggcgugaaacugcacuacaccuga

SEQ ID NO: 23155 - RNA, 3816 nt, Artificial Sequence
  SARS-CoV-2/Wuhan/WIV05/2019__EPI_ISL_402128 spike protein CDS gc mod (1-1273)(K986P_V987P_H69del_V70del_D614G)
auguucguguuucuggugcugcugccccugguguccagccagugugugaaccugaccaccagaacacagcugccuccagccuacaccaacagcuucaccagaggcguguacuaccccgacaagguguucagauccagcgugcugcacucuacccaggaccuguuccugccuuucuucagcaacgugaccugguuccacgccaucuccggcaccaauggcaccaagagauucgacaaccccgugcugcccuucaacgacgggguguacuuugccagcaccgagaaguccaacaucaucagaggcuggaucuucggcaccacacuggacagcaagacccagagccugcugaucgugaacaacgccaccaacguggucaucaaagugugcgaguuccaguucugcaacgaccccuuccugggcgucuacuaccacaagaacaacaagagcuggauggaaagcgaguuccggguguacagcagcgccaacaacugcaccuucgaguacgugucccagccuuuccugauggaccuggaaggcaagcagggcaacuucaagaaccugcgcgaguucguguucaagaacaucgacggcuacuucaaaaucuacagcaagcacaccccuaucaaccucgugcgggaucugccucagggcuucucugcucuggaaccccugguggaucugcccaucggcaucaacaucacccgguuucagacacugcuggcccugcacagaagcuaccugacaccuggcgauagcagcagcggauggacagcuggugccgccgcuuacuaugugggcuaccugcagccuagaaccuuccugcugaaguacaacgagaacggcaccaucaccgacgccguggauugugcucuggauccucugagcgagacaaagugcacccugaaguccuucaccguggaaaagggcaucuaccagaccagcaacuuccgggugcagcccaccgaauccaucgugcgguuccccaauaucaccaaucugugccccuucggcgagguguucaaugccaccagauucgccucuguguacgccuggaaccggaagcggaucagcaauugcguggccgacuacuccgugcuguacaacuccgccagcuucagcaccuucaagugcuacggcguguccccuaccaagcugaacgaccugugcuucacaaacguguacgccgacagcuucgugauccggggagaugaagugcggcagauugccccuggacagacaggcaagaucgccgacuacaacuacaagcugcccgacgacuucaccggcugugugauugccuggaacagcaacaaccuggacuccaaagucggcggcaacuacaauuaccuguaccggcuguuccggaaguccaaucugaagcccuucgagcgggacaucagcaccgaaaucuaucaggccggcagcaccccuugcaacggcguggaaggcuucaacugcuacuucccacugcaguccuacggcuuucagcccacaaauggcgugggcuaucagcccuacagagugguggugcugagcuucgaacugcugcaugcuccugccacagugugcggcccuaagaaaagcaccaaucucgugaagaacaaaugcgugaacuucaacuucaacggccugaccggcaccggcgugcugacagagagcaacaagaaguuccugccauuccagcaguuuggccgggauaucgccgauaccacagacgccguuagagauccccagacacuggaaauccuggacaucaccccaugcagcuucggcggagugucugugaucaccccuggcaccaacaccagcaaucagguggcagugcuguaccagggcgugaacuguaccgaagugcccguggccauucacgccgaucagcugacaccuacauggcggguguacuccaccggcagcaauguguuucagaccagagccggcugucugaucggagccgagcacgugaacaauagcuacgagugcgacauccccaucggcgcuggcaucugugccagcuaccagacacagacaaacagccccagacgggcuagaagcguggccagccagagcaucauugccuacacaaugucucugggcgccgagaacagcguggccuacuccaacaacucuaucgcuauccccaccaacuucaccaucagcgugaccaccgagauccugccuguguccaugaccaagaccagcguggacugcaccauguacaucugcggcgauuccaccgagugcuccaaccugcugcugcaguacggcagcuucugcacccagcugaauagagcccugacagggaucgccguggaacaggacaagaacacccaagagguguucgcccaagugaagcaaaucuacaagaccccuccuaucaaggacuucggcggcuucaauuucagccagauucugcccgauccuagcaagcccagcaagcggagcuucaucgaggaccugcuguucaacaaagugacacuggccgacgccggcuucaucaagcaguauggcgauugucugggcgacauugccgccagggaucugauuugcgcccagaaguuuaacggacugacagugcugccuccucugcugaccgaugagaugaucgcccaguacacaucugcccugcuggccggcacaaucacaagcggcuggacauuuggagcuggcgccgcucugcagauccccuuugcuaugcagauggccuaccgguucaacggcaucggagugacccagaaugugcuguacgagaaccagaagcugaucgccaaccaguucaacagcgccaucggcaagauccaggacagccugagcagcacagcaagcgcccugggaaagcugcaggacguggucaaccagaaugcccaggcacugaacacccuggucaagcagcuguccuccaacuucggcgccaucagcucugugcugaacgauauccugagcagacuggacccuccugaggccgaggugcagaucgacagacugaucacaggcagacugcagagccuccagacauacgugacccagcagcugaucagagccgccgagauuagagccucugccaaucuggccgccaccaagaugucugagugugugcugggccagagcaagagaguggacuuuugcggcaagggcuaccaccugaugagcuucccucagucugccccucacggcgugguguuucugcacgugacauaugugcccgcucaagagaagaauuucaccaccgcuccagccaucugccacgacggcaaagcccacuuuccuagagaaggcguguucguguccaacggcacccauugguucgugacacagcggaacuucuacgagccccagaucaucaccaccgacaacaccuucgugucuggcaacugcgacguugugaucggcauugugaacaauaccguguacgacccucugcagcccgagcuggacagcuucaaagaggaacuggacaaguacuuuaagaaccacacaagccccgacguggaccugggcgauaucagcggaaucaaugccagcgucgugaacauccagaaagagaucgaccggcugaacgagguggccaagaaucugaacgagagccugaucgaccugcaagaacuggggaaguacgagcaguacaucaaguggcccugguacaucuggcugggcuuuaucgccggacugauugccaucgugauggucacaaucaugcuguguugcaugaccagcugcuguagcugccugaagggcuguuguagcuguggcagcugcugcaaguucgacgaggacgauucugagcccgugcugaagggcgugaaacugcacuacaccuga

SEQ ID NO: 23156 - RNA, 3822 nt, Artificial Sequence
  SARS-CoV-2/Wuhan/WIV05/2019__EPI_ISL_402128 spike protein CDS gc mod (1-1273)(K986P_V987P_Y453F_D614G)
auguucguguuucuggugcugcugccccugguguccagccagugugugaaccugaccaccagaacacagcugccuccagccuacaccaacagcuucaccagaggcguguacuaccccgacaagguguucagauccagcgugcugcacucuacccaggaccuguuccugccuuucuucagcaacgugaccugguuccacgccauccacguguccggcaccaauggcaccaagagauucgacaaccccgugcugcccuucaacgacgggguguacuuugccagcaccgagaaguccaacaucaucagaggcuggaucuucggcaccacacuggacagcaagacccagagccugcugaucgugaacaacgccaccaacguggucaucaaagugugcgaguuccaguucugcaacgaccccuuccugggcgucuacuaccacaagaacaacaagagcuggauggaaagcgaguuccggguguacagcagcgccaacaacugcaccuucgaguacgugucccagccuuuccugauggaccuggaaggcaagcagggcaacuucaagaaccugcgcgaguucguguucaagaacaucgacggcuacuucaaaaucuacagcaagcacaccccuaucaaccucgugcgggaucugccucagggcuucucugcucuggaaccccugguggaucugcccaucggcaucaacaucacccgguuucagacacugcuggcccugcacagaagcuaccugacaccuggcgauagcagcagcggauggacagcuggugccgccgcuuacuaugugggcuaccugcagccuagaaccuuccugcugaaguacaacgagaacggcaccaucaccgacgccguggauugugcucuggauccucugagcgagacaaagugcacccugaaguccuucaccguggaaaagggcaucuaccagaccagcaacuuccgggugcagcccaccgaauccaucgugcgguuccccaauaucaccaaucugugccccuucggcgagguguucaaugccaccagauucgccucuguguacgccuggaaccggaagcggaucagcaauugcguggccgacuacuccgugcuguacaacuccgccagcuucagcaccuucaagugcuacggcguguccccuaccaagcugaacgaccugugcuucacaaacguguacgccgacagcuucgugauccggggagaugaagugcggcagauugccccuggacagacaggcaagaucgccgacuacaacuacaagcugcccgacgacuucaccggcugugugauugccuggaacagcaacaaccuggacuccaaagucggcggcaacuacaauuaccuguuccggcuguuccggaaguccaaucugaagcccuucgagcgggacaucagcaccgaaaucuaucaggccggcagcaccccuugcaacggcguggaaggcuucaacugcuacuucccacugcaguccuacggcuuucagcccacaaauggcgugggcuaucagcccuacagagugguggugcugagcuucgaacugcugcaugcuccugccacagugugcggcccuaagaaaagcaccaaucucgugaagaacaaaugcgugaacuucaacuucaacggccugaccggcaccggcgugcugacagagagcaacaagaaguuccugccauuccagcaguuuggccgggauaucgccgauaccacagacgccguuagagauccccagacacuggaaauccuggacaucaccccaugcagcuucggcggagugucugugaucaccccuggcaccaacaccagcaaucagguggcagugcuguaccagggcgugaacuguaccgaagugcccguggccauucacgccgaucagcugacaccuacauggcggguguacuccaccggcagcaauguguuucagaccagagccggcugucugaucggagccgagcacgugaacaauagcuacgagugcgacauccccaucggcgcuggcaucugugccagcuaccagacacagacaaacagccccagacgggcuagaagcguggccagccagagcaucauugccuacacaaugucucugggcgccgagaacagcguggccuacuccaacaacucuaucgcuauccccaccaacuucaccaucagcgugaccaccgagauccugccuguguccaugaccaagaccagcguggacugcaccauguacaucugcggcgauuccaccgagugcuccaaccugcugcugcaguacggcagcuucugcacccagcugaauagagcccugacagggaucgccguggaacaggacaagaacacccaagagguguucgcccaagugaagcaaaucuacaagaccccuccuaucaaggacuucggcggcuucaauuucagccagauucugcccgauccuagcaagcccagcaagcggagcuucaucgaggaccugcuguucaacaaagugacacuggccgacgccggcuucaucaagcaguauggcgauugucugggcgacauugccgccagggaucugauuugcgcccagaaguuuaacggacugacagugcugccuccucugcugaccgaugagaugaucgcccaguacacaucugcccugcuggccggcacaaucacaagcggcuggacauuuggagcuggcgccgcucugcagauccccuuugcuaugcagauggccuaccgguucaacggcaucggagugacccagaaugugcuguacgagaaccagaagcugaucgccaaccaguucaacagcgccaucggcaagauccaggacagccugagcagcacagcaagcgcccugggaaagcugcaggacguggucaaccagaaugcccaggcacugaacacccuggucaagcagcuguccuccaacuucggcgccaucagcucugugcugaacgauauccugagcagacuggacccuccugaggccgaggugcagaucgacagacugaucacaggcagacugcagagccuccagacauacgugacccagcagcugaucagagccgccgagauuagagccucugccaaucuggccgccaccaagaugucugagugugugcugggccagagcaagagaguggacuuuugcggcaagggcuaccaccugaugagcuucccucagucugccccucacggcgugguguuucugcacgugacauaugugcccgcucaagagaagaauuucaccaccgcuccagccaucugccacgacggcaaagcccacuuuccuagagaaggcguguucguguccaacggcacccauugguucgugacacagcggaacuucuacgagccccagaucaucaccaccgacaacaccuucgugucuggcaacugcgacguugugaucggcauugugaacaauaccguguacgacccucugcagcccgagcuggacagcuucaaagaggaacuggacaaguacuuuaagaaccacacaagccccgacguggaccugggcgauaucagcggaaucaaugccagcgucgugaacauccagaaagagaucgaccggcugaacgagguggccaagaaucugaacgagagccugaucgaccugcaagaacuggggaaguacgagcaguacaucaaguggcccugguacaucuggcugggcuuuaucgccggacugauugccaucgugauggucacaaucaugcuguguugcaugaccagcugcuguagcugccugaagggcuguuguagcuguggcagcugcugcaaguucgacgaggacgauucugagcccgugcugaagggcgugaaacugcacuacaccuga

SEQ ID NO: 23157 - RNA, 3822 nt, Artificial Sequence
  SARS-CoV-2/Wuhan/WIV05/2019__EPI_ISL_402128 spike protein CDS gc mod (1-1273)(K986P_V987P_D614G_I692V)
auguucguguuucuggugcugcugccccugguguccagccagugugugaaccugaccaccagaacacagcugccuccagccuacaccaacagcuucaccagaggcguguacuaccccgacaagguguucagauccagcgugcugcacucuacccaggaccuguuccugccuuucuucagcaacgugaccugguuccacgccauccacguguccggcaccaauggcaccaagagauucgacaaccccgugcugcccuucaacgacgggguguacuuugccagcaccgagaaguccaacaucaucagaggcuggaucuucggcaccacacuggacagcaagacccagagccugcugaucgugaacaacgccaccaacguggucaucaaagugugcgaguuccaguucugcaacgaccccuuccugggcgucuacuaccacaagaacaacaagagcuggauggaaagcgaguuccggguguacagcagcgccaacaacugcaccuucgaguacgugucccagccuuuccugauggaccuggaaggcaagcagggcaacuucaagaaccugcgcgaguucguguucaagaacaucgacggcuacuucaaaaucuacagcaagcacaccccuaucaaccucgugcgggaucugccucagggcuucucugcucuggaaccccugguggaucugcccaucggcaucaacaucacccgguuucagacacugcuggcccugcacagaagcuaccugacaccuggcgauagcagcagcggauggacagcuggugccgccgcuuacuaugugggcuaccugcagccuagaaccuuccugcugaaguacaacgagaacggcaccaucaccgacgccguggauugugcucuggauccucugagcgagacaaagugcacccugaaguccuucaccguggaaaagggcaucuaccagaccagcaacuuccgggugcagcccaccgaauccaucgugcgguuccccaauaucaccaaucugugccccuucggcgagguguucaaugccaccagauucgccucuguguacgccuggaaccggaagcggaucagcaauugcguggccgacuacuccgugcuguacaacuccgccagcuucagcaccuucaagugcuacggcguguccccuaccaagcugaacgaccugugcuucacaaacguguacgccgacagcuucgugauccggggagaugaagugcggcagauugccccuggacagacaggcaagaucgccgacuacaacuacaagcugcccgacgacuucaccggcugugugauugccuggaacagcaacaaccuggacuccaaagucggcggcaacuacaauuaccuguaccggcuguuccggaaguccaaucugaagcccuucgagcgggacaucagcaccgaaaucuaucaggccggcagcaccccuugcaacggcguggaaggcuucaacugcuacuucccacugcaguccuacggcuuucagcccacaaauggcgugggcuaucagcccuacagagugguggugcugagcuucgaacugcugcaugcuccugccacagugugcggcccuaagaaaagcaccaaucucgugaagaacaaaugcgugaacuucaacuucaacggccugaccggcaccggcgugcugacagagagcaacaagaaguuccugccauuccagcaguuuggccgggauaucgccgauaccacagacgccguuagagauccccagacacuggaaauccuggacaucaccccaugcagcuucggcggagugucugugaucaccccuggcaccaacaccagcaaucagguggcagugcuguaccagggcgugaacuguaccgaagugcccguggccauucacgccgaucagcugacaccuacauggcggguguacuccaccggcagcaauguguuucagaccagagccggcugucugaucggagccgagcacgugaacaauagcuacgagugcgacauccccaucggcgcuggcaucugugccagcuaccagacacagacaaacagccccagacgggcuagaagcguggccagccagagcgugauugccuacacaaugucucugggcgccgagaacagcguggccuacuccaacaacucuaucgcuauccccaccaacuucaccaucagcgugaccaccgagauccugccuguguccaugaccaagaccagcguggacugcaccauguacaucugcggcgauuccaccgagugcuccaaccugcugcugcaguacggcagcuucugcacccagcugaauagagcccugacagggaucgccguggaacaggacaagaacacccaagagguguucgcccaagugaagcaaaucuacaagaccccuccuaucaaggacuucggcggcuucaauuucagccagauucugcccgauccuagcaagcccagcaagcggagcuucaucgaggaccugcuguucaacaaagugacacuggccgacgccggcuucaucaagcaguauggcgauugucugggcgacauugccgccagggaucugauuugcgcccagaaguuuaacggacugacagugcugccuccucugcugaccgaugagaugaucgcccaguacacaucugcccugcuggccggcacaaucacaagcggcuggacauuuggagcuggcgccgcucugcagauccccuuugcuaugcagauggccuaccgguucaacggcaucggagugacccagaaugugcuguacgagaaccagaagcugaucgccaaccaguucaacagcgccaucggcaagauccaggacagccugagcagcacagcaagcgcccugggaaagcugcaggacguggucaaccagaaugcccaggcacugaacacccuggucaagcagcuguccuccaacuucggcgccaucagcucugugcugaacgauauccugagcagacuggacccuccugaggccgaggugcagaucgacagacugaucacaggcagacugcagagccuccagacauacgugacccagcagcugaucagagccgccgagauuagagccucugccaaucuggccgccaccaagaugucugagugugugcugggccagagcaagagaguggacuuuugcggcaagggcuaccaccugaugagcuucccucagucugccccucacggcgugguguuucugcacgugacauaugugcccgcucaagagaagaauuucaccaccgcuccagccaucugccacgacggcaaagcccacuuuccuagagaaggcguguucguguccaacggcacccauugguucgugacacagcggaacuucuacgagccccagaucaucaccaccgacaacaccuucgugucuggcaacugcgacguugugaucggcauugugaacaauaccguguacgacccucugcagcccgagcuggacagcuucaaagaggaacuggacaaguacuuuaagaaccacacaagccccgacguggaccugggcgauaucagcggaaucaaugccagcgucgugaacauccagaaagagaucgaccggcugaacgagguggccaagaaucugaacgagagccugaucgaccugcaagaacuggggaaguacgagcaguacaucaaguggcccugguacaucuggcugggcuuuaucgccggacugauugccaucgugauggucacaaucaugcuguguugcaugaccagcugcuguagcugccugaagggcuguuguagcuguggcagcugcugcaaguucgacgaggacgauucugagcccgugcugaagggcgugaaacugcacuacaccuga

SEQ ID NO: 23158 - RNA, 3822 nt, Artificial Sequence
  SARS-CoV-2/Wuhan/WIV05/2019__EPI_ISL_402128 spike protein CDS gc mod (1-1273)(K986P_V987P_D614G_M1229I)
auguucguguuucuggugcugcugccccugguguccagccagugugugaaccugaccaccagaacacagcugccuccagccuacaccaacagcuucaccagaggcguguacuaccccgacaagguguucagauccagcgugcugcacucuacccaggaccuguuccugccuuucuucagcaacgugaccugguuccacgccauccacguguccggcaccaauggcaccaagagauucgacaaccccgugcugcccuucaacgacgggguguacuuugccagcaccgagaaguccaacaucaucagaggcuggaucuucggcaccacacuggacagcaagacccagagccugcugaucgugaacaacgccaccaacguggucaucaaagugugcgaguuccaguucugcaacgaccccuuccugggcgucuacuaccacaagaacaacaagagcuggauggaaagcgaguuccggguguacagcagcgccaacaacugcaccuucgaguacgugucccagccuuuccugauggaccuggaaggcaagcagggcaacuucaagaaccugcgcgaguucguguucaagaacaucgacggcuacuucaaaaucuacagcaagcacaccccuaucaaccucgugcgggaucugccucagggcuucucugcucuggaaccccugguggaucugcccaucggcaucaacaucacccgguuucagacacugcuggcccugcacagaagcuaccugacaccuggcgauagcagcagcggauggacagcuggugccgccgcuuacuaugugggcuaccugcagccuagaaccuuccugcugaaguacaacgagaacggcaccaucaccgacgccguggauugugcucuggauccucugagcgagacaaagugcacccugaaguccuucaccguggaaaagggcaucuaccagaccagcaacuuccgggugcagcccaccgaauccaucgugcgguuccccaauaucaccaaucugugccccuucggcgagguguucaaugccaccagauucgccucuguguacgccuggaaccggaagcggaucagcaauugcguggccgacuacuccgugcuguacaacuccgccagcuucagcaccuucaagugcuacggcguguccccuaccaagcugaacgaccugugcuucacaaacguguacgccgacagcuucgugauccggggagaugaagugcggcagauugccccuggacagacaggcaagaucgccgacuacaacuacaagcugcccgacgacuucaccggcugugugauugccuggaacagcaacaaccuggacuccaaagucggcggcaacuacaauuaccuguaccggcuguuccggaaguccaaucugaagcccuucgagcgggacaucagcaccgaaaucuaucaggccggcagcaccccuugcaacggcguggaaggcuucaacugcuacuucccacugcaguccuacggcuuucagcccacaaauggcgugggcuaucagcccuacagagugguggugcugagcuucgaacugcugcaugcuccugccacagugugcggcccuaagaaaagcaccaaucucgugaagaacaaaugcgugaacuucaacuucaacggccugaccggcaccggcgugcugacagagagcaacaagaaguuccugccauuccagcaguuuggccgggauaucgccgauaccacagacgccguuagagauccccagacacuggaaauccuggacaucaccccaugcagcuucggcggagugucugugaucaccccuggcaccaacaccagcaaucagguggcagugcuguaccagggcgugaacuguaccgaagugcccguggccauucacgccgaucagcugacaccuacauggcggguguacuccaccggcagcaauguguuucagaccagagccggcugucugaucggagccgagcacgugaacaauagcuacgagugcgacauccccaucggcgcuggcaucugugccagcuaccagacacagacaaacagccccagacgggcuagaagcguggccagccagagcaucauugccuacacaaugucucugggcgccgagaacagcguggccuacuccaacaacucuaucgcuauccccaccaacuucaccaucagcgugaccaccgagauccugccuguguccaugaccaagaccagcguggacugcaccauguacaucugcggcgauuccaccgagugcuccaaccugcugcugcaguacggcagcuucugcacccagcugaauagagcccugacagggaucgccguggaacaggacaagaacacccaagagguguucgcccaagugaagcaaaucuacaagaccccuccuaucaaggacuucggcggcuucaauuucagccagauucugcccgauccuagcaagcccagcaagcggagcuucaucgaggaccugcuguucaacaaagugacacuggccgacgccggcuucaucaagcaguauggcgauugucugggcgacauugccgccagggaucugauuugcgcccagaaguuuaacggacugacagugcugccuccucugcugaccgaugagaugaucgcccaguacacaucugcccugcuggccggcacaaucacaagcggcuggacauuuggagcuggcgccgcucugcagauccccuuugcuaugcagauggccuaccgguucaacggcaucggagugacccagaaugugcuguacgagaaccagaagcugaucgccaaccaguucaacagcgccaucggcaagauccaggacagccugagcagcacagcaagcgcccugggaaagcugcaggacguggucaaccagaaugcccaggcacugaacacccuggucaagcagcuguccuccaacuucggcgccaucagcucugugcugaacgauauccugagcagacuggacccuccugaggccgaggugcagaucgacagacugaucacaggcagacugcagagccuccagacauacgugacccagcagcugaucagagccgccgagauuagagccucugccaaucuggccgccaccaagaugucugagugugugcugggccagagcaagagaguggacuuuugcggcaagggcuaccaccugaugagcuucccucagucugccccucacggcgugguguuucugcacgugacauaugugcccgcucaagagaagaauuucaccaccgcuccagccaucugccacgacggcaaagcccacuuuccuagagaaggcguguucguguccaacggcacccauugguucgugacacagcggaacuucuacgagccccagaucaucaccaccgacaacaccuucgugucuggcaacugcgacguugugaucggcauugugaacaauaccguguacgacccucugcagcccgagcuggacagcuucaaagaggaacuggacaaguacuuuaagaaccacacaagccccgacguggaccugggcgauaucagcggaaucaaugccagcgucgugaacauccagaaagagaucgaccggcugaacgagguggccaagaaucugaacgagagccugaucgaccugcaagaacuggggaaguacgagcaguacaucaaguggcccugguacaucuggcugggcuuuaucgccggacugauugccaucgugaucgucacaaucaugcuguguugcaugaccagcugcuguagcugccugaagggcuguuguagcuguggcagcugcugcaaguucgacgaggacgauucugagcccgugcugaagggcgugaaacugcacuacaccuga

SEQ ID NO: 23159 - RNA, 3816 nt, Artificial Sequence
  SARS-CoV-2/Wuhan/WIV05/2019__EPI_ISL_402128 spike protein CDS gc mod (1-1273)(K986P_V987P_H69del_V70del_A222V_Y453F_S477N_D614G_I692V)
auguucguguuucuggugcugcugccccugguguccagccagugugugaaccugaccaccagaacacagcugccuccagccuacaccaacagcuucaccagaggcguguacuaccccgacaagguguucagauccagcgugcugcacucuacccaggaccuguuccugccuuucuucagcaacgugaccugguuccacgccaucuccggcaccaauggcaccaagagauucgacaaccccgugcugcccuucaacgacgggguguacuuugccagcaccgagaaguccaacaucaucagaggcuggaucuucggcaccacacuggacagcaagacccagagccugcugaucgugaacaacgccaccaacguggucaucaaagugugcgaguuccaguucugcaacgaccccuuccugggcgucuacuaccacaagaacaacaagagcuggauggaaagcgaguuccggguguacagcagcgccaacaacugcaccuucgaguacgugucccagccuuuccugauggaccuggaaggcaagcagggcaacuucaagaaccugcgcgaguucguguucaagaacaucgacggcuacuucaaaaucuacagcaagcacaccccuaucaaccucgugcgggaucugccucagggcuucucugugcuggaaccccugguggaucugcccaucggcaucaacaucacccgguuucagacacugcuggcccugcacagaagcuaccugacaccuggcgauagcagcagcggauggacagcuggugccgccgcuuacuaugugggcuaccugcagccuagaaccuuccugcugaaguacaacgagaacggcaccaucaccgacgccguggauugugcucuggauccucugagcgagacaaagugcacccugaaguccuucaccguggaaaagggcaucuaccagaccagcaacuuccgggugcagcccaccgaauccaucgugcgguuccccaauaucaccaaucugugccccuucggcgagguguucaaugccaccagauucgccucuguguacgccuggaaccggaagcggaucagcaauugcguggccgacuacuccgugcuguacaacuccgccagcuucagcaccuucaagugcuacggcguguccccuaccaagcugaacgaccugugcuucacaaacguguacgccgacagcuucgugauccggggagaugaagugcggcagauugccccuggacagacaggcaagaucgccgacuacaacuacaagcugcccgacgacuucaccggcugugugauugccuggaacagcaacaaccuggacuccaaagucggcggcaacuacaauuaccuguuccggcuguuccggaaguccaaucugaagcccuucgagcgggacaucagcaccgaaaucuaucaggccggcaacaccccuugcaacggcguggaaggcuucaacugcuacuucccacugcaguccuacggcuuucagcccacaaauggcgugggcuaucagcccuacagagugguggugcugagcuucgaacugcugcaugcuccugccacagugugcggcccuaagaaaagcaccaaucucgugaagaacaaaugcgugaacuucaacuucaacggccugaccggcaccggcgugcugacagagagcaacaagaaguuccugccauuccagcaguuuggccgggauaucgccgauaccacagacgccguuagagauccccagacacuggaaauccuggacaucaccccaugcagcuucggcggagugucugugaucaccccuggcaccaacaccagcaaucagguggcagugcuguaccagggcgugaacuguaccgaagugcccguggccauucacgccgaucagcugacaccuacauggcggguguacuccaccggcagcaauguguuucagaccagagccggcugucugaucggagccgagcacgugaacaauagcuacgagugcgacauccccaucggcgcuggcaucugugccagcuaccagacacagacaaacagccccagacgggcuagaagcguggccagccagagcgugauugccuacacaaugucucugggcgccgagaacagcguggccuacuccaacaacucuaucgcuauccccaccaacuucaccaucagcgugaccaccgagauccugccuguguccaugaccaagaccagcguggacugcaccauguacaucugcggcgauuccaccgagugcuccaaccugcugcugcaguacggcagcuucugcacccagcugaauagagcccugacagggaucgccguggaacaggacaagaacacccaagagguguucgcccaagugaagcaaaucuacaagaccccuccuaucaaggacuucggcggcuucaauuucagccagauucugcccgauccuagcaagcccagcaagcggagcuucaucgaggaccugcuguucaacaaagugacacuggccgacgccggcuucaucaagcaguauggcgauugucugggcgacauugccgccagggaucugauuugcgcccagaaguuuaacggacugacagugcugccuccucugcugaccgaugagaugaucgcccaguacacaucugcccugcuggccggcacaaucacaagcggcuggacauuuggagcuggcgccgcucugcagauccccuuugcuaugcagauggccuaccgguucaacggcaucggagugacccagaaugugcuguacgagaaccagaagcugaucgccaaccaguucaacagcgccaucggcaagauccaggacagccugagcagcacagcaagcgcccugggaaagcugcaggacguggucaaccagaaugcccaggcacugaacacccuggucaagcagcuguccuccaacuucggcgccaucagcucugugcugaacgauauccugagcagacuggacccuccugaggccgaggugcagaucgacagacugaucacaggcagacugcagagccuccagacauacgugacccagcagcugaucagagccgccgagauuagagccucugccaaucuggccgccaccaagaugucugagugugugcugggccagagcaagagaguggacuuuugcggcaagggcuaccaccugaugagcuucccucagucugccccucacggcgugguguuucugcacgugacauaugugcccgcucaagagaagaauuucaccaccgcuccagccaucugccacgacggcaaagcccacuuuccuagagaaggcguguucguguccaacggcacccauugguucgugacacagcggaacuucuacgagccccagaucaucaccaccgacaacaccuucgugucuggcaacugcgacguugugaucggcauugugaacaauaccguguacgacccucugcagcccgagcuggacagcuucaaagaggaacuggacaaguacuuuaagaaccacacaagccccgacguggaccugggcgauaucagcggaaucaaugccagcgucgugaacauccagaaagagaucgaccggcugaacgagguggccaagaaucugaacgagagccugaucgaccugcaagaacuggggaaguacgagcaguacaucaaguggcccugguacaucuggcugggcuuuaucgccggacugauugccaucgugauggucacaaucaugcuguguugcaugaccagcugcuguagcugccugaagggcuguuguagcuguggcagcugcugcaaguucgacgaggacgauucugagcccgugcugaagggcgugaaacugcacuacaccuga

SEQ ID NO: 23160 - RNA, 3816 nt, Artificial Sequence
  SARS-CoV-2/Wuhan/WIV05/2019__EPI_ISL_402128 spike protein CDS gc mod (1-1273)(K986P_V987P_H69del_V70del_Y453F_D614G_I692V_M1229I)
auguucguguuucuggugcugcugccccugguguccagccagugugugaaccugaccaccagaacacagcugccuccagccuacaccaacagcuucaccagaggcguguacuaccccgacaagguguucagauccagcgugcugcacucuacccaggaccuguuccugccuuucuucagcaacgugaccugguuccacgccaucuccggcaccaauggcaccaagagauucgacaaccccgugcugcccuucaacgacgggguguacuuugccagcaccgagaaguccaacaucaucagaggcuggaucuucggcaccacacuggacagcaagacccagagccugcugaucgugaacaacgccaccaacguggucaucaaagugugcgaguuccaguucugcaacgaccccuuccugggcgucuacuaccacaagaacaacaagagcuggauggaaagcgaguuccggguguacagcagcgccaacaacugcaccuucgaguacgugucccagccuuuccugauggaccuggaaggcaagcagggcaacuucaagaaccugcgcgaguucguguucaagaacaucgacggcuacuucaaaaucuacagcaagcacaccccuaucaaccucgugcgggaucugccucagggcuucucugcucuggaaccccugguggaucugcccaucggcaucaacaucacccgguuucagacacugcuggcccugcacagaagcuaccugacaccuggcgauagcagcagcggauggacagcuggugccgccgcuuacuaugugggcuaccugcagccuagaaccuuccugcugaaguacaacgagaacggcaccaucaccgacgccguggauugugcucuggauccucugagcgagacaaagugcacccugaaguccuucaccguggaaaagggcaucuaccagaccagcaacuuccgggugcagcccaccgaauccaucgugcgguuccccaauaucaccaaucugugccccuucggcgagguguucaaugccaccagauucgccucuguguacgccuggaaccggaagcggaucagcaauugcguggccgacuacuccgugcuguacaacuccgccagcuucagcaccuucaagugcuacggcguguccccuaccaagcugaacgaccugugcuucacaaacguguacgccgacagcuucgugauccggggagaugaagugcggcagauugccccuggacagacaggcaagaucgccgacuacaacuacaagcugcccgacgacuucaccggcugugugauugccuggaacagcaacaaccuggacuccaaagucggcggcaacuacaauuaccuguuccggcuguuccggaaguccaaucugaagcccuucgagcgggacaucagcaccgaaaucuaucaggccggcagcaccccuugcaacggcguggaaggcuucaacugcuacuucccacugcaguccuacggcuuucagcccacaaauggcgugggcuaucagcccuacagagugguggugcugagcuucgaacugcugcaugcuccugccacagugugcggcccuaagaaaagcaccaaucucgugaagaacaaaugcgugaacuucaacuucaacggccugaccggcaccggcgugcugacagagagcaacaagaaguuccugccauuccagcaguuuggccgggauaucgccgauaccacagacgccguuagagauccccagacacuggaaauccuggacaucaccccaugcagcuucggcggagugucugugaucaccccuggcaccaacaccagcaaucagguggcagugcuguaccagggcgugaacuguaccgaagugcccguggccauucacgccgaucagcugacaccuacauggcggguguacuccaccggcagcaauguguuucagaccagagccggcugucugaucggagccgagcacgugaacaauagcuacgagugcgacauccccaucggcgcuggcaucugugccagcuaccagacacagacaaacagccccagacgggcuagaagcguggccagccagagcgugauugccuacacaaugucucugggcgccgagaacagcguggccuacuccaacaacucuaucgcuauccccaccaacuucaccaucagcgugaccaccgagauccugccuguguccaugaccaagaccagcguggacugcaccauguacaucugcggcgauuccaccgagugcuccaaccugcugcugcaguacggcagcuucugcacccagcugaauagagcccugacagggaucgccguggaacaggacaagaacacccaagagguguucgcccaagugaagcaaaucuacaagaccccuccuaucaaggacuucggcggcuucaauuucagccagauucugcccgauccuagcaagcccagcaagcggagcuucaucgaggaccugcuguucaacaaagugacacuggccgacgccggcuucaucaagcaguauggcgauugucugggcgacauugccgccagggaucugauuugcgcccagaaguuuaacggacugacagugcugccuccucugcugaccgaugagaugaucgcccaguacacaucugcccugcuggccggcacaaucacaagcggcuggacauuuggagcuggcgccgcucugcagauccccuuugcuaugcagauggccuaccgguucaacggcaucggagugacccagaaugugcuguacgagaaccagaagcugaucgccaaccaguucaacagcgccaucggcaagauccaggacagccugagcagcacagcaagcgcccugggaaagcugcaggacguggucaaccagaaugcccaggcacugaacacccuggucaagcagcuguccuccaacuucggcgccaucagcucugugcugaacgauauccugagcagacuggacccuccugaggccgaggugcagaucgacagacugaucacaggcagacugcagagccuccagacauacgugacccagcagcugaucagagccgccgagauuagagccucugccaaucuggccgccaccaagaugucugagugugugcugggccagagcaagagaguggacuuuugcggcaagggcuaccaccugaugagcuucccucagucugccccucacggcgugguguuucugcacgugacauaugugcccgcucaagagaagaauuucaccaccgcuccagccaucugccacgacggcaaagcccacuuuccuagagaaggcguguucguguccaacggcacccauugguucgugacacagcggaacuucuacgagccccagaucaucaccaccgacaacaccuucgugucuggcaacugcgacguugugaucggcauugugaacaauaccguguacgacccucugcagcccgagcuggacagcuucaaagaggaacuggacaaguacuuuaagaaccacacaagccccgacguggaccugggcgauaucagcggaaucaaugccagcgucgugaacauccagaaagagaucgaccggcugaacgagguggccaagaaucugaacgagagccugaucgaccugcaagaacuggggaaguacgagcaguacaucaaguggcccugguacaucuggcugggcuuuaucgccggacugauugccaucgugaucgucacaaucaugcuguguugcaugaccagcugcuguagcugccugaagggcuguuguagcuguggcagcugcugcaaguucgacgaggacgauucugagcccgugcugaagggcgugaaacugcacuacaccuga

SEQ ID NO: 23161 - RNA, 3813 nt, Artificial Sequence
  SARS-CoV-2/Wuhan/WIV05/2019__EPI_ISL_402128 spike protein CDS gc mod (1-1273)(K986P_V987P_K986P_V987P_H69del_V70del_Y144del_N501Y_A570 D_D614G_P681H_T716I_S982A_D1118H)
auguucguguuucuggugcugcugccccugguguccagccagugugugaaccugaccaccagaacacagcugccuccagccuacaccaacagcuucaccagaggcguguacuaccccgacaagguguucagauccagcgugcugcacucuacccaggaccuguuccugccuuucuucagcaacgugaccugguuccacgccaucuccggcaccaauggcaccaagagauucgacaaccccgugcugcccuucaacgacgggguguacuuugccagcaccgagaaguccaacaucaucagaggcuggaucuucggcaccacacuggacagcaagacccagagccugcugaucgugaacaacgccaccaacguggucaucaaagugugcgaguuccaguucugcaacgaccccuuccugggcgucuaccacaagaacaacaagagcuggauggaaagcgaguuccggguguacagcagcgccaacaacugcaccuucgaguacgugucccagccuuuccugauggaccuggaaggcaagcagggcaacuucaagaaccugcgcgaguucguguucaagaacaucgacggcuacuucaaaaucuacagcaagcacaccccuaucaaccucgugcgggaucugccucagggcuucucugcucuggaaccccugguggaucugcccaucggcaucaacaucacccgguuucagacacugcuggcccugcacagaagcuaccugacaccuggcgauagcagcagcggauggacagcuggugccgccgcuuacuaugugggcuaccugcagccuagaaccuuccugcugaaguacaacgagaacggcaccaucaccgacgccguggauugugcucuggauccucugagcgagacaaagugcacccugaaguccuucaccguggaaaagggcaucuaccagaccagcaacuuccgggugcagcccaccgaauccaucgugcgguuccccaauaucaccaaucugugccccuucggcgagguguucaaugccaccagauucgccucuguguacgccuggaaccggaagcggaucagcaauugcguggccgacuacuccgugcuguacaacuccgccagcuucagcaccuucaagugcuacggcguguccccuaccaagcugaacgaccugugcuucacaaacguguacgccgacagcuucgugauccggggagaugaagugcggcagauugccccuggacagacaggcaagaucgccgacuacaacuacaagcugcccgacgacuucaccggcugugugauugccuggaacagcaacaaccuggacuccaaagucggcggcaacuacaauuaccuguaccggcuguuccggaaguccaaucugaagcccuucgagcgggacaucagcaccgaaaucuaucaggccggcagcaccccuugcaacggcguggaaggcuucaacugcuacuucccacugcaguccuacggcuuucagcccacauacggcgugggcuaucagcccuacagagugguggugcugagcuucgaacugcugcaugcuccugccacagugugcggcccuaagaaaagcaccaaucucgugaagaacaaaugcgugaacuucaacuucaacggccugaccggcaccggcgugcugacagagagcaacaagaaguuccugccauuccagcaguuuggccgggauaucgacgauaccacagacgccguuagagauccccagacacuggaaauccuggacaucaccccaugcagcuucggcggagugucugugaucaccccuggcaccaacaccagcaaucagguggcagugcuguaccagggcgugaacuguaccgaagugcccguggccauucacgccgaucagcugacaccuacauggcggguguacuccaccggcagcaauguguuucagaccagagccggcugucugaucggagccgagcacgugaacaauagcuacgagugcgacauccccaucggcgcuggcaucugugccagcuaccagacacagacaaacagccacagacgggcuagaagcguggccagccagagcaucauugccuacacaaugucucugggcgccgagaacagcguggccuacuccaacaacucuaucgcuauccccaucaacuucaccaucagcgugaccaccgagauccugccuguguccaugaccaagaccagcguggacugcaccauguacaucugcggcgauuccaccgagugcuccaaccugcugcugcaguacggcagcuucugcacccagcugaauagagcccugacagggaucgccguggaacaggacaagaacacccaagagguguucgcccaagugaagcaaaucuacaagaccccuccuaucaaggacuucggcggcuucaauuucagccagauucugcccgauccuagcaagcccagcaagcggagcuucaucgaggaccugcuguucaacaaagugacacuggccgacgccggcuucaucaagcaguauggcgauugucugggcgacauugccgccagggaucugauuugcgcccagaaguuuaacggacugacagugcugccuccucugcugaccgaugagaugaucgcccaguacacaucugcccugcuggccggcacaaucacaagcggcuggacauuuggagcuggcgccgcucugcagauccccuuugcuaugcagauggccuaccgguucaacggcaucggagugacccagaaugugcuguacgagaaccagaagcugaucgccaaccaguucaacagcgccaucggcaagauccaggacagccugagcagcacagcaagcgcccugggaaagcugcaggacguggucaaccagaaugcccaggcacugaacacccuggucaagcagcuguccuccaacuucggcgccaucagcucugugcugaacgauauccuggccagacuggacccuccugaggccgaggugcagaucgacagacugaucacaggcagacugcagagccuccagacauacgugacccagcagcugaucagagccgccgagauuagagccucugccaaucuggccgccaccaagaugucugagugugugcugggccagagcaagagaguggacuuuugcggcaagggcuaccaccugaugagcuucccucagucugccccucacggcgugguguuucugcacgugacauaugugcccgcucaagagaagaauuucaccaccgcuccagccaucugccacgacggcaaagcccacuuuccuagagaaggcguguucguguccaacggcacccauugguucgugacacagcggaacuucuacgagccccagaucaucaccacccacaacaccuucgugucuggcaacugcgacguugugaucggcauugugaacaauaccguguacgacccucugcagcccgagcuggacagcuucaaagaggaacuggacaaguacuuuaagaaccacacaagccccgacguggaccugggcgauaucagcggaaucaaugccagcgucgugaacauccagaaagagaucgaccggcugaacgagguggccaagaaucugaacgagagccugaucgaccugcaagaacuggggaaguacgagcaguacaucaaguggcccugguacaucuggcugggcuuuaucgccggacugauugccaucgugauggucacaaucaugcuguguugcaugaccagcugcuguagcugccugaagggcuguuguagcuguggcagcugcugcaaguucgacgaggacgauucugagcccgugcugaagggcgugaaacugcacuacaccuga

SEQ ID NO: 23162 - RNA, 3822 nt, Artificial Sequence
  SARS-CoV-2/Wuhan/WIV05/2019__EPI_ISL_402128 spike protein CDS gc mod (1-1273)(K986P_V987P_K986P_V987P_K417N_E484K_N501Y_D614G)
auguucguguuucuggugcugcugccccugguguccagccagugugugaaccugaccaccagaacacagcugccuccagccuacaccaacagcuucaccagaggcguguacuaccccgacaagguguucagauccagcgugcugcacucuacccaggaccuguuccugccuuucuucagcaacgugaccugguuccacgccauccacguguccggcaccaauggcaccaagagauucgacaaccccgugcugcccuucaacgacgggguguacuuugccagcaccgagaaguccaacaucaucagaggcuggaucuucggcaccacacuggacagcaagacccagagccugcugaucgugaacaacgccaccaacguggucaucaaagugugcgaguuccaguucugcaacgaccccuuccugggcgucuacuaccacaagaacaacaagagcuggauggaaagcgaguuccggguguacagcagcgccaacaacugcaccuucgaguacgugucccagccuuuccugauggaccuggaaggcaagcagggcaacuucaagaaccugcgcgaguucguguucaagaacaucgacggcuacuucaaaaucuacagcaagcacaccccuaucaaccucgugcgggaucugccucagggcuucucugcucuggaaccccugguggaucugcccaucggcaucaacaucacccgguuucagacacugcuggcccugcacagaagcuaccugacaccuggcgauagcagcagcggauggacagcuggugccgccgcuuacuaugugggcuaccugcagccuagaaccuuccugcugaaguacaacgagaacggcaccaucaccgacgccguggauugugcucuggauccucugagcgagacaaagugcacccugaaguccuucaccguggaaaagggcaucuaccagaccagcaacuuccgggugcagcccaccgaauccaucgugcgguuccccaauaucaccaaucugugccccuucggcgagguguucaaugccaccagauucgccucuguguacgccuggaaccggaagcggaucagcaauugcguggccgacuacuccgugcuguacaacuccgccagcuucagcaccuucaagugcuacggcguguccccuaccaagcugaacgaccugugcuucacaaacguguacgccgacagcuucgugauccggggagaugaagugcggcagauugccccuggacagacaggcaacaucgccgacuacaacuacaagcugcccgacgacuucaccggcugugugauugccuggaacagcaacaaccuggacuccaaagucggcggcaacuacaauuaccuguaccggcuguuccggaaguccaaucugaagcccuucgagcgggacaucagcaccgaaaucuaucaggccggcagcaccccuugcaacggcgugaagggcuucaacugcuacuucccacugcaguccuacggcuuucagcccacauacggcgugggcuaucagcccuacagagugguggugcugagcuucgaacugcugcaugcuccugccacagugugcggcccuaagaaaagcaccaaucucgugaagaacaaaugcgugaacuucaacuucaacggccugaccggcaccggcgugcugacagagagcaacaagaaguuccugccauuccagcaguuuggccgggauaucgccgauaccacagacgccguuagagauccccagacacuggaaauccuggacaucaccccaugcagcuucggcggagugucugugaucaccccuggcaccaacaccagcaaucagguggcagugcuguaccagggcgugaacuguaccgaagugcccguggccauucacgccgaucagcugacaccuacauggcggguguacuccaccggcagcaauguguuucagaccagagccggcugucugaucggagccgagcacgugaacaauagcuacgagugcgacauccccaucggcgcuggcaucugugccagcuaccagacacagacaaacagccccagacgggcuagaagcguggccagccagagcaucauugccuacacaaugucucugggcgccgagaacagcguggccuacuccaacaacucuaucgcuauccccaccaacuucaccaucagcgugaccaccgagauccugccuguguccaugaccaagaccagcguggacugcaccauguacaucugcggcgauuccaccgagugcuccaaccugcugcugcaguacggcagcuucugcacccagcugaauagagcccugacagggaucgccguggaacaggacaagaacacccaagagguguucgcccaagugaagcaaaucuacaagaccccuccuaucaaggacuucggcggcuucaauuucagccagauucugcccgauccuagcaagcccagcaagcggagcuucaucgaggaccugcuguucaacaaagugacacuggccgacgccggcuucaucaagcaguauggcgauugucugggcgacauugccgccagggaucugauuugcgcccagaaguuuaacggacugacagugcugccuccucugcugaccgaugagaugaucgcccaguacacaucugcccugcuggccggcacaaucacaagcggcuggacauuuggagcuggcgccgcucugcagauccccuuugcuaugcagauggccuaccgguucaacggcaucggagugacccagaaugugcuguacgagaaccagaagcugaucgccaaccaguucaacagcgccaucggcaagauccaggacagccugagcagcacagcaagcgcccugggaaagcugcaggacguggucaaccagaaugcccaggcacugaacacccuggucaagcagcuguccuccaacuucggcgccaucagcucugugcugaacgauauccugagcagacuggacccuccugaggccgaggugcagaucgacagacugaucacaggcagacugcagagccuccagacauacgugacccagcagcugaucagagccgccgagauuagagccucugccaaucuggccgccaccaagaugucugagugugugcugggccagagcaagagaguggacuuuugcggcaagggcuaccaccugaugagcuucccucagucugccccucacggcgugguguuucugcacgugacauaugugcccgcucaagagaagaauuucaccaccgcuccagccaucugccacgacggcaaagcccacuuuccuagagaaggcguguucguguccaacggcacccauugguucgugacacagcggaacuucuacgagccccagaucaucaccaccgacaacaccuucgugucuggcaacugcgacguugugaucggcauugugaacaauaccguguacgacccucugcagcccgagcuggacagcuucaaagaggaacuggacaaguacuuuaagaaccacacaagccccgacguggaccugggcgauaucagcggaaucaaugccagcgucgugaacauccagaaagagaucgaccggcugaacgagguggccaagaaucugaacgagagccugaucgaccugcaagaacuggggaaguacgagcaguacaucaaguggcccugguacaucuggcugggcuuuaucgccggacugauugccaucgugauggucacaaucaugcuguguugcaugaccagcugcuguagcugccugaagggcuguuguagcuguggcagcugcugcaaguucgacgaggacgauucugagcccgugcugaagggcgugaaacugcacuacaccuga

SEQ ID NO: 23163 - RNA, 3813 nt, Artificial Sequence
  SARS-CoV-2/Wuhan/WIV05/2019__EPI_ISL_402128 spike protein CDS gc mod (1-1273)(K986P_V987P_K986P_V987P_L18F_D80A_D215G_L242del_A243del_ L244del_R246I_K417N_E484K_N501Y_D614G_A701V)
auguucguguuucuggugcugcugccccugguguccagccagugugugaacuucaccaccagaacacagcugccuccagccuacaccaacagcuucaccagaggcguguacuaccccgacaagguguucagauccagcgugcugcacucuacccaggaccuguuccugccuuucuucagcaacgugaccugguuccacgccauccacguguccggcaccaauggcaccaagagauucgccaaccccgugcugcccuucaacgacgggguguacuuugccagcaccgagaaguccaacaucaucagaggcuggaucuucggcaccacacuggacagcaagacccagagccugcugaucgugaacaacgccaccaacguggucaucaaagugugcgaguuccaguucugcaacgaccccuuccugggcgucuacuaccacaagaacaacaagagcuggauggaaagcgaguuccggguguacagcagcgccaacaacugcaccuucgaguacgugucccagccuuuccugauggaccuggaaggcaagcagggcaacuucaagaaccugcgcgaguucguguucaagaacaucgacggcuacuucaaaaucuacagcaagcacaccccuaucaaccucgugcggggccugccucagggcuucucugcucuggaaccccugguggaucugcccaucggcaucaacaucacccgguuucagacacugcacaucagcuaccugacaccuggcgauagcagcagcggauggacagcuggugccgccgcuuacuaugugggcuaccugcagccuagaaccuuccugcugaaguacaacgagaacggcaccaucaccgacgccguggauugugcucuggauccucugagcgagacaaagugcacccugaaguccuucaccguggaaaagggcaucuaccagaccagcaacuuccgggugcagcccaccgaauccaucgugcgguuccccaauaucaccaaucugugccccuucggcgagguguucaaugccaccagauucgccucuguguacgccuggaaccggaagcggaucagcaauugcguggccgacuacuccgugcuguacaacuccgccagcuucagcaccuucaagugcuacggcguguccccuaccaagcugaacgaccugugcuucacaaacguguacgccgacagcuucgugauccggggagaugaagugcggcagauugccccuggacagacaggcaacaucgccgacuacaacuacaagcugcccgacgacuucaccggcugugugauugccuggaacagcaacaaccuggacuccaaagucggcggcaacuacaauuaccuguaccggcuguuccggaaguccaaucugaagcccuucgagcgggacaucagcaccgaaaucuaucaggccggcagcaccccuugcaacggcgugaagggcuucaacugcuacuucccacugcaguccuacggcuuucagcccacauacggcgugggcuaucagcccuacagagugguggugcugagcuucgaacugcugcaugcuccugccacagugugcggcccuaagaaaagcaccaaucucgugaagaacaaaugcgugaacuucaacuucaacggccugaccggcaccggcgugcugacagagagcaacaagaaguuccugccauuccagcaguuuggccgggauaucgccgauaccacagacgccguuagagauccccagacacuggaaauccuggacaucaccccaugcagcuucggcggagugucugugaucaccccuggcaccaacaccagcaaucagguggcagugcuguaccagggcgugaacuguaccgaagugcccguggccauucacgccgaucagcugacaccuacauggcggguguacuccaccggcagcaauguguuucagaccagagccggcugucugaucggagccgagcacgugaacaauagcuacgagugcgacauccccaucggcgcuggcaucugugccagcuaccagacacagacaaacagccccagacgggcuagaagcguggccagccagagcaucauugccuacacaaugucucugggcguggagaacagcguggccuacuccaacaacucuaucgcuauccccaccaacuucaccaucagcgugaccaccgagauccugccuguguccaugaccaagaccagcguggacugcaccauguacaucugcggcgauuccaccgagugcuccaaccugcugcugcaguacggcagcuucugcacccagcugaauagagcccugacagggaucgccguggaacaggacaagaacacccaagagguguucgcccaagugaagcaaaucuacaagaccccuccuaucaaggacuucggcggcuucaauuucagccagauucugcccgauccuagcaagcccagcaagcggagcuucaucgaggaccugcuguucaacaaagugacacuggccgacgccggcuucaucaagcaguauggcgauugucugggcgacauugccgccagggaucugauuugcgcccagaaguuuaacggacugacagugcugccuccucugcugaccgaugagaugaucgcccaguacacaucugcccugcuggccggcacaaucacaagcggcuggacauuuggagcuggcgccgcucugcagauccccuuugcuaugcagauggccuaccgguucaacggcaucggagugacccagaaugugcuguacgagaaccagaagcugaucgccaaccaguucaacagcgccaucggcaagauccaggacagccugagcagcacagcaagcgcccugggaaagcugcaggacguggucaaccagaaugcccaggcacugaacacccuggucaagcagcuguccuccaacuucggcgccaucagcucugugcugaacgauauccugagcagacuggacccuccugaggccgaggugcagaucgacagacugaucacaggcagacugcagagccuccagacauacgugacccagcagcugaucagagccgccgagauuagagccucugccaaucuggccgccaccaagaugucugagugugugcugggccagagcaagagaguggacuuuugcggcaagggcuaccaccugaugagcuucccucagucugccccucacggcgugguguuucugcacgugacauaugugcccgcucaagagaagaauuucaccaccgcuccagccaucugccacgacggcaaagcccacuuuccuagagaaggcguguucguguccaacggcacccauugguucgugacacagcggaacuucuacgagccccagaucaucaccaccgacaacaccuucgugucuggcaacugcgacguugugaucggcauugugaacaauaccguguacgacccucugcagcccgagcuggacagcuucaaagaggaacuggacaaguacuuuaagaaccacacaagccccgacguggaccugggcgauaucagcggaaucaaugccagcgucgugaacauccagaaagagaucgaccggcugaacgagguggccaagaaucugaacgagagccugaucgaccugcaagaacuggggaaguacgagcaguacaucaaguggcccugguacaucuggcugggcuuuaucgccggacugauugccaucgugauggucacaaucaugcuguguugcaugaccagcugcuguagcugccugaagggcuguuguagcuguggcagcugcugcaaguucgacgaggacgauucugagcccgugcugaagggcgugaaacugcacuacaccuga

SEQ ID NO: 23164 - RNA, 3822 nt, Artificial Sequence
  SARS-CoV-2/Wuhan/WIV05/2019__EPI_ISL_402128 spike protein CDS gc mod (1-1273)(K986P_V987P_K986P_V987P_E484K_D614G)
auguucguguuucuggugcugcugccccugguguccagccagugugugaaccugaccaccagaacacagcugccuccagccuacaccaacagcuucaccagaggcguguacuaccccgacaagguguucagauccagcgugcugcacucuacccaggaccuguuccugccuuucuucagcaacgugaccugguuccacgccauccacguguccggcaccaauggcaccaagagauucgacaaccccgugcugcccuucaacgacgggguguacuuugccagcaccgagaaguccaacaucaucagaggcuggaucuucggcaccacacuggacagcaagacccagagccugcugaucgugaacaacgccaccaacguggucaucaaagugugcgaguuccaguucugcaacgaccccuuccugggcgucuacuaccacaagaacaacaagagcuggauggaaagcgaguuccggguguacagcagcgccaacaacugcaccuucgaguacgugucccagccuuuccugauggaccuggaaggcaagcagggcaacuucaagaaccugcgcgaguucguguucaagaacaucgacggcuacuucaaaaucuacagcaagcacaccccuaucaaccucgugcgggaucugccucagggcuucucugcucuggaaccccugguggaucugcccaucggcaucaacaucacccgguuucagacacugcuggcccugcacagaagcuaccugacaccuggcgauagcagcagcggauggacagcuggugccgccgcuuacuaugugggcuaccugcagccuagaaccuuccugcugaaguacaacgagaacggcaccaucaccgacgccguggauugugcucuggauccucugagcgagacaaagugcacccugaaguccuucaccguggaaaagggcaucuaccagaccagcaacuuccgggugcagcccaccgaauccaucgugcgguuccccaauaucaccaaucugugccccuucggcgagguguucaaugccaccagauucgccucuguguacgccuggaaccggaagcggaucagcaauugcguggccgacuacuccgugcuguacaacuccgccagcuucagcaccuucaagugcuacggcguguccccuaccaagcugaacgaccugugcuucacaaacguguacgccgacagcuucgugauccggggagaugaagugcggcagauugccccuggacagacaggcaagaucgccgacuacaacuacaagcugcccgacgacuucaccggcugugugauugccuggaacagcaacaaccuggacuccaaagucggcggcaacuacaauuaccuguaccggcuguuccggaaguccaaucugaagcccuucgagcgggacaucagcaccgaaaucuaucaggccggcagcaccccuugcaacggcgugaagggcuucaacugcuacuucccacugcaguccuacggcuuucagcccacaaauggcgugggcuaucagcccuacagagugguggugcugagcuucgaacugcugcaugcuccugccacagugugcggcccuaagaaaagcaccaaucucgugaagaacaaaugcgugaacuucaacuucaacggccugaccggcaccggcgugcugacagagagcaacaagaaguuccugccauuccagcaguuuggccgggauaucgccgauaccacagacgccguuagagauccccagacacuggaaauccuggacaucaccccaugcagcuucggcggagugucugugaucaccccuggcaccaacaccagcaaucagguggcagugcuguaccagggcgugaacuguaccgaagugcccguggccauucacgccgaucagcugacaccuacauggcggguguacuccaccggcagcaauguguuucagaccagagccggcugucugaucggagccgagcacgugaacaauagcuacgagugcgacauccccaucggcgcuggcaucugugccagcuaccagacacagacaaacagccccagacgggcuagaagcguggccagccagagcaucauugccuacacaaugucucugggcgccgagaacagcguggccuacuccaacaacucuaucgcuauccccaccaacuucaccaucagcgugaccaccgagauccugccuguguccaugaccaagaccagcguggacugcaccauguacaucugcggcgauuccaccgagugcuccaaccugcugcugcaguacggcagcuucugcacccagcugaauagagcccugacagggaucgccguggaacaggacaagaacacccaagagguguucgcccaagugaagcaaaucuacaagaccccuccuaucaaggacuucggcggcuucaauuucagccagauucugcccgauccuagcaagcccagcaagcggagcuucaucgaggaccugcuguucaacaaagugacacuggccgacgccggcuucaucaagcaguauggcgauugucugggcgacauugccgccagggaucugauuugcgcccagaaguuuaacggacugacagugcugccuccucugcugaccgaugagaugaucgcccaguacacaucugcccugcuggccggcacaaucacaagcggcuggacauuuggagcuggcgccgcucugcagauccccuuugcuaugcagauggccuaccgguucaacggcaucggagugacccagaaugugcuguacgagaaccagaagcugaucgccaaccaguucaacagcgccaucggcaagauccaggacagccugagcagcacagcaagcgcccugggaaagcugcaggacguggucaaccagaaugcccaggcacugaacacccuggucaagcagcuguccuccaacuucggcgccaucagcucugugcugaacgauauccugagcagacuggacccuccugaggccgaggugcagaucgacagacugaucacaggcagacugcagagccuccagacauacgugacccagcagcugaucagagccgccgagauuagagccucugccaaucuggccgccaccaagaugucugagugugugcugggccagagcaagagaguggacuuuugcggcaagggcuaccaccugaugagcuucccucagucugccccucacggcgugguguuucugcacgugacauaugugcccgcucaagagaagaauuucaccaccgcuccagccaucugccacgacggcaaagcccacuuuccuagagaaggcguguucguguccaacggcacccauugguucgugacacagcggaacuucuacgagccccagaucaucaccaccgacaacaccuucgugucuggcaacugcgacguugugaucggcauugugaacaauaccguguacgacccucugcagcccgagcuggacagcuucaaagaggaacuggacaaguacuuuaagaaccacacaagccccgacguggaccugggcgauaucagcggaaucaaugccagcgucgugaacauccagaaagagaucgaccggcugaacgagguggccaagaaucugaacgagagccugaucgaccugcaagaacuggggaaguacgagcaguacaucaaguggcccugguacaucuggcugggcuuuaucgccggacugauugccaucgugauggucacaaucaugcuguguugcaugaccagcugcuguagcugccugaagggcuguuguagcuguggcagcugcugcaaguucgacgaggacgauucugagcccgugcugaagggcgugaaacugcacuacaccuga

SEQ ID NO: 23165 - RNA, 3822 nt, Artificial Sequence
  SARS-CoV-2/Wuhan/WIV05/2019__EPI_ISL_402128 spike protein CDS gc mod (1-1273)(K986P_V987P_K986P_V987P_L18F_T20N_P26S_D138Y_R190S_K417T _E484K_N501Y_D614G_H655Y_T1027I)
auguucguguuucuggugcugcugccccugguguccagccagugugugaacuucaccaacagaacacagcugccuagcgccuacaccaacagcuucaccagaggcguguacuaccccgacaagguguucagauccagcgugcugcacucuacccaggaccuguuccugccuuucuucagcaacgugaccugguuccacgccauccacguguccggcaccaauggcaccaagagauucgacaaccccgugcugcccuucaacgacgggguguacuuugccagcaccgagaaguccaacaucaucagaggcuggaucuucggcaccacacuggacagcaagacccagagccugcugaucgugaacaacgccaccaacguggucaucaaagugugcgaguuccaguucugcaacuaccccuuccugggcgucuacuaccacaagaacaacaagagcuggauggaaagcgaguuccggguguacagcagcgccaacaacugcaccuucgaguacgugucccagccuuuccugauggaccuggaaggcaagcagggcaacuucaagaaccugagcgaguucguguucaagaacaucgacggcuacuucaaaaucuacagcaagcacaccccuaucaaccucgugcgggaucugccucagggcuucucugcucuggaaccccugguggaucugcccaucggcaucaacaucacccgguuucagacacugcuggcccugcacagaagcuaccugacaccuggcgauagcagcagcggauggacagcuggugccgccgcuuacuaugugggcuaccugcagccuagaaccuuccugcugaaguacaacgagaacggcaccaucaccgacgccguggauugugcucuggauccucugagcgagacaaagugcacccugaaguccuucaccguggaaaagggcaucuaccagaccagcaacuuccgggugcagcccaccgaauccaucgugcgguuccccaauaucaccaaucugugccccuucggcgagguguucaaugccaccagauucgccucuguguacgccuggaaccggaagcggaucagcaauugcguggccgacuacuccgugcuguacaacuccgccagcuucagcaccuucaagugcuacggcguguccccuaccaagcugaacgaccugugcuucacaaacguguacgccgacagcuucgugauccggggagaugaagugcggcagauugccccuggacagacaggcaccaucgccgacuacaacuacaagcugcccgacgacuucaccggcugugugauugccuggaacagcaacaaccuggacuccaaagucggcggcaacuacaauuaccuguaccggcuguuccggaaguccaaucugaagcccuucgagcgggacaucagcaccgaaaucuaucaggccggcagcaccccuugcaacggcgugaagggcuucaacugcuacuucccacugcaguccuacggcuuucagcccacauacggcgugggcuaucagcccuacagagugguggugcugagcuucgaacugcugcaugcuccugccacagugugcggcccuaagaaaagcaccaaucucgugaagaacaaaugcgugaacuucaacuucaacggccugaccggcaccggcgugcugacagagagcaacaagaaguuccugccauuccagcaguuuggccgggauaucgccgauaccacagacgccguuagagauccccagacacuggaaauccuggacaucaccccaugcagcuucggcggagugucugugaucaccccuggcaccaacaccagcaaucagguggcagugcuguaccagggcgugaacuguaccgaagugcccguggccauucacgccgaucagcugacaccuacauggcggguguacuccaccggcagcaauguguuucagaccagagccggcugucugaucggagccgaguacgugaacaauagcuacgagugcgacauccccaucggcgcuggcaucugugccagcuaccagacacagacaaacagccccagacgggcuagaagcguggccagccagagcaucauugccuacacaaugucucugggcgccgagaacagcguggccuacuccaacaacucuaucgcuauccccaccaacuucaccaucagcgugaccaccgagauccugccuguguccaugaccaagaccagcguggacugcaccauguacaucugcggcgauuccaccgagugcuccaaccugcugcugcaguacggcagcuucugcacccagcugaauagagcccugacagggaucgccguggaacaggacaagaacacccaagagguguucgcccaagugaagcaaaucuacaagaccccuccuaucaaggacuucggcggcuucaauuucagccagauucugcccgauccuagcaagcccagcaagcggagcuucaucgaggaccugcuguucaacaaagugacacuggccgacgccggcuucaucaagcaguauggcgauugucugggcgacauugccgccagggaucugauuugcgcccagaaguuuaacggacugacagugcugccuccucugcugaccgaugagaugaucgcccaguacacaucugcccugcuggccggcacaaucacaagcggcuggacauuuggagcuggcgccgcucugcagauccccuuugcuaugcagauggccuaccgguucaacggcaucggagugacccagaaugugcuguacgagaaccagaagcugaucgccaaccaguucaacagcgccaucggcaagauccaggacagccugagcagcacagcaagcgcccugggaaagcugcaggacguggucaaccagaaugcccaggcacugaacacccuggucaagcagcuguccuccaacuucggcgccaucagcucugugcugaacgauauccugagcagacuggacccuccugaggccgaggugcagaucgacagacugaucacaggcagacugcagagccuccagacauacgugacccagcagcugaucagagccgccgagauuagagccucugccaaucuggccgccaucaagaugucugagugugugcugggccagagcaagagaguggacuuuugcggcaagggcuaccaccugaugagcuucccucagucugccccucacggcgugguguuucugcacgugacauaugugcccgcucaagagaagaauuucaccaccgcuccagccaucugccacgacggcaaagcccacuuuccuagagaaggcguguucguguccaacggcacccauugguucgugacacagcggaacuucuacgagccccagaucaucaccaccgacaacaccuucgugucuggcaacugcgacguugugaucggcauugugaacaauaccguguacgacccucugcagcccgagcuggacagcuucaaagaggaacuggacaaguacuuuaagaaccacacaagccccgacguggaccugggcgauaucagcggaaucaaugccagcgucgugaacauccagaaagagaucgaccggcugaacgagguggccaagaaucugaacgagagccugaucgaccugcaagaacuggggaaguacgagcaguacaucaaguggcccugguacaucuggcugggcuuuaucgccggacugauugccaucgugauggucacaaucaugcuguguugcaugaccagcugcuguagcugccugaagggcuguuguagcuguggcagcugcugcaaguucgacgaggacgauucugagcccgugcugaagggcgugaaacugcacuacaccuga

SEQ ID NO: 23166 - RNA, 3822 nt, Artificial Sequence
  SARS-CoV-2/Wuhan/WIV05/2019__EPI_ISL_402128 spike protein CDS gc mod (1-1273)(K986P_V987P_K986P_V987P_S13I_W152C_L452R_D614G)
auguucguguuucuggugcugcugccccugguguccauccagugugugaaccugaccaccagaacacagcugccuccagccuacaccaacagcuucaccagaggcguguacuaccccgacaagguguucagauccagcgugcugcacucuacccaggaccuguuccugccuuucuucagcaacgugaccugguuccacgccauccacguguccggcaccaauggcaccaagagauucgacaaccccgugcugcccuucaacgacgggguguacuuugccagcaccgagaaguccaacaucaucagaggcuggaucuucggcaccacacuggacagcaagacccagagccugcugaucgugaacaacgccaccaacguggucaucaaagugugcgaguuccaguucugcaacgaccccuuccugggcgucuacuaccacaagaacaacaagagcugcauggaaagcgaguuccggguguacagcagcgccaacaacugcaccuucgaguacgugucccagccuuuccugauggaccuggaaggcaagcagggcaacuucaagaaccugcgcgaguucguguucaagaacaucgacggcuacuucaaaaucuacagcaagcacaccccuaucaaccucgugcgggaucugccucagggcuucucugcucuggaaccccugguggaucugcccaucggcaucaacaucacccgguuucagacacugcuggcccugcacagaagcuaccugacaccuggcgauagcagcagcggauggacagcuggugccgccgcuuacuaugugggcuaccugcagccuagaaccuuccugcugaaguacaacgagaacggcaccaucaccgacgccguggauugugcucuggauccucugagcgagacaaagugcacccugaaguccuucaccguggaaaagggcaucuaccagaccagcaacuuccgggugcagcccaccgaauccaucgugcgguuccccaauaucaccaaucugugccccuucggcgagguguucaaugccaccagauucgccucuguguacgccuggaaccggaagcggaucagcaauugcguggccgacuacuccgugcuguacaacuccgccagcuucagcaccuucaagugcuacggcguguccccuaccaagcugaacgaccugugcuucacaaacguguacgccgacagcuucgugauccggggagaugaagugcggcagauugccccuggacagacaggcaagaucgccgacuacaacuacaagcugcccgacgacuucaccggcugugugauugccuggaacagcaacaaccuggacuccaaagucggcggcaacuacaauuaccgcuaccggcuguuccggaaguccaaucugaagcccuucgagcgggacaucagcaccgaaaucuaucaggccggcagcaccccuugcaacggcguggaaggcuucaacugcuacuucccacugcaguccuacggcuuucagcccacaaauggcgugggcuaucagcccuacagagugguggugcugagcuucgaacugcugcaugcuccugccacagugugcggcccuaagaaaagcaccaaucucgugaagaacaaaugcgugaacuucaacuucaacggccugaccggcaccggcgugcugacagagagcaacaagaaguuccugccauuccagcaguuuggccgggauaucgccgauaccacagacgccguuagagauccccagacacuggaaauccuggacaucaccccaugcagcuucggcggagugucugugaucaccccuggcaccaacaccagcaaucagguggcagugcuguaccagggcgugaacuguaccgaagugcccguggccauucacgccgaucagcugacaccuacauggcggguguacuccaccggcagcaauguguuucagaccagagccggcugucugaucggagccgagcacgugaacaauagcuacgagugcgacauccccaucggcgcuggcaucugugccagcuaccagacacagacaaacagccccagacgggcuagaagcguggccagccagagcaucauugccuacacaaugucucugggcgccgagaacagcguggccuacuccaacaacucuaucgcuauccccaccaacuucaccaucagcgugaccaccgagauccugccuguguccaugaccaagaccagcguggacugcaccauguacaucugcggcgauuccaccgagugcuccaaccugcugcugcaguacggcagcuucugcacccagcugaauagagcccugacagggaucgccguggaacaggacaagaacacccaagagguguucgcccaagugaagcaaaucuacaagaccccuccuaucaaggacuucggcggcuucaauuucagccagauucugcccgauccuagcaagcccagcaagcggagcuucaucgaggaccugcuguucaacaaagugacacuggccgacgccggcuucaucaagcaguauggcgauugucugggcgacauugccgccagggaucugauuugcgcccagaaguuuaacggacugacagugcugccuccucugcugaccgaugagaugaucgcccaguacacaucugcccugcuggccggcacaaucacaagcggcuggacauuuggagcuggcgccgcucugcagauccccuuugcuaugcagauggccuaccgguucaacggcaucggagugacccagaaugugcuguacgagaaccagaagcugaucgccaaccaguucaacagcgccaucggcaagauccaggacagccugagcagcacagcaagcgcccugggaaagcugcaggacguggucaaccagaaugcccaggcacugaacacccuggucaagcagcuguccuccaacuucggcgccaucagcucugugcugaacgauauccugagcagacuggacccuccugaggccgaggugcagaucgacagacugaucacaggcagacugcagagccuccagacauacgugacccagcagcugaucagagccgccgagauuagagccucugccaaucuggccgccaccaagaugucugagugugugcugggccagagcaagagaguggacuuuugcggcaagggcuaccaccugaugagcuucccucagucugccccucacggcgugguguuucugcacgugacauaugugcccgcucaagagaagaauuucaccaccgcuccagccaucugccacgacggcaaagcccacuuuccuagagaaggcguguucguguccaacggcacccauugguucgugacacagcggaacuucuacgagccccagaucaucaccaccgacaacaccuucgugucuggcaacugcgacguugugaucggcauugugaacaauaccguguacgacccucugcagcccgagcuggacagcuucaaagaggaacuggacaaguacuuuaagaaccacacaagccccgacguggaccugggcgauaucagcggaaucaaugccagcgucgugaacauccagaaagagaucgaccggcugaacgagguggccaagaaucugaacgagagccugaucgaccugcaagaacuggggaaguacgagcaguacaucaaguggcccugguacaucuggcugggcuuuaucgccggacugauugccaucgugauggucacaaucaugcuguguugcaugaccagcugcuguagcugccugaagggcuguuguagcuguggcagcugcugcaaguucgacgaggacgauucugagcccgugcugaagggcgugaaacugcacuacaccuga

SEQ ID NO: 23167 - RNA, 3822 nt, Artificial Sequence
  SARS-CoV-2/Wuhan/WIV05/2019__EPI_ISL_402128 spike protein CDS gc mod (1-1273)(K986P_V987P)
auguucguguuccuggugcugcugccucugguguccagccagugugugaaccugaccaccagaacacagcugccuccagccuacaccaacagcuuuaccagaggcguguacuaccccgacaagguguucagauccagcgugcugcacucuacccaggaccuguuccugccuuucuucagcaacgugaccugguuccacgccauccacguguccggcaccaauggcaccaagagauucgacaaccccgugcugcccuucaacgacgggguguacuuugccagcaccgagaaguccaacaucaucagaggcuggaucuucggcaccacacuggacagcaagacccagagccugcugaucgugaacaacgccaccaacguggucaucaaagugugcgaguuccaguucugcaacgaccccuuccugggcgucuacuaccacaagaacaacaagagcuggauggaaagcgaguuccggguguacagcagcgccaacaacugcaccuucgaguacgugucccagccuuuccugauggaccuggaaggcaagcagggcaacuucaagaaccugcgcgaguucguguuuaagaacaucgacggcuacuucaagaucuacagcaagcacaccccuaucaaccucgugcgggaucugccucagggcuucucugcucuggaaccccugguggaucugcccaucggcaucaacaucacccgguuucagacacugcuggcccugcacagaagcuaccugacaccuggcgauagcagcagcggauggacagcuggugccgccgcuuacuaugugggcuaccugcagccuagaaccuuccugcugaaguacaacgagaacggcaccaucaccgacgccguggauugugcucuggauccucugagcgagacaaagugcacccugaaguccuucaccguggaaaagggcaucuaccagaccagcaacuuccgggugcagcccaccgaauccaucgugcgguuccccaauaucaccaaucugugccccuucggcgagguguucaaugccaccagauucgccucuguguacgccuggaaccggaagcggaucagcaauugcguggccgacuacuccgugcuguacaacuccgccagcuucagcaccuucaagugcuacggcguguccccuaccaagcugaacgaccugugcuucacaaacguguacgccgacagcuucgugauccggggagaugaagugcggcagauugccccuggacagacaggcaagaucgccgacuacaacuacaagcugcccgacgacuucaccggcugugugauugccuggaacagcaacaaccuggacuccaaagucggcggcaacuacaauuaccuguaccggcuguuccggaaguccaaucugaagcccuucgagcgggacaucuccaccgagaucuaucaggccggcagcaccccuuguaacggcguggaaggcuucaacugcuacuucccacugcaguccuacggcuuucagcccacaaauggcgugggcuaucagcccuacagagugguggugcugagcuucgaacugcugcaugccccugccacagugugcggcccuaagaaaagcaccaaucucgugaagaacaaaugcgugaacuucaacuucaacggccugaccggcaccggcgugcugacagagagcaacaagaaguuccugccauuccagcaguuuggccgggauaucgccgauaccacagacgccguuagagauccccagacacuggaaauccuggacaucaccccuugcagcuucggcggagugucugugaucaccccuggcaccaacaccagcaaucagguggcagugcuguaccaggacgugaacuguaccgaagugcccguggccauucacgccgaucagcugacaccuacauggcggguguacuccaccggcagcaauguguuucagaccagagccggcugucugaucggagccgagcacgugaacaauagcuacgagugcgacauccccaucggcgcuggaaucugcgccagcuaccagacacagacaaacagcccucggagagccagaagcguggccagccagagcaucauugccuacacaaugucucugggcgccgagaacagcguggccuacuccaacaacucuaucgcuauccccaccaacuucaccaucagcgugaccacagagauccugccuguguccaugaccaagaccagcguggacugcaccauguacaucugcggcgauuccaccgagugcuccaaccugcugcugcaguacggcagcuucugcacccagcugaauagagcccugacagggaucgccguggaacaggacaagaacacccaagagguguucgcccaagugaagcagaucuacaagaccccuccuaucaaggacuucggcggcuucaauuucagccagauucugcccgauccuagcaagcccagcaagcggagcuucaucgaggaccugcuguucaacaaagugacacuggccgacgccggcuucaucaagcaguauggcgauugucugggcgacauugccgccagggaucugauuugcgcccagaaguuuaacggacugacagugcugccuccucugcugaccgaugagaugaucgcccaguacacaucugcccugcuggccggcacaaucacaagcggcuggacauuuggagcaggcgccgcucugcagauccccuuugcuaugcagauggccuaccgguucaacggcaucggagugacccagaaugugcuguacgagaaccagaagcugaucgccaaccaguucaacagcgccaucggcaagauccaggacagccugagcagcacagcaagcgcccugggaaagcugcaggacguggucaaccagaaugcccaggcacugaacacccuggucaagcagcuguccuccaacuucggcgccaucagcucugugcugaacgauauccugagcagacuggacccuccugaggccgaggugcagaucgacagacugaucacaggcagacugcagagccuccagacauacgugacccagcagcugaucagagccgccgagauuagagccucugccaaucuggccgccaccaagaugucugagugugugcugggccagagcaagagaguggacuuuugcggcaagggcuaccaccugaugagcuucccucagucugccccucacggcgugguguuucugcacgugacauaugugcccgcucaagagaagaauuucaccaccgcuccagccaucugccacgacggcaaagcccacuuuccuagagaaggcguguucguguccaacggcacccauugguucgugacacagcggaacuucuacgagccccagaucaucaccaccgacaacaccuucgugucuggcaacugcgacgucgugaucggcauugugaacaauaccguguacgacccucugcagcccgagcuggacagcuucaaagaggaacuggacaaguacuuuaagaaccacacaagccccgacguggaccugggcgauaucagcggaaucaaugccagcgucgugaacauccagaaagagaucgaccggcugaacgagguggccaagaaucugaacgagagccugaucgaccugcaagaacuggggaaguacgagcaguacaucaaguggcccugguacaucuggcugggcuuuaucgccggacugauugccaucgugauggucacaaucaugcuguguugcaugaccagcugcuguagcugccugaagggcuguuguagcuguggcagcugcugcaaguucgacgaggacgauucugagcccgugcugaagggcgugaaacugcacuacacauga

SEQ ID NO: 23168 - RNA, 3822 nt, Artificial Sequence
  SARS-CoV-2/Wuhan/WIV05/2019__EPI_ISL_402128 spike protein CDS gc mod (1-1273)(K986P_V987P_ D614G)
auguucguguuccuggugcugcugccucugguguccagccagugugugaaccugaccaccagaacacagcugccuccagccuacaccaacagcuuuaccagaggcguguacuaccccgacaagguguucagauccagcgugcugcacucuacccaggaccuguuccugccuuucuucagcaacgugaccugguuccacgccauccacguguccggcaccaauggcaccaagagauucgacaaccccgugcugcccuucaacgacgggguguacuuugccagcaccgagaaguccaacaucaucagaggcuggaucuucggcaccacacuggacagcaagacccagagccugcugaucgugaacaacgccaccaacguggucaucaaagugugcgaguuccaguucugcaacgaccccuuccugggcgucuacuaccacaagaacaacaagagcuggauggaaagcgaguuccggguguacagcagcgccaacaacugcaccuucgaguacgugucccagccuuuccugauggaccuggaaggcaagcagggcaacuucaagaaccugcgcgaguucguguuuaagaacaucgacggcuacuucaagaucuacagcaagcacaccccuaucaaccucgugcgggaucugccucagggcuucucugcucuggaaccccugguggaucugcccaucggcaucaacaucacccgguuucagacacugcuggcccugcacagaagcuaccugacaccuggcgauagcagcagcggauggacagcuggugccgccgcuuacuaugugggcuaccugcagccuagaaccuuccugcugaaguacaacgagaacggcaccaucaccgacgccguggauugugcucuggauccucugagcgagacaaagugcacccugaaguccuucaccguggaaaagggcaucuaccagaccagcaacuuccgggugcagcccaccgaauccaucgugcgguuccccaauaucaccaaucugugccccuucggcgagguguucaaugccaccagauucgccucuguguacgccuggaaccggaagcggaucagcaauugcguggccgacuacuccgugcuguacaacuccgccagcuucagcaccuucaagugcuacggcguguccccuaccaagcugaacgaccugugcuucacaaacguguacgccgacagcuucgugauccggggagaugaagugcggcagauugccccuggacagacaggcaagaucgccgacuacaacuacaagcugcccgacgacuucaccggcugugugauugccuggaacagcaacaaccuggacuccaaagucggcggcaacuacaauuaccuguaccggcuguuccggaaguccaaucugaagcccuucgagcgggacaucuccaccgagaucuaucaggccggcagcaccccuuguaacggcguggaaggcuucaacugcuacuucccacugcaguccuacggcuuucagcccacaaauggcgugggcuaucagcccuacagagugguggugcugagcuucgaacugcugcaugccccugccacagugugcggcccuaagaaaagcaccaaucucgugaagaacaaaugcgugaacuucaacuucaacggccugaccggcaccggcgugcugacagagagcaacaagaaguuccugccauuccagcaguuuggccgggauaucgccgauaccacagacgccguuagagauccccagacacuggaaauccuggacaucaccccuugcagcuucggcggagugucugugaucaccccuggcaccaacaccagcaaucagguggcagugcuguaccagggcgugaacuguaccgaagugcccguggccauucacgccgaucagcugacaccuacauggcggguguacuccaccggcagcaauguguuucagaccagagccggcugucugaucggagccgagcacgugaacaauagcuacgagugcgacauccccaucggcgcuggaaucugcgccagcuaccagacacagacaaacagcccucggagagccagaagcguggccagccagagcaucauugccuacacaaugucucugggcgccgagaacagcguggccuacuccaacaacucuaucgcuauccccaccaacuucaccaucagcgugaccacagagauccugccuguguccaugaccaagaccagcguggacugcaccauguacaucugcggcgauuccaccgagugcuccaaccugcugcugcaguacggcagcuucugcacccagcugaauagagcccugacagggaucgccguggaacaggacaagaacacccaagagguguucgcccaagugaagcagaucuacaagaccccuccuaucaaggacuucggcggcuucaauuucagccagauucugcccgauccuagcaagcccagcaagcggagcuucaucgaggaccugcuguucaacaaagugacacuggccgacgccggcuucaucaagcaguauggcgauugucugggcgacauugccgccagggaucugauuugcgcccagaaguuuaacggacugacagugcugccuccucugcugaccgaugagaugaucgcccaguacacaucugcccugcuggccggcacaaucacaagcggcuggacauuuggagcaggcgccgcucugcagauccccuuugcuaugcagauggccuaccgguucaacggcaucggagugacccagaaugugcuguacgagaaccagaagcugaucgccaaccaguucaacagcgccaucggcaagauccaggacagccugagcagcacagcaagcgcccugggaaagcugcaggacguggucaaccagaaugcccaggcacugaacacccuggucaagcagcuguccuccaacuucggcgccaucagcucugugcugaacgauauccugagcagacuggacccuccugaggccgaggugcagaucgacagacugaucacaggcagacugcagagccuccagacauacgugacccagcagcugaucagagccgccgagauuagagccucugccaaucuggccgccaccaagaugucugagugugugcugggccagagcaagagaguggacuuuugcggcaagggcuaccaccugaugagcuucccucagucugccccucacggcgugguguuucugcacgugacauaugugcccgcucaagagaagaauuucaccaccgcuccagccaucugccacgacggcaaagcccacuuuccuagagaaggcguguucguguccaacggcacccauugguucgugacacagcggaacuucuacgagccccagaucaucaccaccgacaacaccuucgugucuggcaacugcgacgucgugaucggcauugugaacaauaccguguacgacccucugcagcccgagcuggacagcuucaaagaggaacuggacaaguacuuuaagaaccacacaagccccgacguggaccugggcgauaucagcggaaucaaugccagcgucgugaacauccagaaagagaucgaccggcugaacgagguggccaagaaucugaacgagagccugaucgaccugcaagaacuggggaaguacgagcaguacaucaaguggcccugguacaucuggcugggcuuuaucgccggacugauugccaucgugauggucacaaucaugcuguguugcaugaccagcugcuguagcugccugaagggcuguuguagcuguggcagcugcugcaaguucgacgaggacgauucugagcccgugcugaagggcgugaaacugcacuacacauga

SEQ ID NO: 23169 - RNA, 3822 nt, Artificial Sequence
  SARS-CoV-2/Wuhan/WIV05/2019__EPI_ISL_402128 spike protein CDS gc mod (1-1273)(K986P_V987P_A222V_D614G)
auguucguguuccuggugcugcugccucugguguccagccagugugugaaccugaccaccagaacacagcugccuccagccuacaccaacagcuuuaccagaggcguguacuaccccgacaagguguucagauccagcgugcugcacucuacccaggaccuguuccugccuuucuucagcaacgugaccugguuccacgccauccacguguccggcaccaauggcaccaagagauucgacaaccccgugcugcccuucaacgacgggguguacuuugccagcaccgagaaguccaacaucaucagaggcuggaucuucggcaccacacuggacagcaagacccagagccugcugaucgugaacaacgccaccaacguggucaucaaagugugcgaguuccaguucugcaacgaccccuuccugggcgucuacuaccacaagaacaacaagagcuggauggaaagcgaguuccggguguacagcagcgccaacaacugcaccuucgaguacgugucccagccuuuccugauggaccuggaaggcaagcagggcaacuucaagaaccugcgcgaguucguguuuaagaacaucgacggcuacuucaagaucuacagcaagcacaccccuaucaaccucgugcgggaucugccucagggcuucucugugcuggaaccccugguggaucugcccaucggcaucaacaucacccgguuucagacacugcuggcccugcacagaagcuaccugacaccuggcgauagcagcagcggauggacagcuggugccgccgcuuacuaugugggcuaccugcagccuagaaccuuccugcugaaguacaacgagaacggcaccaucaccgacgccguggauugugcucuggauccucugagcgagacaaagugcacccugaaguccuucaccguggaaaagggcaucuaccagaccagcaacuuccgggugcagcccaccgaauccaucgugcgguuccccaauaucaccaaucugugccccuucggcgagguguucaaugccaccagauucgccucuguguacgccuggaaccggaagcggaucagcaauugcguggccgacuacuccgugcuguacaacuccgccagcuucagcaccuucaagugcuacggcguguccccuaccaagcugaacgaccugugcuucacaaacguguacgccgacagcuucgugauccggggagaugaagugcggcagauugccccuggacagacaggcaagaucgccgacuacaacuacaagcugcccgacgacuucaccggcugugugauugccuggaacagcaacaaccuggacuccaaagucggcggcaacuacaauuaccuguaccggcuguuccggaaguccaaucugaagcccuucgagcgggacaucuccaccgagaucuaucaggccggcagcaccccuuguaacggcguggaaggcuucaacugcuacuucccacugcaguccuacggcuuucagcccacaaauggcgugggcuaucagcccuacagagugguggugcugagcuucgaacugcugcaugccccugccacagugugcggcccuaagaaaagcaccaaucucgugaagaacaaaugcgugaacuucaacuucaacggccugaccggcaccggcgugcugacagagagcaacaagaaguuccugccauuccagcaguuuggccgggauaucgccgauaccacagacgccguuagagauccccagacacuggaaauccuggacaucaccccuugcagcuucggcggagugucugugaucaccccuggcaccaacaccagcaaucagguggcagugcuguaccagggcgugaacuguaccgaagugcccguggccauucacgccgaucagcugacaccuacauggcggguguacuccaccggcagcaauguguuucagaccagagccggcugucugaucggagccgagcacgugaacaauagcuacgagugcgacauccccaucggcgcuggaaucugcgccagcuaccagacacagacaaacagcccucggagagccagaagcguggccagccagagcaucauugccuacacaaugucucugggcgccgagaacagcguggccuacuccaacaacucuaucgcuauccccaccaacuucaccaucagcgugaccacagagauccugccuguguccaugaccaagaccagcguggacugcaccauguacaucugcggcgauuccaccgagugcuccaaccugcugcugcaguacggcagcuucugcacccagcugaauagagcccugacagggaucgccguggaacaggacaagaacacccaagagguguucgcccaagugaagcagaucuacaagaccccuccuaucaaggacuucggcggcuucaauuucagccagauucugcccgauccuagcaagcccagcaagcggagcuucaucgaggaccugcuguucaacaaagugacacuggccgacgccggcuucaucaagcaguauggcgauugucugggcgacauugccgccagggaucugauuugcgcccagaaguuuaacggacugacagugcugccuccucugcugaccgaugagaugaucgcccaguacacaucugcccugcuggccggcacaaucacaagcggcuggacauuuggagcaggcgccgcucugcagauccccuuugcuaugcagauggccuaccgguucaacggcaucggagugacccagaaugugcuguacgagaaccagaagcugaucgccaaccaguucaacagcgccaucggcaagauccaggacagccugagcagcacagcaagcgcccugggaaagcugcaggacguggucaaccagaaugcccaggcacugaacacccuggucaagcagcuguccuccaacuucggcgccaucagcucugugcugaacgauauccugagcagacuggacccuccugaggccgaggugcagaucgacagacugaucacaggcagacugcagagccuccagacauacgugacccagcagcugaucagagccgccgagauuagagccucugccaaucuggccgccaccaagaugucugagugugugcugggccagagcaagagaguggacuuuugcggcaagggcuaccaccugaugagcuucccucagucugccccucacggcgugguguuucugcacgugacauaugugcccgcucaagagaagaauuucaccaccgcuccagccaucugccacgacggcaaagcccacuuuccuagagaaggcguguucguguccaacggcacccauugguucgugacacagcggaacuucuacgagccccagaucaucaccaccgacaacaccuucgugucuggcaacugcgacgucgugaucggcauugugaacaauaccguguacgacccucugcagcccgagcuggacagcuucaaagaggaacuggacaaguacuuuaagaaccacacaagccccgacguggaccugggcgauaucagcggaaucaaugccagcgucgugaacauccagaaagagaucgaccggcugaacgagguggccaagaaucugaacgagagccugaucgaccugcaagaacuggggaaguacgagcaguacaucaaguggcccugguacaucuggcugggcuuuaucgccggacugauugccaucgugauggucacaaucaugcuguguugcaugaccagcugcuguagcugccugaagggcuguuguagcuguggcagcugcugcaaguucgacgaggacgauucugagcccgugcugaagggcgugaaacugcacuacacauga

SEQ ID NO: 23170 - RNA, 3822 nt, Artificial Sequence
  SARS-CoV-2/Wuhan/WIV05/2019__EPI_ISL_402128 spike protein CDS gc mod (1-1273)(K986P_V987P_N439K_D614G)
auguucguguuccuggugcugcugccucugguguccagccagugugugaaccugaccaccagaacacagcugccuccagccuacaccaacagcuuuaccagaggcguguacuaccccgacaagguguucagauccagcgugcugcacucuacccaggaccuguuccugccuuucuucagcaacgugaccugguuccacgccauccacguguccggcaccaauggcaccaagagauucgacaaccccgugcugcccuucaacgacgggguguacuuugccagcaccgagaaguccaacaucaucagaggcuggaucuucggcaccacacuggacagcaagacccagagccugcugaucgugaacaacgccaccaacguggucaucaaagugugcgaguuccaguucugcaacgaccccuuccugggcgucuacuaccacaagaacaacaagagcuggauggaaagcgaguuccggguguacagcagcgccaacaacugcaccuucgaguacgugucccagccuuuccugauggaccuggaaggcaagcagggcaacuucaagaaccugcgcgaguucguguuuaagaacaucgacggcuacuucaagaucuacagcaagcacaccccuaucaaccucgugcgggaucugccucagggcuucucugcucuggaaccccugguggaucugcccaucggcaucaacaucacccgguuucagacacugcuggcccugcacagaagcuaccugacaccuggcgauagcagcagcggauggacagcuggugccgccgcuuacuaugugggcuaccugcagccuagaaccuuccugcugaaguacaacgagaacggcaccaucaccgacgccguggauugugcucuggauccucugagcgagacaaagugcacccugaaguccuucaccguggaaaagggcaucuaccagaccagcaacuuccgggugcagcccaccgaauccaucgugcgguuccccaauaucaccaaucugugccccuucggcgagguguucaaugccaccagauucgccucuguguacgccuggaaccggaagcggaucagcaauugcguggccgacuacuccgugcuguacaacuccgccagcuucagcaccuucaagugcuacggcguguccccuaccaagcugaacgaccugugcuucacaaacguguacgccgacagcuucgugauccggggagaugaagugcggcagauugccccuggacagacaggcaagaucgccgacuacaacuacaagcugcccgacgacuucaccggcugugugauugccuggaacagcaagaaccuggacuccaaagucggcggcaacuacaauuaccuguaccggcuguuccggaaguccaaucugaagcccuucgagcgggacaucuccaccgagaucuaucaggccggcagcaccccuuguaacggcguggaaggcuucaacugcuacuucccacugcaguccuacggcuuucagcccacaaauggcgugggcuaucagcccuacagagugguggugcugagcuucgaacugcugcaugccccugccacagugugcggcccuaagaaaagcaccaaucucgugaagaacaaaugcgugaacuucaacuucaacggccugaccggcaccggcgugcugacagagagcaacaagaaguuccugccauuccagcaguuuggccgggauaucgccgauaccacagacgccguuagagauccccagacacuggaaauccuggacaucaccccuugcagcuucggcggagugucugugaucaccccuggcaccaacaccagcaaucagguggcagugcuguaccagggcgugaacuguaccgaagugcccguggccauucacgccgaucagcugacaccuacauggcggguguacuccaccggcagcaauguguuucagaccagagccggcugucugaucggagccgagcacgugaacaauagcuacgagugcgacauccccaucggcgcuggaaucugcgccagcuaccagacacagacaaacagcccucggagagccagaagcguggccagccagagcaucauugccuacacaaugucucugggcgccgagaacagcguggccuacuccaacaacucuaucgcuauccccaccaacuucaccaucagcgugaccacagagauccugccuguguccaugaccaagaccagcguggacugcaccauguacaucugcggcgauuccaccgagugcuccaaccugcugcugcaguacggcagcuucugcacccagcugaauagagcccugacagggaucgccguggaacaggacaagaacacccaagagguguucgcccaagugaagcagaucuacaagaccccuccuaucaaggacuucggcggcuucaauuucagccagauucugcccgauccuagcaagcccagcaagcggagcuucaucgaggaccugcuguucaacaaagugacacuggccgacgccggcuucaucaagcaguauggcgauugucugggcgacauugccgccagggaucugauuugcgcccagaaguuuaacggacugacagugcugccuccucugcugaccgaugagaugaucgcccaguacacaucugcccugcuggccggcacaaucacaagcggcuggacauuuggagcaggcgccgcucugcagauccccuuugcuaugcagauggccuaccgguucaacggcaucggagugacccagaaugugcuguacgagaaccagaagcugaucgccaaccaguucaacagcgccaucggcaagauccaggacagccugagcagcacagcaagcgcccugggaaagcugcaggacguggucaaccagaaugcccaggcacugaacacccuggucaagcagcuguccuccaacuucggcgccaucagcucugugcugaacgauauccugagcagacuggacccuccugaggccgaggugcagaucgacagacugaucacaggcagacugcagagccuccagacauacgugacccagcagcugaucagagccgccgagauuagagccucugccaaucuggccgccaccaagaugucugagugugugcugggccagagcaagagaguggacuuuugcggcaagggcuaccaccugaugagcuucccucagucugccccucacggcgugguguuucugcacgugacauaugugcccgcucaagagaagaauuucaccaccgcuccagccaucugccacgacggcaaagcccacuuuccuagagaaggcguguucguguccaacggcacccauugguucgugacacagcggaacuucuacgagccccagaucaucaccaccgacaacaccuucgugucuggcaacugcgacgucgugaucggcauugugaacaauaccguguacgacccucugcagcccgagcuggacagcuucaaagaggaacuggacaaguacuuuaagaaccacacaagccccgacguggaccugggcgauaucagcggaaucaaugccagcgucgugaacauccagaaagagaucgaccggcugaacgagguggccaagaaucugaacgagagccugaucgaccugcaagaacuggggaaguacgagcaguacaucaaguggcccugguacaucuggcugggcuuuaucgccggacugauugccaucgugauggucacaaucaugcuguguugcaugaccagcugcuguagcugccugaagggcuguuguagcuguggcagcugcugcaaguucgacgaggacgauucugagcccgugcugaagggcgugaaacugcacuacacauga

SEQ ID NO: 23171 - RNA, 3822 nt, Artificial Sequence
  SARS-CoV-2/Wuhan/WIV05/2019__EPI_ISL_402128 spike protein CDS gc mod (1-1273)(K986P_V987P_S477N_D614G)
auguucguguuccuggugcugcugccucugguguccagccagugugugaaccugaccaccagaacacagcugccuccagccuacaccaacagcuuuaccagaggcguguacuaccccgacaagguguucagauccagcgugcugcacucuacccaggaccuguuccugccuuucuucagcaacgugaccugguuccacgccauccacguguccggcaccaauggcaccaagagauucgacaaccccgugcugcccuucaacgacgggguguacuuugccagcaccgagaaguccaacaucaucagaggcuggaucuucggcaccacacuggacagcaagacccagagccugcugaucgugaacaacgccaccaacguggucaucaaagugugcgaguuccaguucugcaacgaccccuuccugggcgucuacuaccacaagaacaacaagagcuggauggaaagcgaguuccggguguacagcagcgccaacaacugcaccuucgaguacgugucccagccuuuccugauggaccuggaaggcaagcagggcaacuucaagaaccugcgcgaguucguguuuaagaacaucgacggcuacuucaagaucuacagcaagcacaccccuaucaaccucgugcgggaucugccucagggcuucucugcucuggaaccccugguggaucugcccaucggcaucaacaucacccgguuucagacacugcuggcccugcacagaagcuaccugacaccuggcgauagcagcagcggauggacagcuggugccgccgcuuacuaugugggcuaccugcagccuagaaccuuccugcugaaguacaacgagaacggcaccaucaccgacgccguggauugugcucuggauccucugagcgagacaaagugcacccugaaguccuucaccguggaaaagggcaucuaccagaccagcaacuuccgggugcagcccaccgaauccaucgugcgguuccccaauaucaccaaucugugccccuucggcgagguguucaaugccaccagauucgccucuguguacgccuggaaccggaagcggaucagcaauugcguggccgacuacuccgugcuguacaacuccgccagcuucagcaccuucaagugcuacggcguguccccuaccaagcugaacgaccugugcuucacaaacguguacgccgacagcuucgugauccggggagaugaagugcggcagauugccccuggacagacaggcaagaucgccgacuacaacuacaagcugcccgacgacuucaccggcugugugauugccuggaacagcaacaaccuggacuccaaagucggcggcaacuacaauuaccuguaccggcuguuccggaaguccaaucugaagcccuucgagcgggacaucuccaccgagaucuaucaggccggcaacaccccuuguaacggcguggaaggcuucaacugcuacuucccacugcaguccuacggcuuucagcccacaaauggcgugggcuaucagcccuacagagugguggugcugagcuucgaacugcugcaugccccugccacagugugcggcccuaagaaaagcaccaaucucgugaagaacaaaugcgugaacuucaacuucaacggccugaccggcaccggcgugcugacagagagcaacaagaaguuccugccauuccagcaguuuggccgggauaucgccgauaccacagacgccguuagagauccccagacacuggaaauccuggacaucaccccuugcagcuucggcggagugucugugaucaccccuggcaccaacaccagcaaucagguggcagugcuguaccagggcgugaacuguaccgaagugcccguggccauucacgccgaucagcugacaccuacauggcggguguacuccaccggcagcaauguguuucagaccagagccggcugucugaucggagccgagcacgugaacaauagcuacgagugcgacauccccaucggcgcuggaaucugcgccagcuaccagacacagacaaacagcccucggagagccagaagcguggccagccagagcaucauugccuacacaaugucucugggcgccgagaacagcguggccuacuccaacaacucuaucgcuauccccaccaacuucaccaucagcgugaccacagagauccugccuguguccaugaccaagaccagcguggacugcaccauguacaucugcggcgauuccaccgagugcuccaaccugcugcugcaguacggcagcuucugcacccagcugaauagagcccugacagggaucgccguggaacaggacaagaacacccaagagguguucgcccaagugaagcagaucuacaagaccccuccuaucaaggacuucggcggcuucaauuucagccagauucugcccgauccuagcaagcccagcaagcggagcuucaucgaggaccugcuguucaacaaagugacacuggccgacgccggcuucaucaagcaguauggcgauugucugggcgacauugccgccagggaucugauuugcgcccagaaguuuaacggacugacagugcugccuccucugcugaccgaugagaugaucgcccaguacacaucugcccugcuggccggcacaaucacaagcggcuggacauuuggagcaggcgccgcucugcagauccccuuugcuaugcagauggccuaccgguucaacggcaucggagugacccagaaugugcuguacgagaaccagaagcugaucgccaaccaguucaacagcgccaucggcaagauccaggacagccugagcagcacagcaagcgcccugggaaagcugcaggacguggucaaccagaaugcccaggcacugaacacccuggucaagcagcuguccuccaacuucggcgccaucagcucugugcugaacgauauccugagcagacuggacccuccugaggccgaggugcagaucgacagacugaucacaggcagacugcagagccuccagacauacgugacccagcagcugaucagagccgccgagauuagagccucugccaaucuggccgccaccaagaugucugagugugugcugggccagagcaagagaguggacuuuugcggcaagggcuaccaccugaugagcuucccucagucugccccucacggcgugguguuucugcacgugacauaugugcccgcucaagagaagaauuucaccaccgcuccagccaucugccacgacggcaaagcccacuuuccuagagaaggcguguucguguccaacggcacccauugguucgugacacagcggaacuucuacgagccccagaucaucaccaccgacaacaccuucgugucuggcaacugcgacgucgugaucggcauugugaacaauaccguguacgacccucugcagcccgagcuggacagcuucaaagaggaacuggacaaguacuuuaagaaccacacaagccccgacguggaccugggcgauaucagcggaaucaaugccagcgucgugaacauccagaaagagaucgaccggcugaacgagguggccaagaaucugaacgagagccugaucgaccugcaagaacuggggaaguacgagcaguacaucaaguggcccugguacaucuggcugggcuuuaucgccggacugauugccaucgugauggucacaaucaugcuguguugcaugaccagcugcuguagcugccugaagggcuguuguagcuguggcagcugcugcaaguucgacgaggacgauucugagcccgugcugaagggcgugaaacugcacuacacauga

SEQ ID NO: 23172 - RNA, 3822 nt, Artificial Sequence
  SARS-CoV-2/Wuhan/WIV05/2019__EPI_ISL_402128 spike protein CDS gc mod (1-1273)(K986P_V987P_N501Y_D614G)
auguucguguuccuggugcugcugccucugguguccagccagugugugaaccugaccaccagaacacagcugccuccagccuacaccaacagcuuuaccagaggcguguacuaccccgacaagguguucagauccagcgugcugcacucuacccaggaccuguuccugccuuucuucagcaacgugaccugguuccacgccauccacguguccggcaccaauggcaccaagagauucgacaaccccgugcugcccuucaacgacgggguguacuuugccagcaccgagaaguccaacaucaucagaggcuggaucuucggcaccacacuggacagcaagacccagagccugcugaucgugaacaacgccaccaacguggucaucaaagugugcgaguuccaguucugcaacgaccccuuccugggcgucuacuaccacaagaacaacaagagcuggauggaaagcgaguuccggguguacagcagcgccaacaacugcaccuucgaguacgugucccagccuuuccugauggaccuggaaggcaagcagggcaacuucaagaaccugcgcgaguucguguuuaagaacaucgacggcuacuucaagaucuacagcaagcacaccccuaucaaccucgugcgggaucugccucagggcuucucugcucuggaaccccugguggaucugcccaucggcaucaacaucacccgguuucagacacugcuggcccugcacagaagcuaccugacaccuggcgauagcagcagcggauggacagcuggugccgccgcuuacuaugugggcuaccugcagccuagaaccuuccugcugaaguacaacgagaacggcaccaucaccgacgccguggauugugcucuggauccucugagcgagacaaagugcacccugaaguccuucaccguggaaaagggcaucuaccagaccagcaacuuccgggugcagcccaccgaauccaucgugcgguuccccaauaucaccaaucugugccccuucggcgagguguucaaugccaccagauucgccucuguguacgccuggaaccggaagcggaucagcaauugcguggccgacuacuccgugcuguacaacuccgccagcuucagcaccuucaagugcuacggcguguccccuaccaagcugaacgaccugugcuucacaaacguguacgccgacagcuucgugauccggggagaugaagugcggcagauugccccuggacagacaggcaagaucgccgacuacaacuacaagcugcccgacgacuucaccggcugugugauugccuggaacagcaacaaccuggacuccaaagucggcggcaacuacaauuaccuguaccggcuguuccggaaguccaaucugaagcccuucgagcgggacaucuccaccgagaucuaucaggccggcagcaccccuuguaacggcguggaaggcuucaacugcuacuucccacugcaguccuacggcuuucagcccacauacggcgugggcuaucagcccuacagagugguggugcugagcuucgaacugcugcaugccccugccacagugugcggcccuaagaaaagcaccaaucucgugaagaacaaaugcgugaacuucaacuucaacggccugaccggcaccggcgugcugacagagagcaacaagaaguuccugccauuccagcaguuuggccgggauaucgccgauaccacagacgccguuagagauccccagacacuggaaauccuggacaucaccccuugcagcuucggcggagugucugugaucaccccuggcaccaacaccagcaaucagguggcagugcuguaccagggcgugaacuguaccgaagugcccguggccauucacgccgaucagcugacaccuacauggcggguguacuccaccggcagcaauguguuucagaccagagccggcugucugaucggagccgagcacgugaacaauagcuacgagugcgacauccccaucggcgcuggaaucugcgccagcuaccagacacagacaaacagcccucggagagccagaagcguggccagccagagcaucauugccuacacaaugucucugggcgccgagaacagcguggccuacuccaacaacucuaucgcuauccccaccaacuucaccaucagcgugaccacagagauccugccuguguccaugaccaagaccagcguggacugcaccauguacaucugcggcgauuccaccgagugcuccaaccugcugcugcaguacggcagcuucugcacccagcugaauagagcccugacagggaucgccguggaacaggacaagaacacccaagagguguucgcccaagugaagcagaucuacaagaccccuccuaucaaggacuucggcggcuucaauuucagccagauucugcccgauccuagcaagcccagcaagcggagcuucaucgaggaccugcuguucaacaaagugacacuggccgacgccggcuucaucaagcaguauggcgauugucugggcgacauugccgccagggaucugauuugcgcccagaaguuuaacggacugacagugcugccuccucugcugaccgaugagaugaucgcccaguacacaucugcccugcuggccggcacaaucacaagcggcuggacauuuggagcaggcgccgcucugcagauccccuuugcuaugcagauggccuaccgguucaacggcaucggagugacccagaaugugcuguacgagaaccagaagcugaucgccaaccaguucaacagcgccaucggcaagauccaggacagccugagcagcacagcaagcgcccugggaaagcugcaggacguggucaaccagaaugcccaggcacugaacacccuggucaagcagcuguccuccaacuucggcgccaucagcucugugcugaacgauauccugagcagacuggacccuccugaggccgaggugcagaucgacagacugaucacaggcagacugcagagccuccagacauacgugacccagcagcugaucagagccgccgagauuagagccucugccaaucuggccgccaccaagaugucugagugugugcugggccagagcaagagaguggacuuuugcggcaagggcuaccaccugaugagcuucccucagucugccccucacggcgugguguuucugcacgugacauaugugcccgcucaagagaagaauuucaccaccgcuccagccaucugccacgacggcaaagcccacuuuccuagagaaggcguguucguguccaacggcacccauugguucgugacacagcggaacuucuacgagccccagaucaucaccaccgacaacaccuucgugucuggcaacugcgacgucgugaucggcauugugaacaauaccguguacgacccucugcagcccgagcuggacagcuucaaagaggaacuggacaaguacuuuaagaaccacacaagccccgacguggaccugggcgauaucagcggaaucaaugccagcgucgugaacauccagaaagagaucgaccggcugaacgagguggccaagaaucugaacgagagccugaucgaccugcaagaacuggggaaguacgagcaguacaucaaguggcccugguacaucuggcugggcuuuaucgccggacugauugccaucgugauggucacaaucaugcuguguugcaugaccagcugcuguagcugccugaagggcuguuguagcuguggcagcugcugcaaguucgacgaggacgauucugagcccgugcugaagggcgugaaacugcacuacacauga

SEQ ID NO: 23173 - RNA, 3816 nt, Artificial Sequence
  SARS-CoV-2/Wuhan/WIV05/2019__EPI_ISL_402128 spike protein CDS gc mod (1-1273)(K986P_V987P_H69del_V70del_D614G)
auguucguguuccuggugcugcugccucugguguccagccagugugugaaccugaccaccagaacacagcugccuccagccuacaccaacagcuuuaccagaggcguguacuaccccgacaagguguucagauccagcgugcugcacucuacccaggaccuguuccugccuuucuucagcaacgugaccugguuccacgccaucuccggcaccaauggcaccaagagauucgacaaccccgugcugcccuucaacgacgggguguacuuugccagcaccgagaaguccaacaucaucagaggcuggaucuucggcaccacacuggacagcaagacccagagccugcugaucgugaacaacgccaccaacguggucaucaaagugugcgaguuccaguucugcaacgaccccuuccugggcgucuacuaccacaagaacaacaagagcuggauggaaagcgaguuccggguguacagcagcgccaacaacugcaccuucgaguacgugucccagccuuuccugauggaccuggaaggcaagcagggcaacuucaagaaccugcgcgaguucguguuuaagaacaucgacggcuacuucaagaucuacagcaagcacaccccuaucaaccucgugcgggaucugccucagggcuucucugcucuggaaccccugguggaucugcccaucggcaucaacaucacccgguuucagacacugcuggcccugcacagaagcuaccugacaccuggcgauagcagcagcggauggacagcuggugccgccgcuuacuaugugggcuaccugcagccuagaaccuuccugcugaaguacaacgagaacggcaccaucaccgacgccguggauugugcucuggauccucugagcgagacaaagugcacccugaaguccuucaccguggaaaagggcaucuaccagaccagcaacuuccgggugcagcccaccgaauccaucgugcgguuccccaauaucaccaaucugugccccuucggcgagguguucaaugccaccagauucgccucuguguacgccuggaaccggaagcggaucagcaauugcguggccgacuacuccgugcuguacaacuccgccagcuucagcaccuucaagugcuacggcguguccccuaccaagcugaacgaccugugcuucacaaacguguacgccgacagcuucgugauccggggagaugaagugcggcagauugccccuggacagacaggcaagaucgccgacuacaacuacaagcugcccgacgacuucaccggcugugugauugccuggaacagcaacaaccuggacuccaaagucggcggcaacuacaauuaccuguaccggcuguuccggaaguccaaucugaagcccuucgagcgggacaucuccaccgagaucuaucaggccggcagcaccccuuguaacggcguggaaggcuucaacugcuacuucccacugcaguccuacggcuuucagcccacaaauggcgugggcuaucagcccuacagagugguggugcugagcuucgaacugcugcaugccccugccacagugugcggcccuaagaaaagcaccaaucucgugaagaacaaaugcgugaacuucaacuucaacggccugaccggcaccggcgugcugacagagagcaacaagaaguuccugccauuccagcaguuuggccgggauaucgccgauaccacagacgccguuagagauccccagacacuggaaauccuggacaucaccccuugcagcuucggcggagugucugugaucaccccuggcaccaacaccagcaaucagguggcagugcuguaccagggcgugaacuguaccgaagugcccguggccauucacgccgaucagcugacaccuacauggcggguguacuccaccggcagcaauguguuucagaccagagccggcugucugaucggagccgagcacgugaacaauagcuacgagugcgacauccccaucggcgcuggaaucugcgccagcuaccagacacagacaaacagcccucggagagccagaagcguggccagccagagcaucauugccuacacaaugucucugggcgccgagaacagcguggccuacuccaacaacucuaucgcuauccccaccaacuucaccaucagcgugaccacagagauccugccuguguccaugaccaagaccagcguggacugcaccauguacaucugcggcgauuccaccgagugcuccaaccugcugcugcaguacggcagcuucugcacccagcugaauagagcccugacagggaucgccguggaacaggacaagaacacccaagagguguucgcccaagugaagcagaucuacaagaccccuccuaucaaggacuucggcggcuucaauuucagccagauucugcccgauccuagcaagcccagcaagcggagcuucaucgaggaccugcuguucaacaaagugacacuggccgacgccggcuucaucaagcaguauggcgauugucugggcgacauugccgccagggaucugauuugcgcccagaaguuuaacggacugacagugcugccuccucugcugaccgaugagaugaucgcccaguacacaucugcccugcuggccggcacaaucacaagcggcuggacauuuggagcaggcgccgcucugcagauccccuuugcuaugcagauggccuaccgguucaacggcaucggagugacccagaaugugcuguacgagaaccagaagcugaucgccaaccaguucaacagcgccaucggcaagauccaggacagccugagcagcacagcaagcgcccugggaaagcugcaggacguggucaaccagaaugcccaggcacugaacacccuggucaagcagcuguccuccaacuucggcgccaucagcucugugcugaacgauauccugagcagacuggacccuccugaggccgaggugcagaucgacagacugaucacaggcagacugcagagccuccagacauacgugacccagcagcugaucagagccgccgagauuagagccucugccaaucuggccgccaccaagaugucugagugugugcugggccagagcaagagaguggacuuuugcggcaagggcuaccaccugaugagcuucccucagucugccccucacggcgugguguuucugcacgugacauaugugcccgcucaagagaagaauuucaccaccgcuccagccaucugccacgacggcaaagcccacuuuccuagagaaggcguguucguguccaacggcacccauugguucgugacacagcggaacuucuacgagccccagaucaucaccaccgacaacaccuucgugucuggcaacugcgacgucgugaucggcauugugaacaauaccguguacgacccucugcagcccgagcuggacagcuucaaagaggaacuggacaaguacuuuaagaaccacacaagccccgacguggaccugggcgauaucagcggaaucaaugccagcgucgugaacauccagaaagagaucgaccggcugaacgagguggccaagaaucugaacgagagccugaucgaccugcaagaacuggggaaguacgagcaguacaucaaguggcccugguacaucuggcugggcuuuaucgccggacugauugccaucgugauggucacaaucaugcuguguugcaugaccagcugcuguagcugccugaagggcuguuguagcuguggcagcugcugcaaguucgacgaggacgauucugagcccgugcugaagggcgugaaacugcacuacacauga

SEQ ID NO: 23174 - RNA, 3822 nt, Artificial Sequence
  SARS-CoV-2/Wuhan/WIV05/2019__EPI_ISL_402128 spike protein CDS gc mod (1-1273)(K986P_V987P_Y453F_D614G)
auguucguguuccuggugcugcugccucugguguccagccagugugugaaccugaccaccagaacacagcugccuccagccuacaccaacagcuuuaccagaggcguguacuaccccgacaagguguucagauccagcgugcugcacucuacccaggaccuguuccugccuuucuucagcaacgugaccugguuccacgccauccacguguccggcaccaauggcaccaagagauucgacaaccccgugcugcccuucaacgacgggguguacuuugccagcaccgagaaguccaacaucaucagaggcuggaucuucggcaccacacuggacagcaagacccagagccugcugaucgugaacaacgccaccaacguggucaucaaagugugcgaguuccaguucugcaacgaccccuuccugggcgucuacuaccacaagaacaacaagagcuggauggaaagcgaguuccggguguacagcagcgccaacaacugcaccuucgaguacgugucccagccuuuccugauggaccuggaaggcaagcagggcaacuucaagaaccugcgcgaguucguguuuaagaacaucgacggcuacuucaagaucuacagcaagcacaccccuaucaaccucgugcgggaucugccucagggcuucucugcucuggaaccccugguggaucugcccaucggcaucaacaucacccgguuucagacacugcuggcccugcacagaagcuaccugacaccuggcgauagcagcagcggauggacagcuggugccgccgcuuacuaugugggcuaccugcagccuagaaccuuccugcugaaguacaacgagaacggcaccaucaccgacgccguggauugugcucuggauccucugagcgagacaaagugcacccugaaguccuucaccguggaaaagggcaucuaccagaccagcaacuuccgggugcagcccaccgaauccaucgugcgguuccccaauaucaccaaucugugccccuucggcgagguguucaaugccaccagauucgccucuguguacgccuggaaccggaagcggaucagcaauugcguggccgacuacuccgugcuguacaacuccgccagcuucagcaccuucaagugcuacggcguguccccuaccaagcugaacgaccugugcuucacaaacguguacgccgacagcuucgugauccggggagaugaagugcggcagauugccccuggacagacaggcaagaucgccgacuacaacuacaagcugcccgacgacuucaccggcugugugauugccuggaacagcaacaaccuggacuccaaagucggcggcaacuacaauuaccuguuccggcuguuccggaaguccaaucugaagcccuucgagcgggacaucuccaccgagaucuaucaggccggcagcaccccuuguaacggcguggaaggcuucaacugcuacuucccacugcaguccuacggcuuucagcccacaaauggcgugggcuaucagcccuacagagugguggugcugagcuucgaacugcugcaugccccugccacagugugcggcccuaagaaaagcaccaaucucgugaagaacaaaugcgugaacuucaacuucaacggccugaccggcaccggcgugcugacagagagcaacaagaaguuccugccauuccagcaguuuggccgggauaucgccgauaccacagacgccguuagagauccccagacacuggaaauccuggacaucaccccuugcagcuucggcggagugucugugaucaccccuggcaccaacaccagcaaucagguggcagugcuguaccagggcgugaacuguaccgaagugcccguggccauucacgccgaucagcugacaccuacauggcggguguacuccaccggcagcaauguguuucagaccagagccggcugucugaucggagccgagcacgugaacaauagcuacgagugcgacauccccaucggcgcuggaaucugcgccagcuaccagacacagacaaacagcccucggagagccagaagcguggccagccagagcaucauugccuacacaaugucucugggcgccgagaacagcguggccuacuccaacaacucuaucgcuauccccaccaacuucaccaucagcgugaccacagagauccugccuguguccaugaccaagaccagcguggacugcaccauguacaucugcggcgauuccaccgagugcuccaaccugcugcugcaguacggcagcuucugcacccagcugaauagagcccugacagggaucgccguggaacaggacaagaacacccaagagguguucgcccaagugaagcagaucuacaagaccccuccuaucaaggacuucggcggcuucaauuucagccagauucugcccgauccuagcaagcccagcaagcggagcuucaucgaggaccugcuguucaacaaagugacacuggccgacgccggcuucaucaagcaguauggcgauugucugggcgacauugccgccagggaucugauuugcgcccagaaguuuaacggacugacagugcugccuccucugcugaccgaugagaugaucgcccaguacacaucugcccugcuggccggcacaaucacaagcggcuggacauuuggagcaggcgccgcucugcagauccccuuugcuaugcagauggccuaccgguucaacggcaucggagugacccagaaugugcuguacgagaaccagaagcugaucgccaaccaguucaacagcgccaucggcaagauccaggacagccugagcagcacagcaagcgcccugggaaagcugcaggacguggucaaccagaaugcccaggcacugaacacccuggucaagcagcuguccuccaacuucggcgccaucagcucugugcugaacgauauccugagcagacuggacccuccugaggccgaggugcagaucgacagacugaucacaggcagacugcagagccuccagacauacgugacccagcagcugaucagagccgccgagauuagagccucugccaaucuggccgccaccaagaugucugagugugugcugggccagagcaagagaguggacuuuugcggcaagggcuaccaccugaugagcuucccucagucugccccucacggcgugguguuucugcacgugacauaugugcccgcucaagagaagaauuucaccaccgcuccagccaucugccacgacggcaaagcccacuuuccuagagaaggcguguucguguccaacggcacccauugguucgugacacagcggaacuucuacgagccccagaucaucaccaccgacaacaccuucgugucuggcaacugcgacgucgugaucggcauugugaacaauaccguguacgacccucugcagcccgagcuggacagcuucaaagaggaacuggacaaguacuuuaagaaccacacaagccccgacguggaccugggcgauaucagcggaaucaaugccagcgucgugaacauccagaaagagaucgaccggcugaacgagguggccaagaaucugaacgagagccugaucgaccugcaagaacuggggaaguacgagcaguacaucaaguggcccugguacaucuggcugggcuuuaucgccggacugauugccaucgugauggucacaaucaugcuguguugcaugaccagcugcuguagcugccugaagggcuguuguagcuguggcagcugcugcaaguucgacgaggacgauucugagcccgugcugaagggcgugaaacugcacuacacauga

SEQ ID NO: 23175 - RNA, 3822 nt, Artificial Sequence
  SARS-CoV-2/Wuhan/WIV05/2019__EPI_ISL_402128 spike protein CDS gc mod (1-1273)(K986P_V987P_D614G_I692V)
auguucguguuccuggugcugcugccucugguguccagccagugugugaaccugaccaccagaacacagcugccuccagccuacaccaacagcuuuaccagaggcguguacuaccccgacaagguguucagauccagcgugcugcacucuacccaggaccuguuccugccuuucuucagcaacgugaccugguuccacgccauccacguguccggcaccaauggcaccaagagauucgacaaccccgugcugcccuucaacgacgggguguacuuugccagcaccgagaaguccaacaucaucagaggcuggaucuucggcaccacacuggacagcaagacccagagccugcugaucgugaacaacgccaccaacguggucaucaaagugugcgaguuccaguucugcaacgaccccuuccugggcgucuacuaccacaagaacaacaagagcuggauggaaagcgaguuccggguguacagcagcgccaacaacugcaccuucgaguacgugucccagccuuuccugauggaccuggaaggcaagcagggcaacuucaagaaccugcgcgaguucguguuuaagaacaucgacggcuacuucaagaucuacagcaagcacaccccuaucaaccucgugcgggaucugccucagggcuucucugcucuggaaccccugguggaucugcccaucggcaucaacaucacccgguuucagacacugcuggcccugcacagaagcuaccugacaccuggcgauagcagcagcggauggacagcuggugccgccgcuuacuaugugggcuaccugcagccuagaaccuuccugcugaaguacaacgagaacggcaccaucaccgacgccguggauugugcucuggauccucugagcgagacaaagugcacccugaaguccuucaccguggaaaagggcaucuaccagaccagcaacuuccgggugcagcccaccgaauccaucgugcgguuccccaauaucaccaaucugugccccuucggcgagguguucaaugccaccagauucgccucuguguacgccuggaaccggaagcggaucagcaauugcguggccgacuacuccgugcuguacaacuccgccagcuucagcaccuucaagugcuacggcguguccccuaccaagcugaacgaccugugcuucacaaacguguacgccgacagcuucgugauccggggagaugaagugcggcagauugccccuggacagacaggcaagaucgccgacuacaacuacaagcugcccgacgacuucaccggcugugugauugccuggaacagcaacaaccuggacuccaaagucggcggcaacuacaauuaccuguaccggcuguuccggaaguccaaucugaagcccuucgagcgggacaucuccaccgagaucuaucaggccggcagcaccccuuguaacggcguggaaggcuucaacugcuacuucccacugcaguccuacggcuuucagcccacaaauggcgugggcuaucagcccuacagagugguggugcugagcuucgaacugcugcaugccccugccacagugugcggcccuaagaaaagcaccaaucucgugaagaacaaaugcgugaacuucaacuucaacggccugaccggcaccggcgugcugacagagagcaacaagaaguuccugccauuccagcaguuuggccgggauaucgccgauaccacagacgccguuagagauccccagacacuggaaauccuggacaucaccccuugcagcuucggcggagugucugugaucaccccuggcaccaacaccagcaaucagguggcagugcuguaccagggcgugaacuguaccgaagugcccguggccauucacgccgaucagcugacaccuacauggcggguguacuccaccggcagcaauguguuucagaccagagccggcugucugaucggagccgagcacgugaacaauagcuacgagugcgacauccccaucggcgcuggaaucugcgccagcuaccagacacagacaaacagcccucggagagccagaagcguggccagccagagcgugauugccuacacaaugucucugggcgccgagaacagcguggccuacuccaacaacucuaucgcuauccccaccaacuucaccaucagcgugaccacagagauccugccuguguccaugaccaagaccagcguggacugcaccauguacaucugcggcgauuccaccgagugcuccaaccugcugcugcaguacggcagcuucugcacccagcugaauagagcccugacagggaucgccguggaacaggacaagaacacccaagagguguucgcccaagugaagcagaucuacaagaccccuccuaucaaggacuucggcggcuucaauuucagccagauucugcccgauccuagcaagcccagcaagcggagcuucaucgaggaccugcuguucaacaaagugacacuggccgacgccggcuucaucaagcaguauggcgauugucugggcgacauugccgccagggaucugauuugcgcccagaaguuuaacggacugacagugcugccuccucugcugaccgaugagaugaucgcccaguacacaucugcccugcuggccggcacaaucacaagcggcuggacauuuggagcaggcgccgcucugcagauccccuuugcuaugcagauggccuaccgguucaacggcaucggagugacccagaaugugcuguacgagaaccagaagcugaucgccaaccaguucaacagcgccaucggcaagauccaggacagccugagcagcacagcaagcgcccugggaaagcugcaggacguggucaaccagaaugcccaggcacugaacacccuggucaagcagcuguccuccaacuucggcgccaucagcucugugcugaacgauauccugagcagacuggacccuccugaggccgaggugcagaucgacagacugaucacaggcagacugcagagccuccagacauacgugacccagcagcugaucagagccgccgagauuagagccucugccaaucuggccgccaccaagaugucugagugugugcugggccagagcaagagaguggacuuuugcggcaagggcuaccaccugaugagcuucccucagucugccccucacggcgugguguuucugcacgugacauaugugcccgcucaagagaagaauuucaccaccgcuccagccaucugccacgacggcaaagcccacuuuccuagagaaggcguguucguguccaacggcacccauugguucgugacacagcggaacuucuacgagccccagaucaucaccaccgacaacaccuucgugucuggcaacugcgacgucgugaucggcauugugaacaauaccguguacgacccucugcagcccgagcuggacagcuucaaagaggaacuggacaaguacuuuaagaaccacacaagccccgacguggaccugggcgauaucagcggaaucaaugccagcgucgugaacauccagaaagagaucgaccggcugaacgagguggccaagaaucugaacgagagccugaucgaccugcaagaacuggggaaguacgagcaguacaucaaguggcccugguacaucuggcugggcuuuaucgccggacugauugccaucgugauggucacaaucaugcuguguugcaugaccagcugcuguagcugccugaagggcuguuguagcuguggcagcugcugcaaguucgacgaggacgauucugagcccgugcugaagggcgugaaacugcacuacacauga

SEQ ID NO: 23176 - RNA, 3822 nt, Artificial Sequence
  SARS-CoV-2/Wuhan/WIV05/2019__EPI_ISL_402128 spike protein CDS gc mod (1-1273)(K986P_V987P_D614G_M1229I)
auguucguguuccuggugcugcugccucugguguccagccagugugugaaccugaccaccagaacacagcugccuccagccuacaccaacagcuuuaccagaggcguguacuaccccgacaagguguucagauccagcgugcugcacucuacccaggaccuguuccugccuuucuucagcaacgugaccugguuccacgccauccacguguccggcaccaauggcaccaagagauucgacaaccccgugcugcccuucaacgacgggguguacuuugccagcaccgagaaguccaacaucaucagaggcuggaucuucggcaccacacuggacagcaagacccagagccugcugaucgugaacaacgccaccaacguggucaucaaagugugcgaguuccaguucugcaacgaccccuuccugggcgucuacuaccacaagaacaacaagagcuggauggaaagcgaguuccggguguacagcagcgccaacaacugcaccuucgaguacgugucccagccuuuccugauggaccuggaaggcaagcagggcaacuucaagaaccugcgcgaguucguguuuaagaacaucgacggcuacuucaagaucuacagcaagcacaccccuaucaaccucgugcgggaucugccucagggcuucucugcucuggaaccccugguggaucugcccaucggcaucaacaucacccgguuucagacacugcuggcccugcacagaagcuaccugacaccuggcgauagcagcagcggauggacagcuggugccgccgcuuacuaugugggcuaccugcagccuagaaccuuccugcugaaguacaacgagaacggcaccaucaccgacgccguggauugugcucuggauccucugagcgagacaaagugcacccugaaguccuucaccguggaaaagggcaucuaccagaccagcaacuuccgggugcagcccaccgaauccaucgugcgguuccccaauaucaccaaucugugccccuucggcgagguguucaaugccaccagauucgccucuguguacgccuggaaccggaagcggaucagcaauugcguggccgacuacuccgugcuguacaacuccgccagcuucagcaccuucaagugcuacggcguguccccuaccaagcugaacgaccugugcuucacaaacguguacgccgacagcuucgugauccggggagaugaagugcggcagauugccccuggacagacaggcaagaucgccgacuacaacuacaagcugcccgacgacuucaccggcugugugauugccuggaacagcaacaaccuggacuccaaagucggcggcaacuacaauuaccuguaccggcuguuccggaaguccaaucugaagcccuucgagcgggacaucuccaccgagaucuaucaggccggcagcaccccuuguaacggcguggaaggcuucaacugcuacuucccacugcaguccuacggcuuucagcccacaaauggcgugggcuaucagcccuacagagugguggugcugagcuucgaacugcugcaugccccugccacagugugcggcccuaagaaaagcaccaaucucgugaagaacaaaugcgugaacuucaacuucaacggccugaccggcaccggcgugcugacagagagcaacaagaaguuccugccauuccagcaguuuggccgggauaucgccgauaccacagacgccguuagagauccccagacacuggaaauccuggacaucaccccuugcagcuucggcggagugucugugaucaccccuggcaccaacaccagcaaucagguggcagugcuguaccagggcgugaacuguaccgaagugcccguggccauucacgccgaucagcugacaccuacauggcggguguacuccaccggcagcaauguguuucagaccagagccggcugucugaucggagccgagcacgugaacaauagcuacgagugcgacauccccaucggcgcuggaaucugcgccagcuaccagacacagacaaacagcccucggagagccagaagcguggccagccagagcaucauugccuacacaaugucucugggcgccgagaacagcguggccuacuccaacaacucuaucgcuauccccaccaacuucaccaucagcgugaccacagagauccugccuguguccaugaccaagaccagcguggacugcaccauguacaucugcggcgauuccaccgagugcuccaaccugcugcugcaguacggcagcuucugcacccagcugaauagagcccugacagggaucgccguggaacaggacaagaacacccaagagguguucgcccaagugaagcagaucuacaagaccccuccuaucaaggacuucggcggcuucaauuucagccagauucugcccgauccuagcaagcccagcaagcggagcuucaucgaggaccugcuguucaacaaagugacacuggccgacgccggcuucaucaagcaguauggcgauugucugggcgacauugccgccagggaucugauuugcgcccagaaguuuaacggacugacagugcugccuccucugcugaccgaugagaugaucgcccaguacacaucugcccugcuggccggcacaaucacaagcggcuggacauuuggagcaggcgccgcucugcagauccccuuugcuaugcagauggccuaccgguucaacggcaucggagugacccagaaugugcuguacgagaaccagaagcugaucgccaaccaguucaacagcgccaucggcaagauccaggacagccugagcagcacagcaagcgcccugggaaagcugcaggacguggucaaccagaaugcccaggcacugaacacccuggucaagcagcuguccuccaacuucggcgccaucagcucugugcugaacgauauccugagcagacuggacccuccugaggccgaggugcagaucgacagacugaucacaggcagacugcagagccuccagacauacgugacccagcagcugaucagagccgccgagauuagagccucugccaaucuggccgccaccaagaugucugagugugugcugggccagagcaagagaguggacuuuugcggcaagggcuaccaccugaugagcuucccucagucugccccucacggcgugguguuucugcacgugacauaugugcccgcucaagagaagaauuucaccaccgcuccagccaucugccacgacggcaaagcccacuuuccuagagaaggcguguucguguccaacggcacccauugguucgugacacagcggaacuucuacgagccccagaucaucaccaccgacaacaccuucgugucuggcaacugcgacgucgugaucggcauugugaacaauaccguguacgacccucugcagcccgagcuggacagcuucaaagaggaacuggacaaguacuuuaagaaccacacaagccccgacguggaccugggcgauaucagcggaaucaaugccagcgucgugaacauccagaaagagaucgaccggcugaacgagguggccaagaaucugaacgagagccugaucgaccugcaagaacuggggaaguacgagcaguacaucaaguggcccugguacaucuggcugggcuuuaucgccggacugauugccaucgugaucgucacaaucaugcuguguugcaugaccagcugcuguagcugccugaagggcuguuguagcuguggcagcugcugcaaguucgacgaggacgauucugagcccgugcugaagggcgugaaacugcacuacacauga

SEQ ID NO: 23177 - RNA, 3816 nt, Artificial Sequence
  SARS-CoV-2/Wuhan/WIV05/2019__EPI_ISL_402128 spike protein CDS gc mod (1-1273)(K986P_V987P_H69del_V70del_A222V_Y453F_S477N_D614G_I692V)
auguucguguuccuggugcugcugccucugguguccagccagugugugaaccugaccaccagaacacagcugccuccagccuacaccaacagcuuuaccagaggcguguacuaccccgacaagguguucagauccagcgugcugcacucuacccaggaccuguuccugccuuucuucagcaacgugaccugguuccacgccaucuccggcaccaauggcaccaagagauucgacaaccccgugcugcccuucaacgacgggguguacuuugccagcaccgagaaguccaacaucaucagaggcuggaucuucggcaccacacuggacagcaagacccagagccugcugaucgugaacaacgccaccaacguggucaucaaagugugcgaguuccaguucugcaacgaccccuuccugggcgucuacuaccacaagaacaacaagagcuggauggaaagcgaguuccggguguacagcagcgccaacaacugcaccuucgaguacgugucccagccuuuccugauggaccuggaaggcaagcagggcaacuucaagaaccugcgcgaguucguguuuaagaacaucgacggcuacuucaagaucuacagcaagcacaccccuaucaaccucgugcgggaucugccucagggcuucucugugcuggaaccccugguggaucugcccaucggcaucaacaucacccgguuucagacacugcuggcccugcacagaagcuaccugacaccuggcgauagcagcagcggauggacagcuggugccgccgcuuacuaugugggcuaccugcagccuagaaccuuccugcugaaguacaacgagaacggcaccaucaccgacgccguggauugugcucuggauccucugagcgagacaaagugcacccugaaguccuucaccguggaaaagggcaucuaccagaccagcaacuuccgggugcagcccaccgaauccaucgugcgguuccccaauaucaccaaucugugccccuucggcgagguguucaaugccaccagauucgccucuguguacgccuggaaccggaagcggaucagcaauugcguggccgacuacuccgugcuguacaacuccgccagcuucagcaccuucaagugcuacggcguguccccuaccaagcugaacgaccugugcuucacaaacguguacgccgacagcuucgugauccggggagaugaagugcggcagauugccccuggacagacaggcaagaucgccgacuacaacuacaagcugcccgacgacuucaccggcugugugauugccuggaacagcaacaaccuggacuccaaagucggcggcaacuacaauuaccuguuccggcuguuccggaaguccaaucugaagcccuucgagcgggacaucuccaccgagaucuaucaggccggcaacaccccuuguaacggcguggaaggcuucaacugcuacuucccacugcaguccuacggcuuucagcccacaaauggcgugggcuaucagcccuacagagugguggugcugagcuucgaacugcugcaugccccugccacagugugcggcccuaagaaaagcaccaaucucgugaagaacaaaugcgugaacuucaacuucaacggccugaccggcaccggcgugcugacagagagcaacaagaaguuccugccauuccagcaguuuggccgggauaucgccgauaccacagacgccguuagagauccccagacacuggaaauccuggacaucaccccuugcagcuucggcggagugucugugaucaccccuggcaccaacaccagcaaucagguggcagugcuguaccagggcgugaacuguaccgaagugcccguggccauucacgccgaucagcugacaccuacauggcggguguacuccaccggcagcaauguguuucagaccagagccggcugucugaucggagccgagcacgugaacaauagcuacgagugcgacauccccaucggcgcuggaaucugcgccagcuaccagacacagacaaacagcccucggagagccagaagcguggccagccagagcgugauugccuacacaaugucucugggcgccgagaacagcguggccuacuccaacaacucuaucgcuauccccaccaacuucaccaucagcgugaccacagagauccugccuguguccaugaccaagaccagcguggacugcaccauguacaucugcggcgauuccaccgagugcuccaaccugcugcugcaguacggcagcuucugcacccagcugaauagagcccugacagggaucgccguggaacaggacaagaacacccaagagguguucgcccaagugaagcagaucuacaagaccccuccuaucaaggacuucggcggcuucaauuucagccagauucugcccgauccuagcaagcccagcaagcggagcuucaucgaggaccugcuguucaacaaagugacacuggccgacgccggcuucaucaagcaguauggcgauugucugggcgacauugccgccagggaucugauuugcgcccagaaguuuaacggacugacagugcugccuccucugcugaccgaugagaugaucgcccaguacacaucugcccugcuggccggcacaaucacaagcggcuggacauuuggagcaggcgccgcucugcagauccccuuugcuaugcagauggccuaccgguucaacggcaucggagugacccagaaugugcuguacgagaaccagaagcugaucgccaaccaguucaacagcgccaucggcaagauccaggacagccugagcagcacagcaagcgcccugggaaagcugcaggacguggucaaccagaaugcccaggcacugaacacccuggucaagcagcuguccuccaacuucggcgccaucagcucugugcugaacgauauccugagcagacuggacccuccugaggccgaggugcagaucgacagacugaucacaggcagacugcagagccuccagacauacgugacccagcagcugaucagagccgccgagauuagagccucugccaaucuggccgccaccaagaugucugagugugugcugggccagagcaagagaguggacuuuugcggcaagggcuaccaccugaugagcuucccucagucugccccucacggcgugguguuucugcacgugacauaugugcccgcucaagagaagaauuucaccaccgcuccagccaucugccacgacggcaaagcccacuuuccuagagaaggcguguucguguccaacggcacccauugguucgugacacagcggaacuucuacgagccccagaucaucaccaccgacaacaccuucgugucuggcaacugcgacgucgugaucggcauugugaacaauaccguguacgacccucugcagcccgagcuggacagcuucaaagaggaacuggacaaguacuuuaagaaccacacaagccccgacguggaccugggcgauaucagcggaaucaaugccagcgucgugaacauccagaaagagaucgaccggcugaacgagguggccaagaaucugaacgagagccugaucgaccugcaagaacuggggaaguacgagcaguacaucaaguggcccugguacaucuggcugggcuuuaucgccggacugauugccaucgugauggucacaaucaugcuguguugcaugaccagcugcuguagcugccugaagggcuguuguagcuguggcagcugcugcaaguucgacgaggacgauucugagcccgugcugaagggcgugaaacugcacuacacauga

SEQ ID NO: 23178 - RNA, 3816 nt, Artificial Sequence
  SARS-CoV-2/Wuhan/WIV05/2019__EPI_ISL_402128 spike protein CDS gc mod (1-1273)(K986P_V987P_H69del_V70del_Y453F_D614G_I692V_M1229I)
auguucguguuccuggugcugcugccucugguguccagccagugugugaaccugaccaccagaacacagcugccuccagccuacaccaacagcuuuaccagaggcguguacuaccccgacaagguguucagauccagcgugcugcacucuacccaggaccuguuccugccuuucuucagcaacgugaccugguuccacgccaucuccggcaccaauggcaccaagagauucgacaaccccgugcugcccuucaacgacgggguguacuuugccagcaccgagaaguccaacaucaucagaggcuggaucuucggcaccacacuggacagcaagacccagagccugcugaucgugaacaacgccaccaacguggucaucaaagugugcgaguuccaguucugcaacgaccccuuccugggcgucuacuaccacaagaacaacaagagcuggauggaaagcgaguuccggguguacagcagcgccaacaacugcaccuucgaguacgugucccagccuuuccugauggaccuggaaggcaagcagggcaacuucaagaaccugcgcgaguucguguuuaagaacaucgacggcuacuucaagaucuacagcaagcacaccccuaucaaccucgugcgggaucugccucagggcuucucugcucuggaaccccugguggaucugcccaucggcaucaacaucacccgguuucagacacugcuggcccugcacagaagcuaccugacaccuggcgauagcagcagcggauggacagcuggugccgccgcuuacuaugugggcuaccugcagccuagaaccuuccugcugaaguacaacgagaacggcaccaucaccgacgccguggauugugcucuggauccucugagcgagacaaagugcacccugaaguccuucaccguggaaaagggcaucuaccagaccagcaacuuccgggugcagcccaccgaauccaucgugcgguuccccaauaucaccaaucugugccccuucggcgagguguucaaugccaccagauucgccucuguguacgccuggaaccggaagcggaucagcaauugcguggccgacuacuccgugcuguacaacuccgccagcuucagcaccuucaagugcuacggcguguccccuaccaagcugaacgaccugugcuucacaaacguguacgccgacagcuucgugauccggggagaugaagugcggcagauugccccuggacagacaggcaagaucgccgacuacaacuacaagcugcccgacgacuucaccggcugugugauugccuggaacagcaacaaccuggacuccaaagucggcggcaacuacaauuaccuguuccggcuguuccggaaguccaaucugaagcccuucgagcgggacaucuccaccgagaucuaucaggccggcagcaccccuuguaacggcguggaaggcuucaacugcuacuucccacugcaguccuacggcuuucagcccacaaauggcgugggcuaucagcccuacagagugguggugcugagcuucgaacugcugcaugccccugccacagugugcggcccuaagaaaagcaccaaucucgugaagaacaaaugcgugaacuucaacuucaacggccugaccggcaccggcgugcugacagagagcaacaagaaguuccugccauuccagcaguuuggccgggauaucgccgauaccacagacgccguuagagauccccagacacuggaaauccuggacaucaccccuugcagcuucggcggagugucugugaucaccccuggcaccaacaccagcaaucagguggcagugcuguaccagggcgugaacuguaccgaagugcccguggccauucacgccgaucagcugacaccuacauggcggguguacuccaccggcagcaauguguuucagaccagagccggcugucugaucggagccgagcacgugaacaauagcuacgagugcgacauccccaucggcgcuggaaucugcgccagcuaccagacacagacaaacagcccucggagagccagaagcguggccagccagagcgugauugccuacacaaugucucugggcgccgagaacagcguggccuacuccaacaacucuaucgcuauccccaccaacuucaccaucagcgugaccacagagauccugccuguguccaugaccaagaccagcguggacugcaccauguacaucugcggcgauuccaccgagugcuccaaccugcugcugcaguacggcagcuucugcacccagcugaauagagcccugacagggaucgccguggaacaggacaagaacacccaagagguguucgcccaagugaagcagaucuacaagaccccuccuaucaaggacuucggcggcuucaauuucagccagauucugcccgauccuagcaagcccagcaagcggagcuucaucgaggaccugcuguucaacaaagugacacuggccgacgccggcuucaucaagcaguauggcgauugucugggcgacauugccgccagggaucugauuugcgcccagaaguuuaacggacugacagugcugccuccucugcugaccgaugagaugaucgcccaguacacaucugcccugcuggccggcacaaucacaagcggcuggacauuuggagcaggcgccgcucugcagauccccuuugcuaugcagauggccuaccgguucaacggcaucggagugacccagaaugugcuguacgagaaccagaagcugaucgccaaccaguucaacagcgccaucggcaagauccaggacagccugagcagcacagcaagcgcccugggaaagcugcaggacguggucaaccagaaugcccaggcacugaacacccuggucaagcagcuguccuccaacuucggcgccaucagcucugugcugaacgauauccugagcagacuggacccuccugaggccgaggugcagaucgacagacugaucacaggcagacugcagagccuccagacauacgugacccagcagcugaucagagccgccgagauuagagccucugccaaucuggccgccaccaagaugucugagugugugcugggccagagcaagagaguggacuuuugcggcaagggcuaccaccugaugagcuucccucagucugccccucacggcgugguguuucugcacgugacauaugugcccgcucaagagaagaauuucaccaccgcuccagccaucugccacgacggcaaagcccacuuuccuagagaaggcguguucguguccaacggcacccauugguucgugacacagcggaacuucuacgagccccagaucaucaccaccgacaacaccuucgugucuggcaacugcgacgucgugaucggcauugugaacaauaccguguacgacccucugcagcccgagcuggacagcuucaaagaggaacuggacaaguacuuuaagaaccacacaagccccgacguggaccugggcgauaucagcggaaucaaugccagcgucgugaacauccagaaagagaucgaccggcugaacgagguggccaagaaucugaacgagagccugaucgaccugcaagaacuggggaaguacgagcaguacaucaaguggcccugguacaucuggcugggcuuuaucgccggacugauugccaucgugaucgucacaaucaugcuguguugcaugaccagcugcuguagcugccugaagggcuguuguagcuguggcagcugcugcaaguucgacgaggacgauucugagcccgugcugaagggcgugaaacugcacuacacauga

SEQ ID NO: 23179 - RNA, 3813 nt, Artificial Sequence
  SARS-CoV-2/Wuhan/WIV05/2019__EPI_ISL_402128 spike protein CDS gc mod (1-1273)(K986P_V987P_K986P_V987P_H69del_V70del_Y144del_N501Y_A570 D_D614G_P681H_T716I_S982A_D1118H)
auguucguguuccuggugcugcugccucugguguccagccagugugugaaccugaccaccagaacacagcugccuccagccuacaccaacagcuuuaccagaggcguguacuaccccgacaagguguucagauccagcgugcugcacucuacccaggaccuguuccugccuuucuucagcaacgugaccugguuccacgccaucuccggcaccaauggcaccaagagauucgacaaccccgugcugcccuucaacgacgggguguacuuugccagcaccgagaaguccaacaucaucagaggcuggaucuucggcaccacacuggacagcaagacccagagccugcugaucgugaacaacgccaccaacguggucaucaaagugugcgaguuccaguucugcaacgaccccuuccugggcgucuaccacaagaacaacaagagcuggauggaaagcgaguuccggguguacagcagcgccaacaacugcaccuucgaguacgugucccagccuuuccugauggaccuggaaggcaagcagggcaacuucaagaaccugcgcgaguucguguuuaagaacaucgacggcuacuucaagaucuacagcaagcacaccccuaucaaccucgugcgggaucugccucagggcuucucugcucuggaaccccugguggaucugcccaucggcaucaacaucacccgguuucagacacugcuggcccugcacagaagcuaccugacaccuggcgauagcagcagcggauggacagcuggugccgccgcuuacuaugugggcuaccugcagccuagaaccuuccugcugaaguacaacgagaacggcaccaucaccgacgccguggauugugcucuggauccucugagcgagacaaagugcacccugaaguccuucaccguggaaaagggcaucuaccagaccagcaacuuccgggugcagcccaccgaauccaucgugcgguuccccaauaucaccaaucugugccccuucggcgagguguucaaugccaccagauucgccucuguguacgccuggaaccggaagcggaucagcaauugcguggccgacuacuccgugcuguacaacuccgccagcuucagcaccuucaagugcuacggcguguccccuaccaagcugaacgaccugugcuucacaaacguguacgccgacagcuucgugauccggggagaugaagugcggcagauugccccuggacagacaggcaagaucgccgacuacaacuacaagcugcccgacgacuucaccggcugugugauugccuggaacagcaacaaccuggacuccaaagucggcggcaacuacaauuaccuguaccggcuguuccggaaguccaaucugaagcccuucgagcgggacaucuccaccgagaucuaucaggccggcagcaccccuuguaacggcguggaaggcuucaacugcuacuucccacugcaguccuacggcuuucagcccacauacggcgugggcuaucagcccuacagagugguggugcugagcuucgaacugcugcaugccccugccacagugugcggcccuaagaaaagcaccaaucucgugaagaacaaaugcgugaacuucaacuucaacggccugaccggcaccggcgugcugacagagagcaacaagaaguuccugccauuccagcaguuuggccgggauaucgacgauaccacagacgccguuagagauccccagacacuggaaauccuggacaucaccccuugcagcuucggcggagugucugugaucaccccuggcaccaacaccagcaaucagguggcagugcuguaccagggcgugaacuguaccgaagugcccguggccauucacgccgaucagcugacaccuacauggcggguguacuccaccggcagcaauguguuucagaccagagccggcugucugaucggagccgagcacgugaacaauagcuacgagugcgacauccccaucggcgcuggaaucugcgccagcuaccagacacagacaaacagccaccggagagccagaagcguggccagccagagcaucauugccuacacaaugucucugggcgccgagaacagcguggccuacuccaacaacucuaucgcuauccccaucaacuucaccaucagcgugaccacagagauccugccuguguccaugaccaagaccagcguggacugcaccauguacaucugcggcgauuccaccgagugcuccaaccugcugcugcaguacggcagcuucugcacccagcugaauagagcccugacagggaucgccguggaacaggacaagaacacccaagagguguucgcccaagugaagcagaucuacaagaccccuccuaucaaggacuucggcggcuucaauuucagccagauucugcccgauccuagcaagcccagcaagcggagcuucaucgaggaccugcuguucaacaaagugacacuggccgacgccggcuucaucaagcaguauggcgauugucugggcgacauugccgccagggaucugauuugcgcccagaaguuuaacggacugacagugcugccuccucugcugaccgaugagaugaucgcccaguacacaucugcccugcuggccggcacaaucacaagcggcuggacauuuggagcaggcgccgcucugcagauccccuuugcuaugcagauggccuaccgguucaacggcaucggagugacccagaaugugcuguacgagaaccagaagcugaucgccaaccaguucaacagcgccaucggcaagauccaggacagccugagcagcacagcaagcgcccugggaaagcugcaggacguggucaaccagaaugcccaggcacugaacacccuggucaagcagcuguccuccaacuucggcgccaucagcucugugcugaacgauauccuggccagacuggacccuccugaggccgaggugcagaucgacagacugaucacaggcagacugcagagccuccagacauacgugacccagcagcugaucagagccgccgagauuagagccucugccaaucuggccgccaccaagaugucugagugugugcugggccagagcaagagaguggacuuuugcggcaagggcuaccaccugaugagcuucccucagucugccccucacggcgugguguuucugcacgugacauaugugcccgcucaagagaagaauuucaccaccgcuccagccaucugccacgacggcaaagcccacuuuccuagagaaggcguguucguguccaacggcacccauugguucgugacacagcggaacuucuacgagccccagaucaucaccacccacaacaccuucgugucuggcaacugcgacgucgugaucggcauugugaacaauaccguguacgacccucugcagcccgagcuggacagcuucaaagaggaacuggacaaguacuuuaagaaccacacaagccccgacguggaccugggcgauaucagcggaaucaaugccagcgucgugaacauccagaaagagaucgaccggcugaacgagguggccaagaaucugaacgagagccugaucgaccugcaagaacuggggaaguacgagcaguacaucaaguggcccugguacaucuggcugggcuuuaucgccggacugauugccaucgugauggucacaaucaugcuguguugcaugaccagcugcuguagcugccugaagggcuguuguagcuguggcagcugcugcaaguucgacgaggacgauucugagcccgugcugaagggcgugaaacugcacuacacauga

SEQ ID NO: 23180 - RNA, 3822 nt, Artificial Sequence
  SARS-CoV-2/Wuhan/WIV05/2019__EPI_ISL_402128 spike protein CDS gc mod (1-1273)(K986P_V987P_K986P_V987P_K417N_E484K_N501Y_D614G)
auguucguguuccuggugcugcugccucugguguccagccagugugugaaccugaccaccagaacacagcugccuccagccuacaccaacagcuuuaccagaggcguguacuaccccgacaagguguucagauccagcgugcugcacucuacccaggaccuguuccugccuuucuucagcaacgugaccugguuccacgccauccacguguccggcaccaauggcaccaagagauucgacaaccccgugcugcccuucaacgacgggguguacuuugccagcaccgagaaguccaacaucaucagaggcuggaucuucggcaccacacuggacagcaagacccagagccugcugaucgugaacaacgccaccaacguggucaucaaagugugcgaguuccaguucugcaacgaccccuuccugggcgucuacuaccacaagaacaacaagagcuggauggaaagcgaguuccggguguacagcagcgccaacaacugcaccuucgaguacgugucccagccuuuccugauggaccuggaaggcaagcagggcaacuucaagaaccugcgcgaguucguguuuaagaacaucgacggcuacuucaagaucuacagcaagcacaccccuaucaaccucgugcgggaucugccucagggcuucucugcucuggaaccccugguggaucugcccaucggcaucaacaucacccgguuucagacacugcuggcccugcacagaagcuaccugacaccuggcgauagcagcagcggauggacagcuggugccgccgcuuacuaugugggcuaccugcagccuagaaccuuccugcugaaguacaacgagaacggcaccaucaccgacgccguggauugugcucuggauccucugagcgagacaaagugcacccugaaguccuucaccguggaaaagggcaucuaccagaccagcaacuuccgggugcagcccaccgaauccaucgugcgguuccccaauaucaccaaucugugccccuucggcgagguguucaaugccaccagauucgccucuguguacgccuggaaccggaagcggaucagcaauugcguggccgacuacuccgugcuguacaacuccgccagcuucagcaccuucaagugcuacggcguguccccuaccaagcugaacgaccugugcuucacaaacguguacgccgacagcuucgugauccggggagaugaagugcggcagauugccccuggacagacaggcaacaucgccgacuacaacuacaagcugcccgacgacuucaccggcugugugauugccuggaacagcaacaaccuggacuccaaagucggcggcaacuacaauuaccuguaccggcuguuccggaaguccaaucugaagcccuucgagcgggacaucuccaccgagaucuaucaggccggcagcaccccuuguaacggcgugaagggcuucaacugcuacuucccacugcaguccuacggcuuucagcccacauacggcgugggcuaucagcccuacagagugguggugcugagcuucgaacugcugcaugccccugccacagugugcggcccuaagaaaagcaccaaucucgugaagaacaaaugcgugaacuucaacuucaacggccugaccggcaccggcgugcugacagagagcaacaagaaguuccugccauuccagcaguuuggccgggauaucgccgauaccacagacgccguuagagauccccagacacuggaaauccuggacaucaccccuugcagcuucggcggagugucugugaucaccccuggcaccaacaccagcaaucagguggcagugcuguaccagggcgugaacuguaccgaagugcccguggccauucacgccgaucagcugacaccuacauggcggguguacuccaccggcagcaauguguuucagaccagagccggcugucugaucggagccgagcacgugaacaauagcuacgagugcgacauccccaucggcgcuggaaucugcgccagcuaccagacacagacaaacagcccucggagagccagaagcguggccagccagagcaucauugccuacacaaugucucugggcgccgagaacagcguggccuacuccaacaacucuaucgcuauccccaccaacuucaccaucagcgugaccacagagauccugccuguguccaugaccaagaccagcguggacugcaccauguacaucugcggcgauuccaccgagugcuccaaccugcugcugcaguacggcagcuucugcacccagcugaauagagcccugacagggaucgccguggaacaggacaagaacacccaagagguguucgcccaagugaagcagaucuacaagaccccuccuaucaaggacuucggcggcuucaauuucagccagauucugcccgauccuagcaagcccagcaagcggagcuucaucgaggaccugcuguucaacaaagugacacuggccgacgccggcuucaucaagcaguauggcgauugucugggcgacauugccgccagggaucugauuugcgcccagaaguuuaacggacugacagugcugccuccucugcugaccgaugagaugaucgcccaguacacaucugcccugcuggccggcacaaucacaagcggcuggacauuuggagcaggcgccgcucugcagauccccuuugcuaugcagauggccuaccgguucaacggcaucggagugacccagaaugugcuguacgagaaccagaagcugaucgccaaccaguucaacagcgccaucggcaagauccaggacagccugagcagcacagcaagcgcccugggaaagcugcaggacguggucaaccagaaugcccaggcacugaacacccuggucaagcagcuguccuccaacuucggcgccaucagcucugugcugaacgauauccugagcagacuggacccuccugaggccgaggugcagaucgacagacugaucacaggcagacugcagagccuccagacauacgugacccagcagcugaucagagccgccgagauuagagccucugccaaucuggccgccaccaagaugucugagugugugcugggccagagcaagagaguggacuuuugcggcaagggcuaccaccugaugagcuucccucagucugccccucacggcgugguguuucugcacgugacauaugugcccgcucaagagaagaauuucaccaccgcuccagccaucugccacgacggcaaagcccacuuuccuagagaaggcguguucguguccaacggcacccauugguucgugacacagcggaacuucuacgagccccagaucaucaccaccgacaacaccuucgugucuggcaacugcgacgucgugaucggcauugugaacaauaccguguacgacccucugcagcccgagcuggacagcuucaaagaggaacuggacaaguacuuuaagaaccacacaagccccgacguggaccugggcgauaucagcggaaucaaugccagcgucgugaacauccagaaagagaucgaccggcugaacgagguggccaagaaucugaacgagagccugaucgaccugcaagaacuggggaaguacgagcaguacaucaaguggcccugguacaucuggcugggcuuuaucgccggacugauugccaucgugauggucacaaucaugcuguguugcaugaccagcugcuguagcugccugaagggcuguuguagcuguggcagcugcugcaaguucgacgaggacgauucugagcccgugcugaagggcgugaaacugcacuacacauga

SEQ ID NO: 23181 - RNA, 3813 nt, Artificial Sequence
  SARS-CoV-2/Wuhan/WIV05/2019__EPI_ISL_402128 spike protein CDS gc mod (1-1273)(K986P_V987P_K986P_V987P_L18F_D80A_D215G_L242del_A243del_ L244del_R246I_K417N_E484K_N501Y_D614G_A701V)
auguucguguuccuggugcugcugccucugguguccagccagugugugaacuucaccaccagaacacagcugccuccagccuacaccaacagcuuuaccagaggcguguacuaccccgacaagguguucagauccagcgugcugcacucuacccaggaccuguuccugccuuucuucagcaacgugaccugguuccacgccauccacguguccggcaccaauggcaccaagagauucgccaaccccgugcugcccuucaacgacgggguguacuuugccagcaccgagaaguccaacaucaucagaggcuggaucuucggcaccacacuggacagcaagacccagagccugcugaucgugaacaacgccaccaacguggucaucaaagugugcgaguuccaguucugcaacgaccccuuccugggcgucuacuaccacaagaacaacaagagcuggauggaaagcgaguuccggguguacagcagcgccaacaacugcaccuucgaguacgugucccagccuuuccugauggaccuggaaggcaagcagggcaacuucaagaaccugcgcgaguucguguuuaagaacaucgacggcuacuucaagaucuacagcaagcacaccccuaucaaccucgugcggggccugccucagggcuucucugcucuggaaccccugguggaucugcccaucggcaucaacaucacccgguuucagacacugcacaucagcuaccugacaccuggcgauagcagcagcggauggacagcuggugccgccgcuuacuaugugggcuaccugcagccuagaaccuuccugcugaaguacaacgagaacggcaccaucaccgacgccguggauugugcucuggauccucugagcgagacaaagugcacccugaaguccuucaccguggaaaagggcaucuaccagaccagcaacuuccgggugcagcccaccgaauccaucgugcgguuccccaauaucaccaaucugugccccuucggcgagguguucaaugccaccagauucgccucuguguacgccuggaaccggaagcggaucagcaauugcguggccgacuacuccgugcuguacaacuccgccagcuucagcaccuucaagugcuacggcguguccccuaccaagcugaacgaccugugcuucacaaacguguacgccgacagcuucgugauccggggagaugaagugcggcagauugccccuggacagacaggcaacaucgccgacuacaacuacaagcugcccgacgacuucaccggcugugugauugccuggaacagcaacaaccuggacuccaaagucggcggcaacuacaauuaccuguaccggcuguuccggaaguccaaucugaagcccuucgagcgggacaucuccaccgagaucuaucaggccggcagcaccccuuguaacggcgugaagggcuucaacugcuacuucccacugcaguccuacggcuuucagcccacauacggcgugggcuaucagcccuacagagugguggugcugagcuucgaacugcugcaugccccugccacagugugcggcccuaagaaaagcaccaaucucgugaagaacaaaugcgugaacuucaacuucaacggccugaccggcaccggcgugcugacagagagcaacaagaaguuccugccauuccagcaguuuggccgggauaucgccgauaccacagacgccguuagagauccccagacacuggaaauccuggacaucaccccuugcagcuucggcggagugucugugaucaccccuggcaccaacaccagcaaucagguggcagugcuguaccagggcgugaacuguaccgaagugcccguggccauucacgccgaucagcugacaccuacauggcggguguacuccaccggcagcaauguguuucagaccagagccggcugucugaucggagccgagcacgugaacaauagcuacgagugcgacauccccaucggcgcuggaaucugcgccagcuaccagacacagacaaacagcccucggagagccagaagcguggccagccagagcaucauugccuacacaaugucucugggcguggagaacagcguggccuacuccaacaacucuaucgcuauccccaccaacuucaccaucagcgugaccacagagauccugccuguguccaugaccaagaccagcguggacugcaccauguacaucugcggcgauuccaccgagugcuccaaccugcugcugcaguacggcagcuucugcacccagcugaauagagcccugacagggaucgccguggaacaggacaagaacacccaagagguguucgcccaagugaagcagaucuacaagaccccuccuaucaaggacuucggcggcuucaauuucagccagauucugcccgauccuagcaagcccagcaagcggagcuucaucgaggaccugcuguucaacaaagugacacuggccgacgccggcuucaucaagcaguauggcgauugucugggcgacauugccgccagggaucugauuugcgcccagaaguuuaacggacugacagugcugccuccucugcugaccgaugagaugaucgcccaguacacaucugcccugcuggccggcacaaucacaagcggcuggacauuuggagcaggcgccgcucugcagauccccuuugcuaugcagauggccuaccgguucaacggcaucggagugacccagaaugugcuguacgagaaccagaagcugaucgccaaccaguucaacagcgccaucggcaagauccaggacagccugagcagcacagcaagcgcccugggaaagcugcaggacguggucaaccagaaugcccaggcacugaacacccuggucaagcagcuguccuccaacuucggcgccaucagcucugugcugaacgauauccugagcagacuggacccuccugaggccgaggugcagaucgacagacugaucacaggcagacugcagagccuccagacauacgugacccagcagcugaucagagccgccgagauuagagccucugccaaucuggccgccaccaagaugucugagugugugcugggccagagcaagagaguggacuuuugcggcaagggcuaccaccugaugagcuucccucagucugccccucacggcgugguguuucugcacgugacauaugugcccgcucaagagaagaauuucaccaccgcuccagccaucugccacgacggcaaagcccacuuuccuagagaaggcguguucguguccaacggcacccauugguucgugacacagcggaacuucuacgagccccagaucaucaccaccgacaacaccuucgugucuggcaacugcgacgucgugaucggcauugugaacaauaccguguacgacccucugcagcccgagcuggacagcuucaaagaggaacuggacaaguacuuuaagaaccacacaagccccgacguggaccugggcgauaucagcggaaucaaugccagcgucgugaacauccagaaagagaucgaccggcugaacgagguggccaagaaucugaacgagagccugaucgaccugcaagaacuggggaaguacgagcaguacaucaaguggcccugguacaucuggcugggcuuuaucgccggacugauugccaucgugauggucacaaucaugcuguguugcaugaccagcugcuguagcugccugaagggcuguuguagcuguggcagcugcugcaaguucgacgaggacgauucugagcccgugcugaagggcgugaaacugcacuacacauga

SEQ ID NO: 23182 - RNA, 3822 nt, Artificial Sequence
  SARS-CoV-2/Wuhan/WIV05/2019__EPI_ISL_402128 spike protein CDS gc mod (1-1273)(K986P_V987P_K986P_V987P_E484K_D614G)
auguucguguuccuggugcugcugccucugguguccagccagugugugaaccugaccaccagaacacagcugccuccagccuacaccaacagcuuuaccagaggcguguacuaccccgacaagguguucagauccagcgugcugcacucuacccaggaccuguuccugccuuucuucagcaacgugaccugguuccacgccauccacguguccggcaccaauggcaccaagagauucgacaaccccgugcugcccuucaacgacgggguguacuuugccagcaccgagaaguccaacaucaucagaggcuggaucuucggcaccacacuggacagcaagacccagagccugcugaucgugaacaacgccaccaacguggucaucaaagugugcgaguuccaguucugcaacgaccccuuccugggcgucuacuaccacaagaacaacaagagcuggauggaaagcgaguuccggguguacagcagcgccaacaacugcaccuucgaguacgugucccagccuuuccugauggaccuggaaggcaagcagggcaacuucaagaaccugcgcgaguucguguuuaagaacaucgacggcuacuucaagaucuacagcaagcacaccccuaucaaccucgugcgggaucugccucagggcuucucugcucuggaaccccugguggaucugcccaucggcaucaacaucacccgguuucagacacugcuggcccugcacagaagcuaccugacaccuggcgauagcagcagcggauggacagcuggugccgccgcuuacuaugugggcuaccugcagccuagaaccuuccugcugaaguacaacgagaacggcaccaucaccgacgccguggauugugcucuggauccucugagcgagacaaagugcacccugaaguccuucaccguggaaaagggcaucuaccagaccagcaacuuccgggugcagcccaccgaauccaucgugcgguuccccaauaucaccaaucugugccccuucggcgagguguucaaugccaccagauucgccucuguguacgccuggaaccggaagcggaucagcaauugcguggccgacuacuccgugcuguacaacuccgccagcuucagcaccuucaagugcuacggcguguccccuaccaagcugaacgaccugugcuucacaaacguguacgccgacagcuucgugauccggggagaugaagugcggcagauugccccuggacagacaggcaagaucgccgacuacaacuacaagcugcccgacgacuucaccggcugugugauugccuggaacagcaacaaccuggacuccaaagucggcggcaacuacaauuaccuguaccggcuguuccggaaguccaaucugaagcccuucgagcgggacaucuccaccgagaucuaucaggccggcagcaccccuuguaacggcgugaagggcuucaacugcuacuucccacugcaguccuacggcuuucagcccacaaauggcgugggcuaucagcccuacagagugguggugcugagcuucgaacugcugcaugccccugccacagugugcggcccuaagaaaagcaccaaucucgugaagaacaaaugcgugaacuucaacuucaacggccugaccggcaccggcgugcugacagagagcaacaagaaguuccugccauuccagcaguuuggccgggauaucgccgauaccacagacgccguuagagauccccagacacuggaaauccuggacaucaccccuugcagcuucggcggagugucugugaucaccccuggcaccaacaccagcaaucagguggcagugcuguaccagggcgugaacuguaccgaagugcccguggccauucacgccgaucagcugacaccuacauggcggguguacuccaccggcagcaauguguuucagaccagagccggcugucugaucggagccgagcacgugaacaauagcuacgagugcgacauccccaucggcgcuggaaucugcgccagcuaccagacacagacaaacagcccucggagagccagaagcguggccagccagagcaucauugccuacacaaugucucugggcgccgagaacagcguggccuacuccaacaacucuaucgcuauccccaccaacuucaccaucagcgugaccacagagauccugccuguguccaugaccaagaccagcguggacugcaccauguacaucugcggcgauuccaccgagugcuccaaccugcugcugcaguacggcagcuucugcacccagcugaauagagcccugacagggaucgccguggaacaggacaagaacacccaagagguguucgcccaagugaagcagaucuacaagaccccuccuaucaaggacuucggcggcuucaauuucagccagauucugcccgauccuagcaagcccagcaagcggagcuucaucgaggaccugcuguucaacaaagugacacuggccgacgccggcuucaucaagcaguauggcgauugucugggcgacauugccgccagggaucugauuugcgcccagaaguuuaacggacugacagugcugccuccucugcugaccgaugagaugaucgcccaguacacaucugcccugcuggccggcacaaucacaagcggcuggacauuuggagcaggcgccgcucugcagauccccuuugcuaugcagauggccuaccgguucaacggcaucggagugacccagaaugugcuguacgagaaccagaagcugaucgccaaccaguucaacagcgccaucggcaagauccaggacagccugagcagcacagcaagcgcccugggaaagcugcaggacguggucaaccagaaugcccaggcacugaacacccuggucaagcagcuguccuccaacuucggcgccaucagcucugugcugaacgauauccugagcagacuggacccuccugaggccgaggugcagaucgacagacugaucacaggcagacugcagagccuccagacauacgugacccagcagcugaucagagccgccgagauuagagccucugccaaucuggccgccaccaagaugucugagugugugcugggccagagcaagagaguggacuuuugcggcaagggcuaccaccugaugagcuucccucagucugccccucacggcgugguguuucugcacgugacauaugugcccgcucaagagaagaauuucaccaccgcuccagccaucugccacgacggcaaagcccacuuuccuagagaaggcguguucguguccaacggcacccauugguucgugacacagcggaacuucuacgagccccagaucaucaccaccgacaacaccuucgugucuggcaacugcgacgucgugaucggcauugugaacaauaccguguacgacccucugcagcccgagcuggacagcuucaaagaggaacuggacaaguacuuuaagaaccacacaagccccgacguggaccugggcgauaucagcggaaucaaugccagcgucgugaacauccagaaagagaucgaccggcugaacgagguggccaagaaucugaacgagagccugaucgaccugcaagaacuggggaaguacgagcaguacaucaaguggcccugguacaucuggcugggcuuuaucgccggacugauugccaucgugauggucacaaucaugcuguguugcaugaccagcugcuguagcugccugaagggcuguuguagcuguggcagcugcugcaaguucgacgaggacgauucugagcccgugcugaagggcgugaaacugcacuacacauga

SEQ ID NO: 23183 - RNA, 3822 nt, Artificial Sequence
  SARS-CoV-2/Wuhan/WIV05/2019__EPI_ISL_402128 spike protein CDS gc mod (1-1273)(K986P_V987P_K986P_V987P_L18F_T20N_P26S_D138Y_R190S_K417T _E484K_N501Y_D614G_H655Y_T1027I)
auguucguguuccuggugcugcugccucugguguccagccagugugugaacuucaccaacagaacacagcugccuagcgccuacaccaacagcuuuaccagaggcguguacuaccccgacaagguguucagauccagcgugcugcacucuacccaggaccuguuccugccuuucuucagcaacgugaccugguuccacgccauccacguguccggcaccaauggcaccaagagauucgacaaccccgugcugcccuucaacgacgggguguacuuugccagcaccgagaaguccaacaucaucagaggcuggaucuucggcaccacacuggacagcaagacccagagccugcugaucgugaacaacgccaccaacguggucaucaaagugugcgaguuccaguucugcaacuaccccuuccugggcgucuacuaccacaagaacaacaagagcuggauggaaagcgaguuccggguguacagcagcgccaacaacugcaccuucgaguacgugucccagccuuuccugauggaccuggaaggcaagcagggcaacuucaagaaccugagcgaguucguguuuaagaacaucgacggcuacuucaagaucuacagcaagcacaccccuaucaaccucgugcgggaucugccucagggcuucucugcucuggaaccccugguggaucugcccaucggcaucaacaucacccgguuucagacacugcuggcccugcacagaagcuaccugacaccuggcgauagcagcagcggauggacagcuggugccgccgcuuacuaugugggcuaccugcagccuagaaccuuccugcugaaguacaacgagaacggcaccaucaccgacgccguggauugugcucuggauccucugagcgagacaaagugcacccugaaguccuucaccguggaaaagggcaucuaccagaccagcaacuuccgggugcagcccaccgaauccaucgugcgguuccccaauaucaccaaucugugccccuucggcgagguguucaaugccaccagauucgccucuguguacgccuggaaccggaagcggaucagcaauugcguggccgacuacuccgugcuguacaacuccgccagcuucagcaccuucaagugcuacggcguguccccuaccaagcugaacgaccugugcuucacaaacguguacgccgacagcuucgugauccggggagaugaagugcggcagauugccccuggacagacaggcaccaucgccgacuacaacuacaagcugcccgacgacuucaccggcugugugauugccuggaacagcaacaaccuggacuccaaagucggcggcaacuacaauuaccuguaccggcuguuccggaaguccaaucugaagcccuucgagcgggacaucuccaccgagaucuaucaggccggcagcaccccuuguaacggcgugaagggcuucaacugcuacuucccacugcaguccuacggcuuucagcccacauacggcgugggcuaucagcccuacagagugguggugcugagcuucgaacugcugcaugccccugccacagugugcggcccuaagaaaagcaccaaucucgugaagaacaaaugcgugaacuucaacuucaacggccugaccggcaccggcgugcugacagagagcaacaagaaguuccugccauuccagcaguuuggccgggauaucgccgauaccacagacgccguuagagauccccagacacuggaaauccuggacaucaccccuugcagcuucggcggagugucugugaucaccccuggcaccaacaccagcaaucagguggcagugcuguaccagggcgugaacuguaccgaagugcccguggccauucacgccgaucagcugacaccuacauggcggguguacuccaccggcagcaauguguuucagaccagagccggcugucugaucggagccgaguacgugaacaauagcuacgagugcgacauccccaucggcgcuggaaucugcgccagcuaccagacacagacaaacagcccucggagagccagaagcguggccagccagagcaucauugccuacacaaugucucugggcgccgagaacagcguggccuacuccaacaacucuaucgcuauccccaccaacuucaccaucagcgugaccacagagauccugccuguguccaugaccaagaccagcguggacugcaccauguacaucugcggcgauuccaccgagugcuccaaccugcugcugcaguacggcagcuucugcacccagcugaauagagcccugacagggaucgccguggaacaggacaagaacacccaagagguguucgcccaagugaagcagaucuacaagaccccuccuaucaaggacuucggcggcuucaauuucagccagauucugcccgauccuagcaagcccagcaagcggagcuucaucgaggaccugcuguucaacaaagugacacuggccgacgccggcuucaucaagcaguauggcgauugucugggcgacauugccgccagggaucugauuugcgcccagaaguuuaacggacugacagugcugccuccucugcugaccgaugagaugaucgcccaguacacaucugcccugcuggccggcacaaucacaagcggcuggacauuuggagcaggcgccgcucugcagauccccuuugcuaugcagauggccuaccgguucaacggcaucggagugacccagaaugugcuguacgagaaccagaagcugaucgccaaccaguucaacagcgccaucggcaagauccaggacagccugagcagcacagcaagcgcccugggaaagcugcaggacguggucaaccagaaugcccaggcacugaacacccuggucaagcagcuguccuccaacuucggcgccaucagcucugugcugaacgauauccugagcagacuggacccuccugaggccgaggugcagaucgacagacugaucacaggcagacugcagagccuccagacauacgugacccagcagcugaucagagccgccgagauuagagccucugccaaucuggccgccaucaagaugucugagugugugcugggccagagcaagagaguggacuuuugcggcaagggcuaccaccugaugagcuucccucagucugccccucacggcgugguguuucugcacgugacauaugugcccgcucaagagaagaauuucaccaccgcuccagccaucugccacgacggcaaagcccacuuuccuagagaaggcguguucguguccaacggcacccauugguucgugacacagcggaacuucuacgagccccagaucaucaccaccgacaacaccuucgugucuggcaacugcgacgucgugaucggcauugugaacaauaccguguacgacccucugcagcccgagcuggacagcuucaaagaggaacuggacaaguacuuuaagaaccacacaagccccgacguggaccugggcgauaucagcggaaucaaugccagcgucgugaacauccagaaagagaucgaccggcugaacgagguggccaagaaucugaacgagagccugaucgaccugcaagaacuggggaaguacgagcaguacaucaaguggcccugguacaucuggcugggcuuuaucgccggacugauugccaucgugauggucacaaucaugcuguguugcaugaccagcugcuguagcugccugaagggcuguuguagcuguggcagcugcugcaaguucgacgaggacgauucugagcccgugcugaagggcgugaaacugcacuacacauga

SEQ ID NO: 23184 - RNA, 3822 nt, Artificial Sequence
  SARS-CoV-2/Wuhan/WIV05/2019__EPI_ISL_402128 spike protein CDS gc mod (1-1273)(K986P_V987P_K986P_V987P_S13I_W152C_L452R_D614G)
auguucguguuccuggugcugcugccucugguguccauccagugugugaaccugaccaccagaacacagcugccuccagccuacaccaacagcuuuaccagaggcguguacuaccccgacaagguguucagauccagcgugcugcacucuacccaggaccuguuccugccuuucuucagcaacgugaccugguuccacgccauccacguguccggcaccaauggcaccaagagauucgacaaccccgugcugcccuucaacgacgggguguacuuugccagcaccgagaaguccaacaucaucagaggcuggaucuucggcaccacacuggacagcaagacccagagccugcugaucgugaacaacgccaccaacguggucaucaaagugugcgaguuccaguucugcaacgaccccuuccugggcgucuacuaccacaagaacaacaagagcugcauggaaagcgaguuccggguguacagcagcgccaacaacugcaccuucgaguacgugucccagccuuuccugauggaccuggaaggcaagcagggcaacuucaagaaccugcgcgaguucguguuuaagaacaucgacggcuacuucaagaucuacagcaagcacaccccuaucaaccucgugcgggaucugccucagggcuucucugcucuggaaccccugguggaucugcccaucggcaucaacaucacccgguuucagacacugcuggcccugcacagaagcuaccugacaccuggcgauagcagcagcggauggacagcuggugccgccgcuuacuaugugggcuaccugcagccuagaaccuuccugcugaaguacaacgagaacggcaccaucaccgacgccguggauugugcucuggauccucugagcgagacaaagugcacccugaaguccuucaccguggaaaagggcaucuaccagaccagcaacuuccgggugcagcccaccgaauccaucgugcgguuccccaauaucaccaaucugugccccuucggcgagguguucaaugccaccagauucgccucuguguacgccuggaaccggaagcggaucagcaauugcguggccgacuacuccgugcuguacaacuccgccagcuucagcaccuucaagugcuacggcguguccccuaccaagcugaacgaccugugcuucacaaacguguacgccgacagcuucgugauccggggagaugaagugcggcagauugccccuggacagacaggcaagaucgccgacuacaacuacaagcugcccgacgacuucaccggcugugugauugccuggaacagcaacaaccuggacuccaaagucggcggcaacuacaauuaccgcuaccggcuguuccggaaguccaaucugaagcccuucgagcgggacaucuccaccgagaucuaucaggccggcagcaccccuuguaacggcguggaaggcuucaacugcuacuucccacugcaguccuacggcuuucagcccacaaauggcgugggcuaucagcccuacagagugguggugcugagcuucgaacugcugcaugccccugccacagugugcggcccuaagaaaagcaccaaucucgugaagaacaaaugcgugaacuucaacuucaacggccugaccggcaccggcgugcugacagagagcaacaagaaguuccugccauuccagcaguuuggccgggauaucgccgauaccacagacgccguuagagauccccagacacuggaaauccuggacaucaccccuugcagcuucggcggagugucugugaucaccccuggcaccaacaccagcaaucagguggcagugcuguaccagggcgugaacuguaccgaagugcccguggccauucacgccgaucagcugacaccuacauggcggguguacuccaccggcagcaauguguuucagaccagagccggcugucugaucggagccgagcacgugaacaauagcuacgagugcgacauccccaucggcgcuggaaucugcgccagcuaccagacacagacaaacagcccucggagagccagaagcguggccagccagagcaucauugccuacacaaugucucugggcgccgagaacagcguggccuacuccaacaacucuaucgcuauccccaccaacuucaccaucagcgugaccacagagauccugccuguguccaugaccaagaccagcguggacugcaccauguacaucugcggcgauuccaccgagugcuccaaccugcugcugcaguacggcagcuucugcacccagcugaauagagcccugacagggaucgccguggaacaggacaagaacacccaagagguguucgcccaagugaagcagaucuacaagaccccuccuaucaaggacuucggcggcuucaauuucagccagauucugcccgauccuagcaagcccagcaagcggagcuucaucgaggaccugcuguucaacaaagugacacuggccgacgccggcuucaucaagcaguauggcgauugucugggcgacauugccgccagggaucugauuugcgcccagaaguuuaacggacugacagugcugccuccucugcugaccgaugagaugaucgcccaguacacaucugcccugcuggccggcacaaucacaagcggcuggacauuuggagcaggcgccgcucugcagauccccuuugcuaugcagauggccuaccgguucaacggcaucggagugacccagaaugugcuguacgagaaccagaagcugaucgccaaccaguucaacagcgccaucggcaagauccaggacagccugagcagcacagcaagcgcccugggaaagcugcaggacguggucaaccagaaugcccaggcacugaacacccuggucaagcagcuguccuccaacuucggcgccaucagcucugugcugaacgauauccugagcagacuggacccuccugaggccgaggugcagaucgacagacugaucacaggcagacugcagagccuccagacauacgugacccagcagcugaucagagccgccgagauuagagccucugccaaucuggccgccaccaagaugucugagugugugcugggccagagcaagagaguggacuuuugcggcaagggcuaccaccugaugagcuucccucagucugccccucacggcgugguguuucugcacgugacauaugugcccgcucaagagaagaauuucaccaccgcuccagccaucugccacgacggcaaagcccacuuuccuagagaaggcguguucguguccaacggcacccauugguucgugacacagcggaacuucuacgagccccagaucaucaccaccgacaacaccuucgugucuggcaacugcgacgucgugaucggcauugugaacaauaccguguacgacccucugcagcccgagcuggacagcuucaaagaggaacuggacaaguacuuuaagaaccacacaagccccgacguggaccugggcgauaucagcggaaucaaugccagcgucgugaacauccagaaagagaucgaccggcugaacgagguggccaagaaucugaacgagagccugaucgaccugcaagaacuggggaaguacgagcaguacaucaaguggcccugguacaucuggcugggcuuuaucgccggacugauugccaucgugauggucacaaucaugcuguguugcaugaccagcugcuguagcugccugaagggcuguuguagcuguggcagcugcugcaaguucgacgaggacgauucugagcccgugcugaagggcgugaaacugcacuacacauga

SEQ ID NO: 23185 - RNA, 1369 nt, Artificial Sequence; identical to SEQ ID NO: 22814
  SARS-CoV-2/Wuhan/WIV05/2019__EPI_ISL_402128 spike protein mRNA gc (1-15,334-528) Ferritin construct R10337

SEQ ID NO: 23186 - RNA, 967 nt, Artificial Sequence; identical to SEQ ID NO: 22815
  SARS-CoV-2/Wuhan/WIV05/2019__EPI_ISL_402128 spike protein mRNA gc (334-528) Foldon construct R9926

SEQ ID NO: 23187 - RNA, 1345 nt, Artificial Sequence; identical to SEQ ID NO: 22816
  SARS-CoV-2/Wuhan/WIV05/2019__EPI_ISL_402128 spike protein mRNA gc (1-15,334-528) LumSynth construct R10335

SEQ ID NO: 23188 - RNA, 1306 nt, Artificial Sequence; identical to SEQ ID NO: 22817
  SARS-CoV-2/Wuhan/WIV05/2019__EPI_ISL_402128 spike protein mRNA gc (334-528) LumSynth construct R10336

SEQ ID NO: 23189 - RNA, 4039 nt, Artificial Sequence; identical to SEQ ID NO: 162
  SARS-CoV-2/Wuhan/WIV05/2019__EPI_ISL_402128 spike protein mRNA gc (1-1273) R9514

SEQ ID NO: 23190 - RNA, 4039 nt, Artificial Sequence; identical to SEQ ID NO: 22818
  SARS-CoV-2/Wuhan/WIV05/2019__EPI_ISL_402128 spike protein mRNA gc (1-1273)(D614G)

SEQ ID NO: 23191 - RNA, 4039 nt, Artificial Sequence; identical to SEQ ID NO: 22820
  SARS-CoV-2/Wuhan/WIV05/2019__EPI_ISL_402128 spike protein mRNA gc (1-1273)(A222V_D614G) R10276

SEQ ID NO: 23192 - RNA, 4039 nt, Artificial Sequence; identical to SEQ ID NO: 22822
  SARS-CoV-2/Wuhan/WIV05/2019__EPI_ISL_402128 spike protein mRNA gc (1-1273)(N439K_D614G) R10296

SEQ ID NO: 23193 - RNA, 4039 nt, Artificial Sequence; identical to SEQ ID NO: 22824
  SARS-CoV-2/Wuhan/WIV05/2019__EPI_ISL_402128 spike protein mRNA gc (1-1273)(S477N_D614G) R10284

SEQ ID NO: 23194 - RNA, 4039 nt, Artificial Sequence; identical to SEQ ID NO: 22826
  SARS-CoV-2/Wuhan/WIV05/2019__EPI_ISL_402128 spike protein mRNA gc (1-1273)(N501Y_D614G) R10350

SEQ ID NO: 23195 - RNA, 4033 nt, Artificial Sequence; identical to SEQ ID NO: 22828
  SARS-CoV-2/Wuhan/WIV05/2019__EPI_ISL_402128 spike protein mRNA gc (1-1273)(H69del_V70del_D614G) R10272

SEQ ID NO: 23196 - RNA, 4039 nt, Artificial Sequence; identical to SEQ ID NO: 22830
  SARS-CoV-2/Wuhan/WIV05/2019__EPI_ISL_402128 spike protein mRNA gc (1-1273)(Y453F_D614G) R10280

SEQ ID NO: 23197 - RNA, 4039 nt, Artificial Sequence; identical to SEQ ID NO: 22832
  SARS-CoV-2/Wuhan/WIV05/2019__EPI_ISL_402128 spike protein mRNA gc (1-1273)(D614G_I692V) R10288

SEQ ID NO: 23198 - RNA, 4039 nt, Artificial Sequence; identical to SEQ ID NO: 22834
  SARS-CoV-2/Wuhan/WIV05/2019__EPI_ISL_402128 spike protein mRNA gc (1-1273)(D614G_M1229I) R10344

SEQ ID NO: 23199 - RNA, 4033 nt, Artificial Sequence; identical to SEQ ID NO: 22836
  SARS-CoV-2/Wuhan/WIV05/2019__EPI_ISL_402128 spike protein mRNA gc (1-1273)(H69del_V70del_A222V_Y453F_S477N_D614G_I692V) R10292

SEQ ID NO: 23200 - RNA, 4033 nt, Artificial Sequence; identical to SEQ ID NO: 22838
  SARS-CoV-2/Wuhan/WIV05/2019__EPI_ISL_402128 spike protein mRNA gc (1-1273)(H69del_V70del_Y453F_D614G_I692V_M1229I) R10346

SEQ ID NO: 23201 - RNA, 4030 nt, Artificial Sequence
  SARS-CoV-2/Wuhan/WIV05/2019__EPI_ISL_402128 spike protein mRNA gc (1-1273)(H69del_V70del_Y144del_N501Y_A570D_D614G_P681H_T716I_S982 A_D1118H) R10352
aggagaaagcuuaccauguucguguuccugguccuccugccccuggugagcucccagugcgugaaccucaccacccgcacgcagcugccgcccgccuacaccaacagcuucacccggggcgucuacuaccccgacaagguguuccgcuccagcgugcugcacuccacccaggaccucuuccugcccuucuucagcaacgucacgugguuccacgccaucuccgggaccaacggcaccaagcgguucgacaacccggugcugcccuucaacgacggggucuacuucgcgagcaccgagaaguccaacaucauccgcggcuggaucuucgggacgacccucgacagcaagacccagucccugcugaucgugaacaacgccaccaacguggucaucaaggugugcgaguuccaguucugcaacgaccccuuccucggcguguaccacaagaacaacaagagcuggauggaguccgaguuccgggucuacagcuccgccaacaacugcacguucgaguacgugagccagcccuuccugauggaccuggagggcaagcaggggaacuucaagaaccuccgcgaguucguguucaagaacaucgacggcuacuucaagaucuacuccaagcacaccccgaucaaccugguccgggaccugccccagggguucagcgcccucgagccccugguggaccugcccaucggcaucaacaucacccgcuuccagacccuccuggcccugcaccgguccuaccucacgccgggggacagcagcuccggcuggaccgcgggcgccgccgccuacuacgugggguaccugcagccccgcaccuuccugcucaaguacaacgagaacggcaccaucacggacgcggucgacugcgcccuggacccccugagcgagaccaagugcacccucaaguccuucaccguggagaaggggaucuaccagacgagcaacuuccgggugcagcccaccgaguccaucguccgcuucccgaacaucaccaaccugugccccuucggcgagguguucaacgccacccgguucgccagcgucuacgccuggaaccgcaagcggaucuccaacugcguggcggacuacagcgugcuguacaacuccgccagcuucuccacguucaagugcuacggcgucagccccaccaagcucaacgaccugugcuucaccaacguguacgccgacuccuucgugauccgcggggacgagguccggcagaucgcccccggccagaccgggaagaucgccgacuacaacuacaagcugccggacgacuucacgggcugcgugaucgcguggaacagcaacaaccucgacuccaaggucgggggcaacuacaacuaccuguaccgccuguuccgcaagagcaaccucaagcccuucgagcgggacaucuccaccgagaucuaccaggccggcagcacccccugcaacgggguggagggcuucaacugcuacuucccccugcaguccuacggguuccagccgaccuacggcgugggguaccagcccuaccggguggucgugcugagcuucgagcuccugcacgcccccgccacggugugcggccccaagaaguccaccaaccuggucaagaacaagugcgugaacuucaacuucaacggccucaccgggaccggcgugcugaccgagagcaacaagaaguuccugccguuccagcaguucgggcgcgacaucgacgacacgaccgacgcgguccgcgacccccagacccuggagauccucgacaucacccccugcagcuucggcgggguguccgugaucacgccgggcaccaacaccagcaaccaggucgccgugcuguaccagggcgugaacugcaccgagguccccguggccauccacgccgaccagcugacgcccaccuggcggguguacuccaccggcagcaacgucuuccagacccgcgccgggugccucaucggcgcggagcacgugaacaacuccuacgagugcgacauccccaucggggccggcaucugcgccagcuaccagacgcagaccaacucccaccggcgcgcccggagcguggcgucccagagcaucaucgccuacaccaugucccugggcgccgagaacagcgucgccuacuccaacaacagcaucgccauccccaucaacuucacgaucuccgugaccaccgagauccugcccgugagcaugaccaagacgagcgucgacugcaccauguacaucugcggggacuccaccgagugcagcaaccuccugcugcaguacggcuccuucugcacccagcucaaccgcgcgcugacggggaucgccguggagcaggacaagaacacccaggagguguucgcccaggucaagcagaucuacaagacgcccccgaucaaggacuucggcggguucaacuucagccagauccugcccgaccccuccaagcccagcaagcgguccuucaucgaggaccuccuguucaacaaggugacccuggccgacgccggcuucaucaagcaguacggcgacugccucggggacaucgcggcccgcgaccugaucugcgcccagaaguucaacggccugaccgugcucccgccccugcugaccgacgagaugaucgcccaguacaccagcgcccuccuggcggggaccaucacguccggcuggaccuucggggccggcgccgcccugcagauccccuucgcgaugcagauggccuaccgguucaacggcaucggggucacccagaacgugcucuacgagaaccagaagcugaucgccaaccaguucaacagcgccaucggcaagauccaggacucccugagcuccaccgccagcgcgcucgggaagcugcaggacguggucaaccagaacgcccaggcccugaacacgcucgugaagcagcuguccagcaacuucggcgccaucuccagcgugcugaacgacauccucgcccgccuggacaaggucgaggccgaggugcagaucgaccggcugaucaccgggcgccuccagagccugcagaccuacgugacccagcagcugauccgggcggccgagauccgcgccagcgccaaccucgccgcgaccaagauguccgagugcguccugggccagagcaagcggguggacuucugcggcaagggguaccaccugauguccuucccccagagcgccccgcacggcguggucuuccuccacgugacguacguccccgcccaggagaagaacuucaccaccgcccccgcgaucugccacgacgggaaggcccacuucccccgcgagggcguguucguguccaacgggacccacugguucgucacgcagcggaacuucuacgagccgcagaucaucaccacccacaacaccuucgugagcggcaacugcgacguggucaucggcaucgugaacaacacgguguacgacccccugcagcccgagcuggacuccuucaaggaggagcucgacaaguacuucaagaaccacaccagccccgacgucgaccugggggacaucuccggcaucaacgccagcguggugaacauccagaaggagaucgaccgccugaacgaggucgccaagaaccucaacgagucccugaucgaccugcaggagcucgggaaguacgagcaguacaucaaguggccgugguacaucuggcugggcuucaucgccggccugaucgcgaucgugauggugaccaucaugcucugcugcaugaccagcugcugcuccugccugaaggggugcugcagcugcggcuccugcugcaaguucgacgaggacgacagcgagcccguccugaagggggugaagcuccacuacacgugaggacuaguuauaagacugacuagcccgaugggccucccaacgggcccuccuccccuccuugcaccgagauuaauaaaaaaaaaaaaaaaaaaaaaaaaaaaaaaaaaaaaaaaaaaaaaaaaaaaaaaaaaaaaaaaaugcaucccccccccccccccccccccccccccccccaaaggcucuuuucagagccaccagaauu

SEQ ID NO: 23202 - RNA, 4039 nt, Artificial Sequence
  SARS-CoV-2/Wuhan/WIV05/2019__EPI_ISL_402128 spike protein mRNA gc (1-1273)(K417N_E484K_N501Y_D614G) R10358
aggagaaagcuuaccauguucguguuccugguccuccugccccuggugagcucccagugcgugaaccucaccacccgcacgcagcugccgcccgccuacaccaacagcuucacccggggcgucuacuaccccgacaagguguuccgcuccagcgugcugcacuccacccaggaccucuuccugcccuucuucagcaacgucacgugguuccacgccauccacguguccgggaccaacggcaccaagcgguucgacaacccggugcugcccuucaacgacggggucuacuucgcgagcaccgagaaguccaacaucauccgcggcuggaucuucgggacgacccucgacagcaagacccagucccugcugaucgugaacaacgccaccaacguggucaucaaggugugcgaguuccaguucugcaacgaccccuuccucggcguguacuaccacaagaacaacaagagcuggauggaguccgaguuccgggucuacagcuccgccaacaacugcacguucgaguacgugagccagcccuuccugauggaccuggagggcaagcaggggaacuucaagaaccuccgcgaguucguguucaagaacaucgacggcuacuucaagaucuacuccaagcacaccccgaucaaccugguccgggaccugccccagggguucagcgcccucgagccccugguggaccugcccaucggcaucaacaucacccgcuuccagacccuccuggcccugcaccgguccuaccucacgccgggggacagcagcuccggcuggaccgcgggcgccgccgccuacuacgugggguaccugcagccccgcaccuuccugcucaaguacaacgagaacggcaccaucacggacgcggucgacugcgcccuggacccccugagcgagaccaagugcacccucaaguccuucaccguggagaaggggaucuaccagacgagcaacuuccgggugcagcccaccgaguccaucguccgcuucccgaacaucaccaaccugugccccuucggcgagguguucaacgccacccgguucgccagcgucuacgccuggaaccgcaagcggaucuccaacugcguggcggacuacagcgugcuguacaacuccgccagcuucuccacguucaagugcuacggcgucagccccaccaagcucaacgaccugugcuucaccaacguguacgccgacuccuucgugauccgcggggacgagguccggcagaucgcccccggccagaccgggaacaucgccgacuacaacuacaagcugccggacgacuucacgggcugcgugaucgcguggaacagcaacaaccucgacuccaaggucgggggcaacuacaacuaccuguaccgccuguuccgcaagagcaaccucaagcccuucgagcgggacaucuccaccgagaucuaccaggccggcagcacccccugcaacggggugaagggcuucaacugcuacuucccccugcaguccuacggguuccagccgaccuacggcgugggguaccagcccuaccggguggucgugcugagcuucgagcuccugcacgcccccgccacggugugcggccccaagaaguccaccaaccuggucaagaacaagugcgugaacuucaacuucaacggccucaccgggaccggcgugcugaccgagagcaacaagaaguuccugccguuccagcaguucgggcgcgacaucgccgacacgaccgacgcgguccgcgacccccagacccuggagauccucgacaucacccccugcagcuucggcgggguguccgugaucacgccgggcaccaacaccagcaaccaggucgccgugcuguaccagggcgugaacugcaccgagguccccguggccauccacgccgaccagcugacgcccaccuggcggguguacuccaccggcagcaacgucuuccagacccgcgccgggugccucaucggcgcggagcacgugaacaacuccuacgagugcgacauccccaucggggccggcaucugcgccagcuaccagacgcagaccaacuccccgcggcgcgcccggagcguggcgucccagagcaucaucgccuacaccaugucccugggcgccgagaacagcgucgccuacuccaacaacagcaucgccauccccaccaacuucacgaucuccgugaccaccgagauccugcccgugagcaugaccaagacgagcgucgacugcaccauguacaucugcggggacuccaccgagugcagcaaccuccugcugcaguacggcuccuucugcacccagcucaaccgcgcgcugacggggaucgccguggagcaggacaagaacacccaggagguguucgcccaggucaagcagaucuacaagacgcccccgaucaaggacuucggcggguucaacuucagccagauccugcccgaccccuccaagcccagcaagcgguccuucaucgaggaccuccuguucaacaaggugacccuggccgacgccggcuucaucaagcaguacggcgacugccucggggacaucgcggcccgcgaccugaucugcgcccagaaguucaacggccugaccgugcucccgccccugcugaccgacgagaugaucgcccaguacaccagcgcccuccuggcggggaccaucacguccggcuggaccuucggggccggcgccgcccugcagauccccuucgcgaugcagauggccuaccgguucaacggcaucggggucacccagaacgugcucuacgagaaccagaagcugaucgccaaccaguucaacagcgccaucggcaagauccaggacucccugagcuccaccgccagcgcgcucgggaagcugcaggacguggucaaccagaacgcccaggcccugaacacgcucgugaagcagcuguccagcaacuucggcgccaucuccagcgugcugaacgacauccucucccgccuggacaaggucgaggccgaggugcagaucgaccggcugaucaccgggcgccuccagagccugcagaccuacgugacccagcagcugauccgggcggccgagauccgcgccagcgccaaccucgccgcgaccaagauguccgagugcguccugggccagagcaagcggguggacuucugcggcaagggguaccaccugauguccuucccccagagcgccccgcacggcguggucuuccuccacgugacguacguccccgcccaggagaagaacuucaccaccgcccccgcgaucugccacgacgggaaggcccacuucccccgcgagggcguguucguguccaacgggacccacugguucgucacgcagcggaacuucuacgagccgcagaucaucaccaccgacaacaccuucgugagcggcaacugcgacguggucaucggcaucgugaacaacacgguguacgacccccugcagcccgagcuggacuccuucaaggaggagcucgacaaguacuucaagaaccacaccagccccgacgucgaccugggggacaucuccggcaucaacgccagcguggugaacauccagaaggagaucgaccgccugaacgaggucgccaagaaccucaacgagucccugaucgaccugcaggagcucgggaaguacgagcaguacaucaaguggccgugguacaucuggcugggcuucaucgccggccugaucgcgaucgugauggugaccaucaugcucugcugcaugaccagcugcugcuccugccugaaggggugcugcagcugcggcuccugcugcaaguucgacgaggacgacagcgagcccguccugaagggggugaagcuccacuacacgugaggacuaguuauaagacugacuagcccgaugggccucccaacgggcccuccuccccuccuugcaccgagauuaauaaaaaaaaaaaaaaaaaaaaaaaaaaaaaaaaaaaaaaaaaaaaaaaaaaaaaaaaaaaaaaaaugcaucccccccccccccccccccccccccccccccaaaggcucuuuucagagccaccagaauu

SEQ ID NO: 23203 - RNA, 4030 nt, Artificial Sequence
  SARS-CoV-2/Wuhan/WIV05/2019__EPI_ISL_402128 spike protein mRNA gc (1-1273)(L18F_D80A_D215G_L242del_A243del_L244del_R246I_K417N_E484 K_N501Y_D614G_A701V)
aggagaaagcuuaccauguucguguuccugguccuccugccccuggugagcucccagugcgugaacuucaccacccgcacgcagcugccgcccgccuacaccaacagcuucacccggggcgucuacuaccccgacaagguguuccgcuccagcgugcugcacuccacccaggaccucuuccugcccuucuucagcaacgucacgugguuccacgccauccacguguccgggaccaacggcaccaagcgguucgccaacccggugcugcccuucaacgacggggucuacuucgcgagcaccgagaaguccaacaucauccgcggcuggaucuucgggacgacccucgacagcaagacccagucccugcugaucgugaacaacgccaccaacguggucaucaaggugugcgaguuccaguucugcaacgaccccuuccucggcguguacuaccacaagaacaacaagagcuggauggaguccgaguuccgggucuacagcuccgccaacaacugcacguucgaguacgugagccagcccuuccugauggaccuggagggcaagcaggggaacuucaagaaccuccgcgaguucguguucaagaacaucgacggcuacuucaagaucuacuccaagcacaccccgaucaaccugguccggggccugccccagggguucagcgcccucgagccccugguggaccugcccaucggcaucaacaucacccgcuuccagacccuccacaucuccuaccucacgccgggggacagcagcuccggcuggaccgcgggcgccgccgccuacuacgugggguaccugcagccccgcaccuuccugcucaaguacaacgagaacggcaccaucacggacgcggucgacugcgcccuggacccccugagcgagaccaagugcacccucaaguccuucaccguggagaaggggaucuaccagacgagcaacuuccgggugcagcccaccgaguccaucguccgcuucccgaacaucaccaaccugugccccuucggcgagguguucaacgccacccgguucgccagcgucuacgccuggaaccgcaagcggaucuccaacugcguggcggacuacagcgugcuguacaacuccgccagcuucuccacguucaagugcuacggcgucagccccaccaagcucaacgaccugugcuucaccaacguguacgccgacuccuucgugauccgcggggacgagguccggcagaucgcccccggccagaccgggaacaucgccgacuacaacuacaagcugccggacgacuucacgggcugcgugaucgcguggaacagcaacaaccucgacuccaaggucgggggcaacuacaacuaccuguaccgccuguuccgcaagagcaaccucaagcccuucgagcgggacaucuccaccgagaucuaccaggccggcagcacccccugcaacggggugaagggcuucaacugcuacuucccccugcaguccuacggguuccagccgaccuacggcgugggguaccagcccuaccggguggucgugcugagcuucgagcuccugcacgcccccgccacggugugcggccccaagaaguccaccaaccuggucaagaacaagugcgugaacuucaacuucaacggccucaccgggaccggcgugcugaccgagagcaacaagaaguuccugccguuccagcaguucgggcgcgacaucgccgacacgaccgacgcgguccgcgacccccagacccuggagauccucgacaucacccccugcagcuucggcgggguguccgugaucacgccgggcaccaacaccagcaaccaggucgccgugcuguaccagggcgugaacugcaccgagguccccguggccauccacgccgaccagcugacgcccaccuggcggguguacuccaccggcagcaacgucuuccagacccgcgccgggugccucaucggcgcggagcacgugaacaacuccuacgagugcgacauccccaucggggccggcaucugcgccagcuaccagacgcagaccaacuccccgcggcgcgcccggagcguggcgucccagagcaucaucgccuacaccaugucccugggcguggagaacagcgucgccuacuccaacaacagcaucgccauccccaccaacuucacgaucuccgugaccaccgagauccugcccgugagcaugaccaagacgagcgucgacugcaccauguacaucugcggggacuccaccgagugcagcaaccuccugcugcaguacggcuccuucugcacccagcucaaccgcgcgcugacggggaucgccguggagcaggacaagaacacccaggagguguucgcccaggucaagcagaucuacaagacgcccccgaucaaggacuucggcggguucaacuucagccagauccugcccgaccccuccaagcccagcaagcgguccuucaucgaggaccuccuguucaacaaggugacccuggccgacgccggcuucaucaagcaguacggcgacugccucggggacaucgcggcccgcgaccugaucugcgcccagaaguucaacggccugaccgugcucccgccccugcugaccgacgagaugaucgcccaguacaccagcgcccuccuggcggggaccaucacguccggcuggaccuucggggccggcgccgcccugcagauccccuucgcgaugcagauggccuaccgguucaacggcaucggggucacccagaacgugcucuacgagaaccagaagcugaucgccaaccaguucaacagcgccaucggcaagauccaggacucccugagcuccaccgccagcgcgcucgggaagcugcaggacguggucaaccagaacgcccaggcccugaacacgcucgugaagcagcuguccagcaacuucggcgccaucuccagcgugcugaacgacauccucucccgccuggacaaggucgaggccgaggugcagaucgaccggcugaucaccgggcgccuccagagccugcagaccuacgugacccagcagcugauccgggcggccgagauccgcgccagcgccaaccucgccgcgaccaagauguccgagugcguccugggccagagcaagcggguggacuucugcggcaagggguaccaccugauguccuucccccagagcgccccgcacggcguggucuuccuccacgugacguacguccccgcccaggagaagaacuucaccaccgcccccgcgaucugccacgacgggaaggcccacuucccccgcgagggcguguucguguccaacgggacccacugguucgucacgcagcggaacuucuacgagccgcagaucaucaccaccgacaacaccuucgugagcggcaacugcgacguggucaucggcaucgugaacaacacgguguacgacccccugcagcccgagcuggacuccuucaaggaggagcucgacaaguacuucaagaaccacaccagccccgacgucgaccugggggacaucuccggcaucaacgccagcguggugaacauccagaaggagaucgaccgccugaacgaggucgccaagaaccucaacgagucccugaucgaccugcaggagcucgggaaguacgagcaguacaucaaguggccgugguacaucuggcugggcuucaucgccggccugaucgcgaucgugauggugaccaucaugcucugcugcaugaccagcugcugcuccugccugaaggggugcugcagcugcggcuccugcugcaaguucgacgaggacgacagcgagcccguccugaagggggugaagcuccacuacacgugaggacuaguuauaagacugacuagcccgaugggccucccaacgggcccuccuccccuccuugcaccgagauuaauaaaaaaaaaaaaaaaaaaaaaaaaaaaaaaaaaaaaaaaaaaaaaaaaaaaaaaaaaaaaaaaaugcaucccccccccccccccccccccccccccccccaaaggcucuuuucagagccaccagaauu

SEQ ID NO: 23204 - RNA, 4039 nt, Artificial Sequence
  SARS-CoV-2/Wuhan/WIV05/2019__EPI_ISL_402128 spike protein mRNA gc (1-1273)(E484K_D614G)
aggagaaagcuuaccauguucguguuccugguccuccugccccuggugagcucccagugcgugaaccucaccacccgcacgcagcugccgcccgccuacaccaacagcuucacccggggcgucuacuaccccgacaagguguuccgcuccagcgugcugcacuccacccaggaccucuuccugcccuucuucagcaacgucacgugguuccacgccauccacguguccgggaccaacggcaccaagcgguucgacaacccggugcugcccuucaacgacggggucuacuucgcgagcaccgagaaguccaacaucauccgcggcuggaucuucgggacgacccucgacagcaagacccagucccugcugaucgugaacaacgccaccaacguggucaucaaggugugcgaguuccaguucugcaacgaccccuuccucggcguguacuaccacaagaacaacaagagcuggauggaguccgaguuccgggucuacagcuccgccaacaacugcacguucgaguacgugagccagcccuuccugauggaccuggagggcaagcaggggaacuucaagaaccuccgcgaguucguguucaagaacaucgacggcuacuucaagaucuacuccaagcacaccccgaucaaccugguccgggaccugccccagggguucagcgcccucgagccccugguggaccugcccaucggcaucaacaucacccgcuuccagacccuccuggcccugcaccgguccuaccucacgccgggggacagcagcuccggcuggaccgcgggcgccgccgccuacuacgugggguaccugcagccccgcaccuuccugcucaaguacaacgagaacggcaccaucacggacgcggucgacugcgcccuggacccccugagcgagaccaagugcacccucaaguccuucaccguggagaaggggaucuaccagacgagcaacuuccgggugcagcccaccgaguccaucguccgcuucccgaacaucaccaaccugugccccuucggcgagguguucaacgccacccgguucgccagcgucuacgccuggaaccgcaagcggaucuccaacugcguggcggacuacagcgugcuguacaacuccgccagcuucuccacguucaagugcuacggcgucagccccaccaagcucaacgaccugugcuucaccaacguguacgccgacuccuucgugauccgcggggacgagguccggcagaucgcccccggccagaccgggaagaucgccgacuacaacuacaagcugccggacgacuucacgggcugcgugaucgcguggaacagcaacaaccucgacuccaaggucgggggcaacuacaacuaccuguaccgccuguuccgcaagagcaaccucaagcccuucgagcgggacaucuccaccgagaucuaccaggccggcagcacccccugcaacggggugaagggcuucaacugcuacuucccccugcaguccuacggguuccagccgaccaacggcgugggguaccagcccuaccggguggucgugcugagcuucgagcuccugcacgcccccgccacggugugcggccccaagaaguccaccaaccuggucaagaacaagugcgugaacuucaacuucaacggccucaccgggaccggcgugcugaccgagagcaacaagaaguuccugccguuccagcaguucgggcgcgacaucgccgacacgaccgacgcgguccgcgacccccagacccuggagauccucgacaucacccccugcagcuucggcgggguguccgugaucacgccgggcaccaacaccagcaaccaggucgccgugcuguaccagggcgugaacugcaccgagguccccguggccauccacgccgaccagcugacgcccaccuggcggguguacuccaccggcagcaacgucuuccagacccgcgccgggugccucaucggcgcggagcacgugaacaacuccuacgagugcgacauccccaucggggccggcaucugcgccagcuaccagacgcagaccaacuccccgcggcgcgcccggagcguggcgucccagagcaucaucgccuacaccaugucccugggcgccgagaacagcgucgccuacuccaacaacagcaucgccauccccaccaacuucacgaucuccgugaccaccgagauccugcccgugagcaugaccaagacgagcgucgacugcaccauguacaucugcggggacuccaccgagugcagcaaccuccugcugcaguacggcuccuucugcacccagcucaaccgcgcgcugacggggaucgccguggagcaggacaagaacacccaggagguguucgcccaggucaagcagaucuacaagacgcccccgaucaaggacuucggcggguucaacuucagccagauccugcccgaccccuccaagcccagcaagcgguccuucaucgaggaccuccuguucaacaaggugacccuggccgacgccggcuucaucaagcaguacggcgacugccucggggacaucgcggcccgcgaccugaucugcgcccagaaguucaacggccugaccgugcucccgccccugcugaccgacgagaugaucgcccaguacaccagcgcccuccuggcggggaccaucacguccggcuggaccuucggggccggcgccgcccugcagauccccuucgcgaugcagauggccuaccgguucaacggcaucggggucacccagaacgugcucuacgagaaccagaagcugaucgccaaccaguucaacagcgccaucggcaagauccaggacucccugagcuccaccgccagcgcgcucgggaagcugcaggacguggucaaccagaacgcccaggcccugaacacgcucgugaagcagcuguccagcaacuucggcgccaucuccagcgugcugaacgacauccucucccgccuggacaaggucgaggccgaggugcagaucgaccggcugaucaccgggcgccuccagagccugcagaccuacgugacccagcagcugauccgggcggccgagauccgcgccagcgccaaccucgccgcgaccaagauguccgagugcguccugggccagagcaagcggguggacuucugcggcaagggguaccaccugauguccuucccccagagcgccccgcacggcguggucuuccuccacgugacguacguccccgcccaggagaagaacuucaccaccgcccccgcgaucugccacgacgggaaggcccacuucccccgcgagggcguguucguguccaacgggacccacugguucgucacgcagcggaacuucuacgagccgcagaucaucaccaccgacaacaccuucgugagcggcaacugcgacguggucaucggcaucgugaacaacacgguguacgacccccugcagcccgagcuggacuccuucaaggaggagcucgacaaguacuucaagaaccacaccagccccgacgucgaccugggggacaucuccggcaucaacgccagcguggugaacauccagaaggagaucgaccgccugaacgaggucgccaagaaccucaacgagucccugaucgaccugcaggagcucgggaaguacgagcaguacaucaaguggccgugguacaucuggcugggcuucaucgccggccugaucgcgaucgugauggugaccaucaugcucugcugcaugaccagcugcugcuccugccugaaggggugcugcagcugcggcuccugcugcaaguucgacgaggacgacagcgagcccguccugaagggggugaagcuccacuacacgugaggacuaguuauaagacugacuagcccgaugggccucccaacgggcccuccuccccuccuugcaccgagauuaauaaaaaaaaaaaaaaaaaaaaaaaaaaaaaaaaaaaaaaaaaaaaaaaaaaaaaaaaaaaaaaaaugcaucccccccccccccccccccccccccccccccaaaggcucuuuucagagccaccagaauu

SEQ ID NO: 23205 - RNA, 4039 nt, Artificial Sequence
  SARS-CoV-2/Wuhan/WIV05/2019__EPI_ISL_402128 spike protein mRNA gc (1-1273)(L18F_T20N_P26S_D138Y_R190S_K417T_E484K_N501Y_D614G_H655Y _T1027I)
aggagaaagcuuaccauguucguguuccugguccuccugccccuggugagcucccagugcgugaacuucaccaaccgcacgcagcugccgagcgccuacaccaacagcuucacccggggcgucuacuaccccgacaagguguuccgcuccagcgugcugcacuccacccaggaccucuuccugcccuucuucagcaacgucacgugguuccacgccauccacguguccgggaccaacggcaccaagcgguucgacaacccggugcugcccuucaacgacggggucuacuucgcgagcaccgagaaguccaacaucauccgcggcuggaucuucgggacgacccucgacagcaagacccagucccugcugaucgugaacaacgccaccaacguggucaucaaggugugcgaguuccaguucugcaacuaccccuuccucggcguguacuaccacaagaacaacaagagcuggauggaguccgaguuccgggucuacagcuccgccaacaacugcacguucgaguacgugagccagcccuuccugauggaccuggagggcaagcaggggaacuucaagaaccucagcgaguucguguucaagaacaucgacggcuacuucaagaucuacuccaagcacaccccgaucaaccugguccgggaccugccccagggguucagcgcccucgagccccugguggaccugcccaucggcaucaacaucacccgcuuccagacccuccuggcccugcaccgguccuaccucacgccgggggacagcagcuccggcuggaccgcgggcgccgccgccuacuacgugggguaccugcagccccgcaccuuccugcucaaguacaacgagaacggcaccaucacggacgcggucgacugcgcccuggacccccugagcgagaccaagugcacccucaaguccuucaccguggagaaggggaucuaccagacgagcaacuuccgggugcagcccaccgaguccaucguccgcuucccgaacaucaccaaccugugccccuucggcgagguguucaacgccacccgguucgccagcgucuacgccuggaaccgcaagcggaucuccaacugcguggcggacuacagcgugcuguacaacuccgccagcuucuccacguucaagugcuacggcgucagccccaccaagcucaacgaccugugcuucaccaacguguacgccgacuccuucgugauccgcggggacgagguccggcagaucgcccccggccagaccgggaccaucgccgacuacaacuacaagcugccggacgacuucacgggcugcgugaucgcguggaacagcaacaaccucgacuccaaggucgggggcaacuacaacuaccuguaccgccuguuccgcaagagcaaccucaagcccuucgagcgggacaucuccaccgagaucuaccaggccggcagcacccccugcaacggggugaagggcuucaacugcuacuucccccugcaguccuacggguuccagccgaccuacggcgugggguaccagcccuaccggguggucgugcugagcuucgagcuccugcacgcccccgccacggugugcggccccaagaaguccaccaaccuggucaagaacaagugcgugaacuucaacuucaacggccucaccgggaccggcgugcugaccgagagcaacaagaaguuccugccguuccagcaguucgggcgcgacaucgccgacacgaccgacgcgguccgcgacccccagacccuggagauccucgacaucacccccugcagcuucggcgggguguccgugaucacgccgggcaccaacaccagcaaccaggucgccgugcuguaccagggcgugaacugcaccgagguccccguggccauccacgccgaccagcugacgcccaccuggcggguguacuccaccggcagcaacgucuuccagacccgcgccgggugccucaucggcgcggaguacgugaacaacuccuacgagugcgacauccccaucggggccggcaucugcgccagcuaccagacgcagaccaacuccccgcggcgcgcccggagcguggcgucccagagcaucaucgccuacaccaugucccugggcgccgagaacagcgucgccuacuccaacaacagcaucgccauccccaccaacuucacgaucuccgugaccaccgagauccugcccgugagcaugaccaagacgagcgucgacugcaccauguacaucugcggggacuccaccgagugcagcaaccuccugcugcaguacggcuccuucugcacccagcucaaccgcgcgcugacggggaucgccguggagcaggacaagaacacccaggagguguucgcccaggucaagcagaucuacaagacgcccccgaucaaggacuucggcggguucaacuucagccagauccugcccgaccccuccaagcccagcaagcgguccuucaucgaggaccuccuguucaacaaggugacccuggccgacgccggcuucaucaagcaguacggcgacugccucggggacaucgcggcccgcgaccugaucugcgcccagaaguucaacggccugaccgugcucccgccccugcugaccgacgagaugaucgcccaguacaccagcgcccuccuggcggggaccaucacguccggcuggaccuucggggccggcgccgcccugcagauccccuucgcgaugcagauggccuaccgguucaacggcaucggggucacccagaacgugcucuacgagaaccagaagcugaucgccaaccaguucaacagcgccaucggcaagauccaggacucccugagcuccaccgccagcgcgcucgggaagcugcaggacguggucaaccagaacgcccaggcccugaacacgcucgugaagcagcuguccagcaacuucggcgccaucuccagcgugcugaacgacauccucucccgccuggacaaggucgaggccgaggugcagaucgaccggcugaucaccgggcgccuccagagccugcagaccuacgugacccagcagcugauccgggcggccgagauccgcgccagcgccaaccucgccgcgaucaagauguccgagugcguccugggccagagcaagcggguggacuucugcggcaagggguaccaccugauguccuucccccagagcgccccgcacggcguggucuuccuccacgugacguacguccccgcccaggagaagaacuucaccaccgcccccgcgaucugccacgacgggaaggcccacuucccccgcgagggcguguucguguccaacgggacccacugguucgucacgcagcggaacuucuacgagccgcagaucaucaccaccgacaacaccuucgugagcggcaacugcgacguggucaucggcaucgugaacaacacgguguacgacccccugcagcccgagcuggacuccuucaaggaggagcucgacaaguacuucaagaaccacaccagccccgacgucgaccugggggacaucuccggcaucaacgccagcguggugaacauccagaaggagaucgaccgccugaacgaggucgccaagaaccucaacgagucccugaucgaccugcaggagcucgggaaguacgagcaguacaucaaguggccgugguacaucuggcugggcuucaucgccggccugaucgcgaucgugauggugaccaucaugcucugcugcaugaccagcugcugcuccugccugaaggggugcugcagcugcggcuccugcugcaaguucgacgaggacgacagcgagcccguccugaagggggugaagcuccacuacacgugaggacuaguuauaagacugacuagcccgaugggccucccaacgggcccuccuccccuccuugcaccgagauuaauaaaaaaaaaaaaaaaaaaaaaaaaaaaaaaaaaaaaaaaaaaaaaaaaaaaaaaaaaaaaaaaaugcaucccccccccccccccccccccccccccccccaaaggcucuuuucagagccaccagaauu

SEQ ID NO: 23206 - RNA, 4039 nt, Artificial Sequence
  SARS-CoV-2/Wuhan/WIV05/2019__EPI_ISL_402128 spike protein mRNA gc (1-1273)(S13I_W152C_L452R_D614G)
aggagaaagcuuaccauguucguguuccugguccuccugccccuggugagcauccagugcgugaaccucaccacccgcacgcagcugccgcccgccuacaccaacagcuucacccggggcgucuacuaccccgacaagguguuccgcuccagcgugcugcacuccacccaggaccucuuccugcccuucuucagcaacgucacgugguuccacgccauccacguguccgggaccaacggcaccaagcgguucgacaacccggugcugcccuucaacgacggggucuacuucgcgagcaccgagaaguccaacaucauccgcggcuggaucuucgggacgacccucgacagcaagacccagucccugcugaucgugaacaacgccaccaacguggucaucaaggugugcgaguuccaguucugcaacgaccccuuccucggcguguacuaccacaagaacaacaagagcugcauggaguccgaguuccgggucuacagcuccgccaacaacugcacguucgaguacgugagccagcccuuccugauggaccuggagggcaagcaggggaacuucaagaaccuccgcgaguucguguucaagaacaucgacggcuacuucaagaucuacuccaagcacaccccgaucaaccugguccgggaccugccccagggguucagcgcccucgagccccugguggaccugcccaucggcaucaacaucacccgcuuccagacccuccuggcccugcaccgguccuaccucacgccgggggacagcagcuccggcuggaccgcgggcgccgccgccuacuacgugggguaccugcagccccgcaccuuccugcucaaguacaacgagaacggcaccaucacggacgcggucgacugcgcccuggacccccugagcgagaccaagugcacccucaaguccuucaccguggagaaggggaucuaccagacgagcaacuuccgggugcagcccaccgaguccaucguccgcuucccgaacaucaccaaccugugccccuucggcgagguguucaacgccacccgguucgccagcgucuacgccuggaaccgcaagcggaucuccaacugcguggcggacuacagcgugcuguacaacuccgccagcuucuccacguucaagugcuacggcgucagccccaccaagcucaacgaccugugcuucaccaacguguacgccgacuccuucgugauccgcggggacgagguccggcagaucgcccccggccagaccgggaagaucgccgacuacaacuacaagcugccggacgacuucacgggcugcgugaucgcguggaacagcaacaaccucgacuccaaggucgggggcaacuacaacuaccgcuaccgccuguuccgcaagagcaaccucaagcccuucgagcgggacaucuccaccgagaucuaccaggccggcagcacccccugcaacgggguggagggcuucaacugcuacuucccccugcaguccuacggguuccagccgaccaacggcgugggguaccagcccuaccggguggucgugcugagcuucgagcuccugcacgcccccgccacggugugcggccccaagaaguccaccaaccuggucaagaacaagugcgugaacuucaacuucaacggccucaccgggaccggcgugcugaccgagagcaacaagaaguuccugccguuccagcaguucgggcgcgacaucgccgacacgaccgacgcgguccgcgacccccagacccuggagauccucgacaucacccccugcagcuucggcgggguguccgugaucacgccgggcaccaacaccagcaaccaggucgccgugcuguaccagggcgugaacugcaccgagguccccguggccauccacgccgaccagcugacgcccaccuggcggguguacuccaccggcagcaacgucuuccagacccgcgccgggugccucaucggcgcggagcacgugaacaacuccuacgagugcgacauccccaucggggccggcaucugcgccagcuaccagacgcagaccaacuccccgcggcgcgcccggagcguggcgucccagagcaucaucgccuacaccaugucccugggcgccgagaacagcgucgccuacuccaacaacagcaucgccauccccaccaacuucacgaucuccgugaccaccgagauccugcccgugagcaugaccaagacgagcgucgacugcaccauguacaucugcggggacuccaccgagugcagcaaccuccugcugcaguacggcuccuucugcacccagcucaaccgcgcgcugacggggaucgccguggagcaggacaagaacacccaggagguguucgcccaggucaagcagaucuacaagacgcccccgaucaaggacuucggcggguucaacuucagccagauccugcccgaccccuccaagcccagcaagcgguccuucaucgaggaccuccuguucaacaaggugacccuggccgacgccggcuucaucaagcaguacggcgacugccucggggacaucgcggcccgcgaccugaucugcgcccagaaguucaacggccugaccgugcucccgccccugcugaccgacgagaugaucgcccaguacaccagcgcccuccuggcggggaccaucacguccggcuggaccuucggggccggcgccgcccugcagauccccuucgcgaugcagauggccuaccgguucaacggcaucggggucacccagaacgugcucuacgagaaccagaagcugaucgccaaccaguucaacagcgccaucggcaagauccaggacucccugagcuccaccgccagcgcgcucgggaagcugcaggacguggucaaccagaacgcccaggcccugaacacgcucgugaagcagcuguccagcaacuucggcgccaucuccagcgugcugaacgacauccucucccgccuggacaaggucgaggccgaggugcagaucgaccggcugaucaccgggcgccuccagagccugcagaccuacgugacccagcagcugauccgggcggccgagauccgcgccagcgccaaccucgccgcgaccaagauguccgagugcguccugggccagagcaagcggguggacuucugcggcaagggguaccaccugauguccuucccccagagcgccccgcacggcguggucuuccuccacgugacguacguccccgcccaggagaagaacuucaccaccgcccccgcgaucugccacgacgggaaggcccacuucccccgcgagggcguguucguguccaacgggacccacugguucgucacgcagcggaacuucuacgagccgcagaucaucaccaccgacaacaccuucgugagcggcaacugcgacguggucaucggcaucgugaacaacacgguguacgacccccugcagcccgagcuggacuccuucaaggaggagcucgacaaguacuucaagaaccacaccagccccgacgucgaccugggggacaucuccggcaucaacgccagcguggugaacauccagaaggagaucgaccgccugaacgaggucgccaagaaccucaacgagucccugaucgaccugcaggagcucgggaaguacgagcaguacaucaaguggccgugguacaucuggcugggcuucaucgccggccugaucgcgaucgugauggugaccaucaugcucugcugcaugaccagcugcugcuccugccugaaggggugcugcagcugcggcuccugcugcaaguucgacgaggacgacagcgagcccguccugaagggggugaagcuccacuacacgugaggacuaguuauaagacugacuagcccgaugggccucccaacgggcccuccuccccuccuugcaccgagauuaauaaaaaaaaaaaaaaaaaaaaaaaaaaaaaaaaaaaaaaaaaaaaaaaaaaaaaaaaaaaaaaaaugcaucccccccccccccccccccccccccccccccaaaggcucuuuucagagccaccagaauu

SEQ ID NO: 23207 - RNA, 4039 nt, Artificial Sequence; identical to SEQ ID NO: 162
  SARS-CoV-2/Wuhan/WIV05/2019__EPI_ISL_402128 spike protein mRNA gc (1-1273) R9514

SEQ ID NO: 23208 - RNA, 4039 nt, Artificial Sequence; identical to SEQ ID NO: 12751
  SARS-CoV-2/Wuhan/WIV05/2019__EPI_ISL_402128 spike protein mRNA gc (1-1273)(D614G)

SEQ ID NO: 23209 - RNA, 4039 nt, Artificial Sequence
  SARS-CoV-2/Wuhan/WIV05/2019__EPI_ISL_402128 spike protein mRNA gc (1-1273)(A222V_D614G)
aggagaaagcuuaccauguucguguuccugguccuccugccccuggugagcucccagugcgugaaccucaccacccgcacgcagcugccgcccgccuacaccaacagcuucacccggggcgucuacuaccccgacaagguguuccgcuccagcgugcugcacuccacccaggaccucuuccugcccuucuucagcaacgucacgugguuccacgccauccacguguccgggaccaacggcaccaagcgguucgacaacccggugcugcccuucaacgacggggucuacuucgcgagcaccgagaaguccaacaucauccgcggcuggaucuucgggacgacccucgacagcaagacccagucccugcugaucgugaacaacgccaccaacguggucaucaaggugugcgaguuccaguucugcaacgaccccuuccucggcguguacuaccacaagaacaacaagagcuggauggaguccgaguuccgggucuacagcuccgccaacaacugcacguucgaguacgugagccagcccuuccugauggaccuggagggcaagcaggggaacuucaagaaccuccgcgaguucguguucaagaacaucgacggcuacuucaagaucuacuccaagcacaccccgaucaaccugguccgggaccugccccagggguucagcgugcucgagccccugguggaccugcccaucggcaucaacaucacccgcuuccagacccuccuggcccugcaccgguccuaccucacgccgggggacagcagcuccggcuggaccgccggcgcggccgccuacuacgucggguaccugcagccccgcaccuuccugcucaaguacaacgagaacggcaccaucacggacgccguggacugcgcgcuggacccccugagcgagaccaagugcacccucaaguccuucaccguggagaaggggaucuaccagacgagcaacuuccggguccagcccaccgaguccaucgugcgcuucccgaacaucaccaaccugugccccuucggcgaggucuucaacgccacccgguucgccagcguguacgccuggaaccgcaagcggaucuccaacugcguggccgacuacagcguccuguacaacuccgcgagcuucuccacguucaagugcuacggcgugagccccaccaagcucaacgaccugugcuucaccaacguguacgccgacuccuucgucauccgcggggacgaggugcggcagaucgcccccggccagaccgggaagaucgccgacuacaacuacaagcugccggacgacuucacgggcugcgugaucgccuggaacagcaacaaccucgacuccaaggucgggggcaacuacaacuaccuguaccgccuguuccgcaagagcaaccucaagcccuucgagcgggacaucuccaccgagaucuaccaggcgggcagcacccccugcaacgggguggagggcuucaacugcuacuucccccugcaguccuacggguuccagccgaccaacggcgugggguaccagcccuaccgggucguggugcugagcuucgagcuccugcacgcccccgccacggucugcggccccaagaaguccaccaaccuggugaagaacaagugcgugaacuucaacuucaacggccucaccgggaccggcguccugaccgagagcaacaagaaguuccugccguuccagcaguucgggcgcgacaucgccgacacgaccgacgccgugcgcgacccccagacccuggagauccucgacaucacccccugcagcuucggcgggguguccgucaucacgccgggcaccaacaccagcaaccagguggcggugcuguaccagggcgucaacugcaccgaggugcccguggccauccacgccgaccagcugacgcccaccuggcgggucuacuccaccgggagcaacguguuccagacccgcgccggcugccucaucggggccgagcacgugaacaacuccuacgagugcgacauccccaucggcgcgggcaucugcgccagcuaccagacgcagaccaacuccccgcggcgcgcccggagcgucgccucccagagcaucaucgcguacaccaugucccugggggccgagaacagcguggccuacuccaacaacagcaucgccauccccaccaacuucacgaucuccgugaccaccgagauccugcccgucagcaugaccaagacgagcguggacugcaccauguacaucugcggcgacuccaccgagugcagcaaccuccugcugcaguacggguccuucugcacccagcucaaccgcgcccugacgggcaucgcgguggagcaggacaagaacacccaggaggucuucgcccaggugaagcagaucuacaagacgcccccgaucaaggacuucgggggcuucaacuucagccagauccugcccgaccccuccaagcccagcaagcgguccuucaucgaggaccuccuguucaacaaggugacccuggccgacgccggcuucaucaagcaguacggggacugccucggcgacaucgccgcgcgcgaccugaucugcgcccagaaguucaacgggcugaccguccucccgccccugcugaccgacgagaugaucgcccaguacaccagcgcccuccuggccggcaccaucacguccggguggaccuucggcgcgggcgccgcccugcagauccccuucgccaugcagauggcguaccgguucaacgggaucggcgugacccagaacgugcucuacgagaaccagaagcugaucgccaaccaguucaacagcgccaucgggaagauccaggacucccugagcuccaccgccagcgcccucggcaagcugcaggacgucgugaaccagaacgcgcaggcccugaacacgcucgugaagcagcuguccagcaacuucggggccaucuccagcguccugaacgacauccucucccgccuggacaagguggaggccgaggugcagaucgaccggcugaucaccggccgccuccagagccugcagaccuacgucacccagcagcugauccgggccgcggagauccgcgccagcgccaaccucgccgccaccaagauguccgagugcgugcugggccagagcaagcggguggacuucugcgggaagggcuaccaccugauguccuucccccagagcgcgccgcacggggucguguuccuccacgucacguacgugcccgcccaggagaagaacuucaccaccgcccccgccaucugccacgacggcaaggcgcacuucccccgcgaggggguguucgucuccaacggcacccacugguucgugacgcagcggaacuucuacgagccgcagaucaucaccaccgacaacaccuucgugagcggcaacugcgacgucgugaucgggaucgugaacaacacggucuacgacccccugcagcccgagcuggacuccuucaaggaggagcucgacaaguacuucaagaaccacaccagccccgacguggaccugggcgacaucuccgggaucaacgccagcguggucaacauccagaaggagaucgaccgccugaacgagguggccaagaaccucaacgagucccugaucgaccugcaggagcucggcaaguacgagcaguacaucaaguggccgugguacaucuggcugggcuucaucgccgggcugaucgccaucgugauggucaccaucaugcucugcugcaugaccagcugcugcuccugccugaagggcugcugcagcugcggguccugcugcaaguucgacgaggacgacagcgagcccgugcugaagggcgugaagcuccacuacacgugaggacuaguuauaagacugacuagcccgaugggccucccaacgggcccuccuccccuccuugcaccgagauuaauaaaaaaaaaaaaaaaaaaaaaaaaaaaaaaaaaaaaaaaaaaaaaaaaaaaaaaaaaaaaaaaaugcaucccccccccccccccccccccccccccccccaaaggcucuuuucagagccaccagaauu

SEQ ID NO: 23210 - RNA, 4039 nt, Artificial Sequence
  SARS-CoV-2/Wuhan/WIV05/2019__EPI_ISL_402128 spike protein mRNA gc (1-1273)(N439K_D614G)
aggagaaagcuuaccauguucguguuccugguccuccugccccuggugagcucccagugcgugaaccucaccacccgcacgcagcugccgcccgccuacaccaacagcuucacccggggcgucuacuaccccgacaagguguuccgcuccagcgugcugcacuccacccaggaccucuuccugcccuucuucagcaacgucacgugguuccacgccauccacguguccgggaccaacggcaccaagcgguucgacaacccggugcugcccuucaacgacggggucuacuucgcgagcaccgagaaguccaacaucauccgcggcuggaucuucgggacgacccucgacagcaagacccagucccugcugaucgugaacaacgccaccaacguggucaucaaggugugcgaguuccaguucugcaacgaccccuuccucggcguguacuaccacaagaacaacaagagcuggauggaguccgaguuccgggucuacagcuccgccaacaacugcacguucgaguacgugagccagcccuuccugauggaccuggagggcaagcaggggaacuucaagaaccuccgcgaguucguguucaagaacaucgacggcuacuucaagaucuacuccaagcacaccccgaucaaccugguccgggaccugccccagggguucagcgcccucgagccccugguggaccugcccaucggcaucaacaucacccgcuuccagacccuccuggcccugcaccgguccuaccucacgccgggggacagcagcuccggcuggaccgcgggcgccgccgccuacuacgugggguaccugcagccccgcaccuuccugcucaaguacaacgagaacggcaccaucacggacgcggucgacugcgcccuggacccccugagcgagaccaagugcacccucaaguccuucaccguggagaaggggaucuaccagacgagcaacuuccgggugcagcccaccgaguccaucguccgcuucccgaacaucaccaaccugugccccuucggcgagguguucaacgccacccgguucgccagcgucuacgccuggaaccgcaagcggaucuccaacugcguggcggacuacagcgugcuguacaacuccgccagcuucuccacguucaagugcuacggcgucagccccaccaagcucaacgaccugugcuucaccaacguguacgccgacuccuucgugauccgcggggacgagguccggcagaucgcccccggccagaccgggaagaucgccgacuacaacuacaagcugccggacgacuucacgggcugcgugaucgcguggaacagcaagaaccucgacuccaaggucgggggcaacuacaacuaccuguaccgccuguuccgcaagagcaaccucaagcccuucgagcgggacaucuccaccgagaucuaccaggccggcagcacccccugcaacgggguggagggcuucaacugcuacuucccccugcaguccuacggguuccagccgaccaacggcgugggguaccagcccuaccggguggucgugcugagcuucgagcuccugcacgcccccgccacggugugcggccccaagaaguccaccaaccuggucaagaacaagugcgugaacuucaacuucaacggccucaccgggaccggcgugcugaccgagagcaacaagaaguuccugccguuccagcaguucgggcgcgacaucgccgacacgaccgacgcgguccgcgacccccagacccuggagauccucgacaucacccccugcagcuucggcgggguguccgugaucacgccgggcaccaacaccagcaaccaggucgccgugcuguaccagggcgugaacugcaccgagguccccguggccauccacgccgaccagcugacgcccaccuggcggguguacuccaccgggagcaacgucuuccagacccgcgccggcugccucaucggggcggagcacgugaacaacuccuacgagugcgacauccccaucggcgccggcaucugcgccagcuaccagacgcagaccaacuccccgcggcgcgcccggagcguggcgucccagagcaucaucgccuacaccaugucccugggggccgagaacagcgucgccuacuccaacaacagcaucgccauccccaccaacuucacgaucuccgugaccaccgagauccugcccgugagcaugaccaagacgagcgucgacugcaccauguacaucugcggcgacuccaccgagugcagcaaccuccugcugcaguacggguccuucugcacccagcucaaccgcgcgcugacgggcaucgccguggagcaggacaagaacacccaggagguguucgcccaggucaagcagaucuacaagacgcccccgaucaaggacuucgggggcuucaacuucagccagauccugcccgaccccuccaagcccagcaagcgguccuucaucgaggaccuccuguucaacaaggugacccuggccgacgccggcuucaucaagcaguacggggacugccucggcgacaucgcggcccgcgaccugaucugcgcccagaaguucaacgggcugaccgugcucccgccccugcugaccgacgagaugaucgcccaguacaccagcgcccuccuggcgggcaccaucacguccggguggaccuucggcgccggcgccgcccugcagauccccuucgcgaugcagauggccuaccgguucaacgggaucggcgucacccagaacgugcucuacgagaaccagaagcugaucgccaaccaguucaacagcgccaucgggaagauccaggacucccugagcuccaccgccagcgcgcucggcaagcugcaggacguggucaaccagaacgcccaggcccugaacacgcucgugaagcagcuguccagcaacuucggggccaucuccagcgugcugaacgacauccucucccgccuggacaaggucgaggccgaggugcagaucgaccggcugaucaccggccgccuccagagccugcagaccuacgugacccagcagcugauccgggcggccgagauccgcgccagcgccaaccucgccgcgaccaagauguccgagugcguccugggccagagcaagcggguggacuucugcgggaagggcuaccaccugauguccuucccccagagcgccccgcacgggguggucuuccuccacgugacguacguccccgcccaggagaagaacuucaccaccgcccccgcgaucugccacgacggcaaggcccacuucccccgcgaggggguguucguguccaacggcacccacugguucgucacgcagcggaacuucuacgagccgcagaucaucaccaccgacaacaccuucgugagcggcaacugcgacguggucaucgggaucgugaacaacacgguguacgacccccugcagcccgagcuggacuccuucaaggaggagcucgacaaguacuucaagaaccacaccagccccgacgucgaccugggcgacaucuccgggaucaacgccagcguggugaacauccagaaggagaucgaccgccugaacgaggucgccaagaaccucaacgagucccugaucgaccugcaggagcucggcaaguacgagcaguacaucaaguggccgugguacaucuggcugggcuucaucgccgggcugaucgcgaucgugauggugaccaucaugcucugcugcaugaccagcugcugcuccugccugaagggcugcugcagcugcggguccugcugcaaguucgacgaggacgacagcgagcccguccugaagggcgugaagcuccacuacacgugaggacuaguuauaagacugacuagcccgaugggccucccaacgggcccuccuccccuccuugcaccgagauuaauaaaaaaaaaaaaaaaaaaaaaaaaaaaaaaaaaaaaaaaaaaaaaaaaaaaaaaaaaaaaaaaaugcaucccccccccccccccccccccccccccccccaaaggcucuuuucagagccaccagaauu

SEQ ID NO: 23211 - RNA, 4039 nt, Artificial Sequence
  SARS-CoV-2/Wuhan/WIV05/2019__EPI_ISL_402128 spike protein mRNA gc (1-1273)(S477N_D614G)
aggagaaagcuuaccauguucguguuccugguccuccugccccuggugagcucccagugcgugaaccucaccacccgcacgcagcugccgcccgccuacaccaacagcuucacccggggcgucuacuaccccgacaagguguuccgcuccagcgugcugcacuccacccaggaccucuuccugcccuucuucagcaacgucacgugguuccacgccauccacguguccgggaccaacggcaccaagcgguucgacaacccggugcugcccuucaacgacggggucuacuucgcgagcaccgagaaguccaacaucauccgcggcuggaucuucgggacgacccucgacagcaagacccagucccugcugaucgugaacaacgccaccaacguggucaucaaggugugcgaguuccaguucugcaacgaccccuuccucggcguguacuaccacaagaacaacaagagcuggauggaguccgaguuccgggucuacagcuccgccaacaacugcacguucgaguacgugagccagcccuuccugauggaccuggagggcaagcaggggaacuucaagaaccuccgcgaguucguguucaagaacaucgacggcuacuucaagaucuacuccaagcacaccccgaucaaccugguccgggaccugccccagggguucagcgcccucgagccccugguggaccugcccaucggcaucaacaucacccgcuuccagacccuccuggcccugcaccgguccuaccucacgccgggggacagcagcuccggcuggaccgcgggcgccgccgccuacuacgugggguaccugcagccccgcaccuuccugcucaaguacaacgagaacggcaccaucacggacgcggucgacugcgcccuggacccccugagcgagaccaagugcacccucaaguccuucaccguggagaaggggaucuaccagacgagcaacuuccgggugcagcccaccgaguccaucguccgcuucccgaacaucaccaaccugugccccuucggcgagguguucaacgccacccgguucgccagcgucuacgccuggaaccgcaagcggaucuccaacugcguggcggacuacagcgugcuguacaacuccgccagcuucuccacguucaagugcuacggcgucagccccaccaagcucaacgaccugugcuucaccaacguguacgccgacuccuucgugauccgcggggacgagguccggcagaucgcccccggccagaccgggaagaucgccgacuacaacuacaagcugccggacgacuucacgggcugcgugaucgcguggaacagcaacaaccucgacuccaaggucgggggcaacuacaacuaccuguaccgccuguuccgcaagagcaaccucaagcccuucgagcgggacaucuccaccgagaucuaccaggccggcaacacccccugcaacgggguggagggcuucaacugcuacuucccccugcagagcuacggguuccagccgaccaacggcgugggguaccagcccuaccggguggucgugcuguccuucgagcuccugcacgcccccgccacggugugcggccccaagaaguccaccaaccuggucaagaacaagugcgugaacuucaacuucaacggccucaccgggaccggcgugcugaccgagagcaacaagaaguuccugccguuccagcaguucgggcgcgacaucgccgacacgaccgacgcgguccgcgacccccagacccuggagauccucgacaucacccccugcagcuucggcggggugagcgugaucacgccgggcaccaacaccuccaaccaggucgccgugcuguaccagggcgugaacugcaccgagguccccguggccauccacgccgaccagcugacgcccaccuggcggguguacagcaccggguccaacgucuuccagacccgcgccggcugccucaucggggcggagcacgugaacaacagcuacgagugcgacauccccaucggcgccggcaucugcgccuccuaccagacgcagaccaacagcccgcggcgcgcccgguccguggcgagccaguccaucaucgccuacaccaugagccugggggccgagaacuccgucgccuacagcaacaacuccaucgccauccccaccaacuucacgaucagcgugaccaccgagauccugcccguguccaugaccaagacgagcgucgacugcaccauguacaucugcggcgacagcaccgagugcuccaaccuccugcugcaguacgggagcuucugcacccagcucaaccgcgcgcugacgggcaucgccguggagcaggacaagaacacccaggagguguucgcccaggucaagcagaucuacaagacgcccccgaucaaggacuucgggggcuucaacuucucccagauccugcccgaccccagcaagcccuccaagcggagcuucaucgaggaccuccuguucaacaaggugacccuggccgacgccggcuucaucaagcaguacggggacugccucggcgacaucgcggcccgcgaccugaucugcgcccagaaguucaacgggcugaccgugcucccgccccugcugaccgacgagaugaucgcccaguacaccuccgcccuccuggcgggcaccaucacgagcggguggaccuucggcgccggcgccgcccugcagauccccuucgcgaugcagauggccuaccgguucaacgggaucggcgucacccagaacgugcucuacgagaaccagaagcugaucgccaaccaguucaacuccgccaucgggaagauccaggacagccuguccagcaccgccuccgcgcucggcaagcugcaggacguggucaaccagaacgcccaggcccugaacacgcucgugaagcagcugagcuccaacuucggggccaucagcuccgugcugaacgacauccucagccgccuggacaaggucgaggccgaggugcagaucgaccggcugaucaccggccgccuccagucccugcagaccuacgugacccagcagcugauccgggcggccgagauccgcgccagcgccaaccucgccgcgaccaagaugagcgagugcguccugggccaguccaagcggguggacuucugcgggaagggcuaccaccugaugagcuucccccaguccgccccgcacgggguggucuuccuccacgugacguacguccccgcccaggagaagaacuucaccaccgcccccgcgaucugccacgacggcaaggcccacuucccccgcgaggggguguucgugagcaacggcacccacugguucgucacgcagcggaacuucuacgagccgcagaucaucaccaccgacaacaccuucguguccggcaacugcgacguggucaucgggaucgugaacaacacgguguacgacccccugcagcccgagcuggacagcuucaaggaggagcucgacaaguacuucaagaaccacaccucccccgacgucgaccugggcgacaucagcgggaucaacgccuccguggugaacauccagaaggagaucgaccgccugaacgaggucgccaagaaccucaacgagagccugaucgaccugcaggagcucggcaaguacgagcaguacaucaaguggccgugguacaucuggcugggcuucaucgccgggcugaucgcgaucgugauggugaccaucaugcucugcugcaugaccuccugcugcagcugccugaagggcugcugcuccugcgggagcugcugcaaguucgacgaggacgacuccgagcccguccugaagggcgugaagcuccacuacacgugaggacuaguuauaagacugacuagcccgaugggccucccaacgggcccuccuccccuccuugcaccgagauuaauaaaaaaaaaaaaaaaaaaaaaaaaaaaaaaaaaaaaaaaaaaaaaaaaaaaaaaaaaaaaaaaaugcaucccccccccccccccccccccccccccccccaaaggcucuuuucagagccaccagaauu

SEQ ID NO: 23212 - RNA, 4039 nt, Artificial Sequence
  SARS-CoV-2/Wuhan/WIV05/2019__EPI_ISL_402128 spike protein mRNA gc (1-1273)(N501Y_D614G)
aggagaaagcuuaccauguucguguuccugguccuccugccccuggugagcucccagugcgugaaccucaccacccgcacgcagcugccgcccgccuacaccaacagcuucacccggggcgucuacuaccccgacaagguguuccgcuccagcgugcugcacuccacccaggaccucuuccugcccuucuucagcaacgucacgugguuccacgccauccacguguccgggaccaacggcaccaagcgguucgacaacccggugcugcccuucaacgacggggucuacuucgcgagcaccgagaaguccaacaucauccgcggcuggaucuucgggacgacccucgacagcaagacccagucccugcugaucgugaacaacgccaccaacguggucaucaaggugugcgaguuccaguucugcaacgaccccuuccucggcguguacuaccacaagaacaacaagagcuggauggaguccgaguuccgggucuacagcuccgccaacaacugcacguucgaguacgugagccagcccuuccugauggaccuggagggcaagcaggggaacuucaagaaccuccgcgaguucguguucaagaacaucgacggcuacuucaagaucuacuccaagcacaccccgaucaaccugguccgggaccugccccagggguucagcgcccucgagccccugguggaccugcccaucggcaucaacaucacccgcuuccagacccuccuggcccugcaccgguccuaccucacgccgggggacagcagcuccggcuggaccgcgggcgccgccgccuacuacgugggguaccugcagccccgcaccuuccugcucaaguacaacgagaacggcaccaucacggacgcggucgacugcgcccuggacccccugagcgagaccaagugcacccucaaguccuucaccguggagaaggggaucuaccagacgagcaacuuccgggugcagcccaccgaguccaucguccgcuucccgaacaucaccaaccugugccccuucggcgagguguucaacgccacccgguucgccagcgucuacgccuggaaccgcaagcggaucuccaacugcguggcggacuacagcgugcuguacaacuccgccagcuucuccacguucaagugcuacggcgucagccccaccaagcucaacgaccugugcuucaccaacguguacgccgacuccuucgugauccgcggggacgagguccggcagaucgcccccggccagaccgggaagaucgccgacuacaacuacaagcugccggacgacuucacgggcugcgugaucgcguggaacagcaacaaccucgacuccaaggucgggggcaacuacaacuaccuguaccgccuguuccgcaagagcaaccucaagcccuucgagcgggacaucuccaccgagaucuaccaggccggcagcacccccugcaacgggguggagggcuucaacugcuacuucccccugcaguccuacggguuccagccgaccuacggcgugggguaccagcccuaccggguggucgugcugagcuucgagcuccugcacgcccccgccacggugugcggccccaagaaguccaccaaccuggucaagaacaagugcgugaacuucaacuucaacggccucaccgggaccggcgugcugaccgagagcaacaagaaguuccugccguuccagcaguucgggcgcgacaucgccgacacgaccgacgcgguccgcgacccccagacccuggagauccucgacaucacccccugcagcuucggcgggguguccgugaucacgccgggcaccaacaccagcaaccaggucgccgugcuguaccagggcgugaacugcaccgagguccccguggccauccacgccgaccagcugacgcccaccuggcggguguacuccaccgggagcaacgucuuccagacccgcgccggcugccucaucggggcggagcacgugaacaacuccuacgagugcgacauccccaucggcgccggcaucugcgccagcuaccagacgcagaccaacuccccgcggcgcgcccggagcguggcgucccagagcaucaucgccuacaccaugucccugggggccgagaacagcgucgccuacuccaacaacagcaucgccauccccaccaacuucacgaucuccgugaccaccgagauccugcccgugagcaugaccaagacgagcgucgacugcaccauguacaucugcggcgacuccaccgagugcagcaaccuccugcugcaguacggguccuucugcacccagcucaaccgcgcgcugacgggcaucgccguggagcaggacaagaacacccaggagguguucgcccaggucaagcagaucuacaagacgcccccgaucaaggacuucgggggcuucaacuucagccagauccugcccgaccccuccaagcccagcaagcgguccuucaucgaggaccuccuguucaacaaggugacccuggccgacgccggcuucaucaagcaguacggggacugccucggcgacaucgcggcccgcgaccugaucugcgcccagaaguucaacgggcugaccgugcucccgccccugcugaccgacgagaugaucgcccaguacaccagcgcccuccuggcgggcaccaucacguccggguggaccuucggcgccggcgccgcccugcagauccccuucgcgaugcagauggccuaccgguucaacgggaucggcgucacccagaacgugcucuacgagaaccagaagcugaucgccaaccaguucaacagcgccaucgggaagauccaggacucccugagcuccaccgccagcgcgcucggcaagcugcaggacguggucaaccagaacgcccaggcccugaacacgcucgugaagcagcuguccagcaacuucggggccaucuccagcgugcugaacgacauccucucccgccuggacaaggucgaggccgaggugcagaucgaccggcugaucaccggccgccuccagagccugcagaccuacgugacccagcagcugauccgggcggccgagauccgcgccagcgccaaccucgccgcgaccaagauguccgagugcguccugggccagagcaagcggguggacuucugcgggaagggcuaccaccugauguccuucccccagagcgccccgcacgggguggucuuccuccacgugacguacguccccgcccaggagaagaacuucaccaccgcccccgcgaucugccacgacggcaaggcccacuucccccgcgaggggguguucguguccaacggcacccacugguucgucacgcagcggaacuucuacgagccgcagaucaucaccaccgacaacaccuucgugagcggcaacugcgacguggucaucgggaucgugaacaacacgguguacgacccccugcagcccgagcuggacuccuucaaggaggagcucgacaaguacuucaagaaccacaccagccccgacgucgaccugggcgacaucuccgggaucaacgccagcguggugaacauccagaaggagaucgaccgccugaacgaggucgccaagaaccucaacgagucccugaucgaccugcaggagcucggcaaguacgagcaguacaucaaguggccgugguacaucuggcugggcuucaucgccgggcugaucgcgaucgugauggugaccaucaugcucugcugcaugaccagcugcugcuccugccugaagggcugcugcagcugcggguccugcugcaaguucgacgaggacgacagcgagcccguccugaagggcgugaagcuccacuacacgugaggacuaguuauaagacugacuagcccgaugggccucccaacgggcccuccuccccuccuugcaccgagauuaauaaaaaaaaaaaaaaaaaaaaaaaaaaaaaaaaaaaaaaaaaaaaaaaaaaaaaaaaaaaaaaaaugcaucccccccccccccccccccccccccccccccaaaggcucuuuucagagccaccagaauu

SEQ ID NO: 23213 - RNA, 4033 nt, Artificial Sequence
  SARS-CoV-2/Wuhan/WIV05/2019__EPI_ISL_402128 spike protein mRNA gc (1-1273)(H69del_V70del_D614G)
aggagaaagcuuaccauguucguguuccugguccuccugccccuggugagcucccagugcgugaaccucaccacccgcacgcagcugccgcccgccuacaccaacagcuucacccggggcgucuacuaccccgacaagguguuccgcuccagcgugcugcacuccacccaggaccucuuccugcccuucuucagcaacgucacgugguuccacgccaucuccgggaccaacggcaccaagcgguucgacaacccggugcugcccuucaacgacgggguguacuucgcgagcaccgagaaguccaacaucauccgcggcuggaucuucgggacgacccucgacagcaagacccagucccugcugaucgucaacaacgccaccaacguggugaucaaggucugcgaguuccaguucugcaacgaccccuuccucggcguguacuaccacaagaacaacaagagcuggauggaguccgaguuccggguguacagcuccgccaacaacugcacguucgaguacgucagccagcccuuccugauggaccuggagggcaagcaggggaacuucaagaaccuccgcgaguucguguucaagaacaucgacggcuacuucaagaucuacuccaagcacaccccgaucaaccuggugcgggaccugccccagggguucagcgcccucgagccccuggucgaccugcccaucggcaucaacaucacccgcuuccagacccuccuggcccugcaccgguccuaccucacgccgggggacagcagcuccggcuggaccgcgggcgccgccgccuacuacgugggguaccugcagccccgcaccuuccugcucaaguacaacgagaacggcaccaucacggacgcgguggacugcgcccuggacccccugagcgagaccaagugcacccucaaguccuucaccgucgagaaggggaucuaccagacgagcaacuuccgggugcagcccaccgaguccaucgugcgcuucccgaacaucaccaaccugugccccuucggcgaggucuucaacgccacccgguucgccagcguguacgccuggaaccgcaagcggaucuccaacugcgucgcggacuacagcgugcuguacaacuccgccagcuucuccacguucaagugcuacggcgugagccccaccaagcucaacgaccugugcuucaccaacgucuacgccgacuccuucgugauccgcggggacgaggugcggcagaucgcccccggccagaccgggaagaucgccgacuacaacuacaagcugccggacgacuucacgggcugcgucaucgcguggaacagcaacaaccucgacuccaaggucgggggcaacuacaacuaccuguaccgccuguuccgcaagagcaaccucaagcccuucgagcgggacaucuccaccgagaucuaccaggccggcagcacccccugcaacgggguggagggcuucaacugcuacuucccccugcaguccuacggguuccagccgaccaacggcgugggguaccagcccuaccggguggugguccugagcuucgagcuccugcacgcccccgccacggugugcggccccaagaaguccaccaaccuggugaagaacaagugcgucaacuucaacuucaacggccucaccgggaccggcgugcugaccgagagcaacaagaaguuccugccguuccagcaguucgggcgcgacaucgccgacacgaccgacgcggugcgcgacccccagacccuggagauccucgacaucacccccugcagcuucggcggggucuccgugaucacgccgggcaccaacaccagcaaccagguggccguccuguaccagggcgugaacugcaccgaggugcccgucgccauccacgccgaccagcugacgcccaccuggcggguguacuccaccgggagcaacguguuccagacccgcgccggcugccucaucggggcggagcacgucaacaacuccuacgagugcgacauccccaucggcgccggcaucugcgccagcuaccagacgcagaccaacuccccgcggcgcgcccggagcguggcgucccagagcaucaucgccuacaccaugucccugggggccgagaacagcguggccuacuccaacaacagcaucgccauccccaccaacuucacgaucuccgucaccaccgagauccugcccgugagcaugaccaagacgagcguggacugcaccauguacaucugcggcgacuccaccgagugcagcaaccuccugcugcaguacggguccuucugcacccagcucaaccgcgcgcugacgggcaucgccgucgagcaggacaagaacacccaggagguguucgcccaggugaagcagaucuacaagacgcccccgaucaaggacuucgggggcuucaacuucagccagauccugcccgaccccuccaagcccagcaagcgguccuucaucgaggaccuccuguucaacaaggucacccuggccgacgccggcuucaucaagcaguacggggacugccucggcgacaucgcggcccgcgaccugaucugcgcccagaaguucaacgggcugaccgugcucccgccccugcugaccgacgagaugaucgcccaguacaccagcgcccuccuggcgggcaccaucacguccggguggaccuucggcgccggcgccgcccugcagauccccuucgcgaugcagauggccuaccgguucaacgggaucggcgugacccagaacguccucuacgagaaccagaagcugaucgccaaccaguucaacagcgccaucgggaagauccaggacucccugagcuccaccgccagcgcgcucggcaagcugcaggacguggugaaccagaacgcccaggcccugaacacgcucgucaagcagcuguccagcaacuucggggccaucuccagcgugcugaacgacauccucucccgccuggacaagguggaggccgagguccagaucgaccggcugaucaccggccgccuccagagccugcagaccuacgugacccagcagcugauccgggcggccgagauccgcgccagcgccaaccucgccgcgaccaagauguccgagugcgugcugggccagagcaagcgggucgacuucugcgggaagggcuaccaccugauguccuucccccagagcgccccgcacggggugguguuccuccacgucacguacgugcccgcccaggagaagaacuucaccaccgcccccgcgaucugccacgacggcaaggcccacuucccccgcgagggggucuucguguccaacggcacccacugguucgugacgcagcggaacuucuacgagccgcagaucaucaccaccgacaacaccuucgucagcggcaacugcgacguggugaucgggaucgucaacaacacgguguacgacccccugcagcccgagcuggacuccuucaaggaggagcucgacaaguacuucaagaaccacaccagccccgacguggaccugggcgacaucuccgggaucaacgccagcgucgugaacauccagaaggagaucgaccgccugaacgagguggccaagaaccucaacgagucccugaucgaccugcaggagcucggcaaguacgagcaguacaucaaguggccgugguacaucuggcugggcuucaucgccgggcugaucgcgaucgucauggugaccaucaugcucugcugcaugaccagcugcugcuccugccugaagggcugcugcagcugcggguccugcugcaaguucgacgaggacgacagcgagcccgugcugaagggcgucaagcuccacuacacgugaggacuaguuauaagacugacuagcccgaugggccucccaacgggcccuccuccccuccuugcaccgagauuaauaaaaaaaaaaaaaaaaaaaaaaaaaaaaaaaaaaaaaaaaaaaaaaaaaaaaaaaaaaaaaaaaugcaucccccccccccccccccccccccccccccccaaaggcucuuuucagagccaccagaauu

SEQ ID NO: 23214 - RNA, 4039 nt, Artificial Sequence
  SARS-CoV-2/Wuhan/WIV05/2019__EPI_ISL_402128 spike protein mRNA gc (1-1273)(Y453F_D614G)
aggagaaagcuuaccauguucguguuccugguccuccugccccuggugagcucccagugcgugaaccucaccacccgcacgcagcugccgcccgccuacaccaacagcuucacccggggcgucuacuaccccgacaagguguuccgcuccagcgugcugcacuccacccaggaccucuuccugcccuucuucagcaacgucacgugguuccacgccauccacguguccgggaccaacggcaccaagcgguucgacaacccggugcugcccuucaacgacggggucuacuucgcgagcaccgagaaguccaacaucauccgcggcuggaucuucgggacgacccucgacagcaagacccagucccugcugaucgugaacaacgccaccaacguggucaucaaggugugcgaguuccaguucugcaacgaccccuuccucggcguguacuaccacaagaacaacaagagcuggauggaguccgaguuccgggucuacagcuccgccaacaacugcacguucgaguacgugagccagcccuuccugauggaccuggagggcaagcaggggaacuucaagaaccuccgcgaguucguguucaagaacaucgacggcuacuucaagaucuacuccaagcacaccccgaucaaccugguccgggaccugccccagggguucagcgcccucgagccccugguggaccugcccaucggcaucaacaucacccgcuuccagacccuccuggcccugcaccgguccuaccucacgccgggggacagcagcuccggcuggaccgcgggcgccgccgccuacuacgugggguaccugcagccccgcaccuuccugcucaaguacaacgagaacggcaccaucacggacgcggucgacugcgcccuggacccccugagcgagaccaagugcacccucaaguccuucaccguggagaaggggaucuaccagacgagcaacuuccgggugcagcccaccgaguccaucguccgcuucccgaacaucaccaaccugugccccuucggcgagguguucaacgccacccgguucgccagcgucuacgccuggaaccgcaagcggaucuccaacugcguggcggacuacagcgugcuguacaacuccgccagcuucuccacguucaagugcuacggcgucagccccaccaagcucaacgaccugugcuucaccaacguguacgccgacuccuucgugauccgcggggacgagguccggcagaucgcccccggccagaccgggaagaucgccgacuacaacuacaagcugccggacgacuucacgggcugcgugaucgcguggaacagcaacaaccucgacuccaaggucgggggcaacuacaacuaccuguuccgccuguuccgcaagagcaaccucaagcccuucgagcgggacaucuccaccgagaucuaccaggccggcagcacccccugcaacgggguggagggcuucaacugcuacuucccccugcaguccuacggguuccagccgaccaacggcgugggguaccagcccuaccggguggucgugcugagcuucgagcuccugcacgcccccgccacggugugcggccccaagaaguccaccaaccuggucaagaacaagugcgugaacuucaacuucaacggccucaccgggaccggcgugcugaccgagagcaacaagaaguuccugccguuccagcaguucgggcgcgacaucgccgacacgaccgacgcgguccgcgacccccagacccuggagauccucgacaucacccccugcagcuucggcgggguguccgugaucacgccgggcaccaacaccagcaaccaggucgccgugcuguaccagggcgugaacugcaccgagguccccguggccauccacgccgaccagcugacgcccaccuggcggguguacuccaccgggagcaacgucuuccagacccgcgccggcugccucaucggggcggagcacgugaacaacuccuacgagugcgacauccccaucggcgccggcaucugcgccagcuaccagacgcagaccaacuccccgcggcgcgcccggagcguggcgucccagagcaucaucgccuacaccaugucccugggggccgagaacagcgucgccuacuccaacaacagcaucgccauccccaccaacuucacgaucuccgugaccaccgagauccugcccgugagcaugaccaagacgagcgucgacugcaccauguacaucugcggcgacuccaccgagugcagcaaccuccugcugcaguacggguccuucugcacccagcucaaccgcgcgcugacgggcaucgccguggagcaggacaagaacacccaggagguguucgcccaggucaagcagaucuacaagacgcccccgaucaaggacuucgggggcuucaacuucagccagauccugcccgaccccuccaagcccagcaagcgguccuucaucgaggaccuccuguucaacaaggugacccuggccgacgccggcuucaucaagcaguacggggacugccucggcgacaucgcggcccgcgaccugaucugcgcccagaaguucaacgggcugaccgugcucccgccccugcugaccgacgagaugaucgcccaguacaccagcgcccuccuggcgggcaccaucacguccggguggaccuucggcgccggcgccgcccugcagauccccuucgcgaugcagauggccuaccgguucaacgggaucggcgucacccagaacgugcucuacgagaaccagaagcugaucgccaaccaguucaacagcgccaucgggaagauccaggacucccugagcuccaccgccagcgcgcucggcaagcugcaggacguggucaaccagaacgcccaggcccugaacacgcucgugaagcagcuguccagcaacuucggggccaucuccagcgugcugaacgacauccucucccgccuggacaaggucgaggccgaggugcagaucgaccggcugaucaccggccgccuccagagccugcagaccuacgugacccagcagcugauccgggcggccgagauccgcgccagcgccaaccucgccgcgaccaagauguccgagugcguccugggccagagcaagcggguggacuucugcgggaagggcuaccaccugauguccuucccccagagcgccccgcacgggguggucuuccuccacgugacguacguccccgcccaggagaagaacuucaccaccgcccccgcgaucugccacgacggcaaggcccacuucccccgcgaggggguguucguguccaacggcacccacugguucgucacgcagcggaacuucuacgagccgcagaucaucaccaccgacaacaccuucgugagcggcaacugcgacguggucaucgggaucgugaacaacacgguguacgacccccugcagcccgagcuggacuccuucaaggaggagcucgacaaguacuucaagaaccacaccagccccgacgucgaccugggcgacaucuccgggaucaacgccagcguggugaacauccagaaggagaucgaccgccugaacgaggucgccaagaaccucaacgagucccugaucgaccugcaggagcucggcaaguacgagcaguacaucaaguggccgugguacaucuggcugggcuucaucgccgggcugaucgcgaucgugauggugaccaucaugcucugcugcaugaccagcugcugcuccugccugaagggcugcugcagcugcggguccugcugcaaguucgacgaggacgacagcgagcccguccugaagggcgugaagcuccacuacacgugaggacuaguuauaagacugacuagcccgaugggccucccaacgggcccuccuccccuccuugcaccgagauuaauaaaaaaaaaaaaaaaaaaaaaaaaaaaaaaaaaaaaaaaaaaaaaaaaaaaaaaaaaaaaaaaaugcaucccccccccccccccccccccccccccccccaaaggcucuuuucagagccaccagaauu

SEQ ID NO: 23215 - RNA, 4039 nt, Artificial Sequence
  SARS-CoV-2/Wuhan/WIV05/2019__EPI_ISL_402128 spike protein mRNA gc (1-1273)(D614G_I692V)
aggagaaagcuuaccauguucguguuccugguccuccugccccuggugagcucccagugcgugaaccucaccacccgcacgcagcugccgcccgccuacaccaacagcuucacccggggcgucuacuaccccgacaagguguuccgcuccagcgugcugcacuccacccaggaccucuuccugcccuucuucagcaacgucacgugguuccacgccauccacguguccgggaccaacggcaccaagcgguucgacaacccggugcugcccuucaacgacggggucuacuucgcgagcaccgagaaguccaacaucauccgcggcuggaucuucgggacgacccucgacagcaagacccagucccugcugaucgugaacaacgccaccaacguggucaucaaggugugcgaguuccaguucugcaacgaccccuuccucggcguguacuaccacaagaacaacaagagcuggauggaguccgaguuccgggucuacagcuccgccaacaacugcacguucgaguacgugagccagcccuuccugauggaccuggagggcaagcaggggaacuucaagaaccuccgcgaguucguguucaagaacaucgacggcuacuucaagaucuacuccaagcacaccccgaucaaccugguccgggaccugccccagggguucagcgcccucgagccccugguggaccugcccaucggcaucaacaucacccgcuuccagacccuccuggcccugcaccgguccuaccucacgccgggggacagcagcuccggcuggaccgcgggcgccgccgccuacuacgugggguaccugcagccccgcaccuuccugcucaaguacaacgagaacggcaccaucacggacgcggucgacugcgcccuggacccccugagcgagaccaagugcacccucaaguccuucaccguggagaaggggaucuaccagacgagcaacuuccgggugcagcccaccgaguccaucguccgcuucccgaacaucaccaaccugugccccuucggcgagguguucaacgccacccgguucgccagcgucuacgccuggaaccgcaagcggaucuccaacugcguggcggacuacagcgugcuguacaacuccgccagcuucuccacguucaagugcuacggcgucagccccaccaagcucaacgaccugugcuucaccaacguguacgccgacuccuucgugauccgcggggacgagguccggcagaucgcccccggccagaccgggaagaucgccgacuacaacuacaagcugccggacgacuucacgggcugcgugaucgcguggaacagcaacaaccucgacuccaaggucgggggcaacuacaacuaccuguaccgccuguuccgcaagagcaaccucaagcccuucgagcgggacaucuccaccgagaucuaccaggccggcagcacccccugcaacgggguggagggcuucaacugcuacuucccccugcaguccuacggguuccagccgaccaacggcgugggguaccagcccuaccggguggucgugcugagcuucgagcuccugcacgcccccgccacggugugcggccccaagaaguccaccaaccuggucaagaacaagugcgugaacuucaacuucaacggccucaccgggaccggcgugcugaccgagagcaacaagaaguuccugccguuccagcaguucgggcgcgacaucgccgacacgaccgacgcgguccgcgacccccagacccuggagauccucgacaucacccccugcagcuucggcgggguguccgugaucacgccgggcaccaacaccagcaaccaggucgccgugcuguaccagggcgugaacugcaccgagguccccguggccauccacgccgaccagcugacgcccaccuggcggguguacuccaccgggagcaacgucuuccagacccgcgccggcugccucaucggggcggagcacgugaacaacuccuacgagugcgacauccccaucggcgccggcaucugcgccagcuaccagacgcagaccaacuccccgcggcgcgcccggagcguggcgucccagagcgucaucgccuacaccaugucccugggggccgagaacagcguggccuacuccaacaacagcaucgccauccccaccaacuucacgaucuccgugaccaccgagauccugcccgucagcaugaccaagacgagcguggacugcaccauguacaucugcggcgacuccaccgagugcagcaaccuccugcugcaguacggguccuucugcacccagcucaaccgcgcgcugacgggcaucgccguggagcaggacaagaacacccaggaggucuucgcccaggugaagcagaucuacaagacgcccccgaucaaggacuucgggggcuucaacuucagccagauccugcccgaccccuccaagcccagcaagcgguccuucaucgaggaccuccuguucaacaaggugacccuggccgacgccggcuucaucaagcaguacggggacugccucggcgacaucgcggcccgcgaccugaucugcgcccagaaguucaacgggcugaccguccucccgccccugcugaccgacgagaugaucgcccaguacaccagcgcccuccuggcgggcaccaucacguccggguggaccuucggcgccggcgccgcccugcagauccccuucgcgaugcagauggccuaccgguucaacgggaucggcgugacccagaacgugcucuacgagaaccagaagcugaucgccaaccaguucaacagcgccaucgggaagauccaggacucccugagcuccaccgccagcgcgcucggcaagcugcaggacgucgugaaccagaacgcccaggcccugaacacgcucgugaagcagcuguccagcaacuucggggccaucuccagcguccugaacgacauccucucccgccuggacaagguggaggccgaggugcagaucgaccggcugaucaccggccgccuccagagccugcagaccuacgucacccagcagcugauccgggcggccgagauccgcgccagcgccaaccucgccgcgaccaagauguccgagugcgugcugggccagagcaagcggguggacuucugcgggaagggcuaccaccugauguccuucccccagagcgccccgcacggggucguguuccuccacgucacguacgugcccgcccaggagaagaacuucaccaccgcccccgcgaucugccacgacggcaaggcccacuucccccgcgaggggguguucgucuccaacggcacccacugguucgugacgcagcggaacuucuacgagccgcagaucaucaccaccgacaacaccuucgugagcggcaacugcgacgucgugaucgggaucgugaacaacacggucuacgacccccugcagcccgagcuggacuccuucaaggaggagcucgacaaguacuucaagaaccacaccagccccgacguggaccugggcgacaucuccgggaucaacgccagcguggucaacauccagaaggagaucgaccgccugaacgagguggccaagaaccucaacgagucccugaucgaccugcaggagcucggcaaguacgagcaguacaucaaguggccgugguacaucuggcugggcuucaucgccgggcugaucgcgaucgugauggucaccaucaugcucugcugcaugaccagcugcugcuccugccugaagggcugcugcagcugcggguccugcugcaaguucgacgaggacgacagcgagcccgugcugaagggcgugaagcuccacuacacgugaggacuaguuauaagacugacuagcccgaugggccucccaacgggcccuccuccccuccuugcaccgagauuaauaaaaaaaaaaaaaaaaaaaaaaaaaaaaaaaaaaaaaaaaaaaaaaaaaaaaaaaaaaaaaaaaugcaucccccccccccccccccccccccccccccccaaaggcucuuuucagagccaccagaauu

SEQ ID NO: 23216 - RNA, 4039 nt, Artificial Sequence; identical to SEQ ID NO: 12796
  SARS-CoV-2/Wuhan/WIV05/2019__EPI_ISL_402128 spike protein mRNA gc (1-1273)(D614G_M1229I)

SEQ ID NO: 23217 - RNA, 4033 nt, Artificial Sequence
  SARS-CoV-2/Wuhan/WIV05/2019__EPI_ISL_402128 spike protein mRNA gc (1-1273)(H69del_V70del_A222V_Y453F_S477N_D614G_I692V)
aggagaaagcuuaccauguucguguuccugguccuccugccccuggugagcucccagugcgugaaccucaccacccgcacgcagcugccgcccgccuacaccaacagcuucacccggggcgucuacuaccccgacaagguguuccgcuccagcgugcugcacuccacccaggaccucuuccugcccuucuucagcaacgucacgugguuccacgccaucuccgggaccaacggcaccaagcgguucgacaacccggugcugcccuucaacgacgggguguacuucgcgagcaccgagaaguccaacaucauccgcggcuggaucuucgggacgacccucgacagcaagacccagucccugcugaucgucaacaacgccaccaacguggugaucaaggucugcgaguuccaguucugcaacgaccccuuccucggcguguacuaccacaagaacaacaagagcuggauggaguccgaguuccggguguacagcuccgccaacaacugcacguucgaguacgucagccagcccuuccugauggaccuggagggcaagcaggggaacuucaagaaccuccgcgaguucguguucaagaacaucgacggcuacuucaagaucuacuccaagcacaccccgaucaaccuggugcgggaccugccccagggguucagcguccucgagccccugguggaccugcccaucggcaucaacaucacccgcuuccagacccuccuggcccugcaccgguccuaccucacgccgggggacagcagcuccggcuggaccgccggcgcggccgccuacuacgugggguaccugcagccccgcaccuuccugcucaaguacaacgagaacggcaccaucacggacgccgucgacugcgcgcuggacccccugagcgagaccaagugcacccucaaguccuucaccguggagaaggggaucuaccagacgagcaacuuccgggugcagcccaccgaguccaucguccgcuucccgaacaucaccaaccugugccccuucggcgagguguucaacgccacccgguucgccagcgucuacgccuggaaccgcaagcggaucuccaacugcguggccgacuacagcgugcuguacaacuccgcgagcuucuccacguucaagugcuacggcgucagccccaccaagcucaacgaccugugcuucaccaacguguacgccgacuccuucgugauccgcggggacgagguccggcagaucgcccccggccagaccgggaagaucgccgacuacaacuacaagcugccggacgacuucacgggcugcgugaucgccuggaacagcaacaaccucgacuccaaggucgggggcaacuacaacuaccuguuccgccuguuccgcaagagcaaccucaagcccuucgagcgggacaucuccaccgagaucuaccaggcgggcaacacccccugcaacgggguggagggcuucaacugcuacuucccccugcagagcuacggguuccagccgaccaacggcgugggguaccagcccuaccggguggucgugcuguccuucgagcuccugcacgcccccgccacggugugcggccccaagaaguccaccaaccuggucaagaacaagugcgugaacuucaacuucaacggccucaccgggaccggcgugcugaccgagagcaacaagaaguuccugccguuccagcaguucgggcgcgacaucgccgacacgaccgacgccguccgcgacccccagacccuggagauccucgacaucacccccugcagcuucggcggggugagcgugaucacgccgggcaccaacaccuccaaccaggucgcggugcuguaccagggcgugaacugcaccgagguccccguggccauccacgccgaccagcugacgcccaccuggcggguguacagcaccggguccaacgucuuccagacccgcgccggcugccucaucggggccgagcacgugaacaacagcuacgagugcgacauccccaucggcgcgggcaucugcgccuccuaccagacgcagaccaacagcccgcggcgcgcccgguccguggccagccaguccgucaucgcguacaccaugagccugggggccgagaacuccguggccuacagcaacaacuccaucgccauccccaccaacuucacgaucagcgugaccaccgagauccugcccgucuccaugaccaagacgagcguggacugcaccauguacaucugcggcgacagcaccgagugcuccaaccuccugcugcaguacgggagcuucugcacccagcucaaccgcgcccugacgggcaucgcgguggagcaggacaagaacacccaggaggucuucgcccaggugaagcagaucuacaagacgcccccgaucaaggacuucgggggcuucaacuucucccagauccugcccgaccccagcaagcccuccaagcggagcuucaucgaggaccuccuguucaacaaggugacccuggccgacgccggcuucaucaagcaguacggggacugccucggcgacaucgccgcgcgcgaccugaucugcgcccagaaguucaacgggcugaccguccucccgccccugcugaccgacgagaugaucgcccaguacaccuccgcccuccuggccggcaccaucacgagcggguggaccuucggcgcgggcgccgcccugcagauccccuucgccaugcagauggcguaccgguucaacgggaucggcgugacccagaacgugcucuacgagaaccagaagcugaucgccaaccaguucaacuccgccaucgggaagauccaggacagccuguccagcaccgccuccgcccucggcaagcugcaggacgucgugaaccagaacgcgcaggcccugaacacgcucgugaagcagcugagcuccaacuucggggccaucagcuccguccugaacgacauccucagccgccuggacaagguggaggccgaggugcagaucgaccggcugaucaccggccgccuccagucccugcagaccuacgucacccagcagcugauccgggccgcggagauccgcgccagcgccaaccucgccgccaccaagaugagcgagugcgugcugggccaguccaagcggguggacuucugcgggaagggcuaccaccugaugagcuucccccaguccgcgccgcacggggucguguuccuccacgucacguacgugcccgcccaggagaagaacuucaccaccgcccccgccaucugccacgacggcaaggcgcacuucccccgcgaggggguguucgucagcaacggcacccacugguucgugacgcagcggaacuucuacgagccgcagaucaucaccaccgacaacaccuucguguccggcaacugcgacgucgugaucgggaucgugaacaacacggucuacgacccccugcagcccgagcuggacagcuucaaggaggagcucgacaaguacuucaagaaccacaccucccccgacguggaccugggcgacaucagcgggaucaacgccuccguggucaacauccagaaggagaucgaccgccugaacgagguggccaagaaccucaacgagagccugaucgaccugcaggagcucggcaaguacgagcaguacaucaaguggccgugguacaucuggcugggcuucaucgccgggcugaucgccaucgugauggucaccaucaugcucugcugcaugaccuccugcugcagcugccugaagggcugcugcuccugcgggagcugcugcaaguucgacgaggacgacuccgagcccgugcugaagggcgugaagcuccacuacacgugaggacuaguuauaagacugacuagcccgaugggccucccaacgggcccuccuccccuccuugcaccgagauuaauaaaaaaaaaaaaaaaaaaaaaaaaaaaaaaaaaaaaaaaaaaaaaaaaaaaaaaaaaaaaaaaaugcaucccccccccccccccccccccccccccccccaaaggcucuuuucagagccaccagaauu

SEQ ID NO: 23218 - RNA, 4033 nt, Artificial Sequence
  SARS-CoV-2/Wuhan/WIV05/2019__EPI_ISL_402128 spike protein mRNA gc (1-1273)(H69del_V70del_Y453F_D614G_I692V_M1229I)
aggagaaagcuuaccauguucguguuccugguccuccugccccuggugagcucccagugcgugaaccucaccacccgcacgcagcugccgcccgccuacaccaacagcuucacccggggcgucuacuaccccgacaagguguuccgcuccagcgugcugcacuccacccaggaccucuuccugcccuucuucagcaacgucacgugguuccacgccaucuccgggaccaacggcaccaagcgguucgacaacccggugcugcccuucaacgacgggguguacuucgcgagcaccgagaaguccaacaucauccgcggcuggaucuucgggacgacccucgacagcaagacccagucccugcugaucgucaacaacgccaccaacguggugaucaaggucugcgaguuccaguucugcaacgaccccuuccucggcguguacuaccacaagaacaacaagagcuggauggaguccgaguuccggguguacagcuccgccaacaacugcacguucgaguacgucagccagcccuuccugauggaccuggagggcaagcaggggaacuucaagaaccuccgcgaguucguguucaagaacaucgacggcuacuucaagaucuacuccaagcacaccccgaucaaccuggugcgggaccugccccagggguucagcgcccucgagccccuggucgaccugcccaucggcaucaacaucacccgcuuccagacccuccuggcccugcaccgguccuaccucacgccgggggacagcagcuccggcuggaccgcgggcgccgccgccuacuacgugggguaccugcagccccgcaccuuccugcucaaguacaacgagaacggcaccaucacggacgcgguggacugcgcccuggacccccugagcgagaccaagugcacccucaaguccuucaccgucgagaaggggaucuaccagacgagcaacuuccgggugcagcccaccgaguccaucgugcgcuucccgaacaucaccaaccugugccccuucggcgaggucuucaacgccacccgguucgccagcguguacgccuggaaccgcaagcggaucuccaacugcgucgcggacuacagcgugcuguacaacuccgccagcuucuccacguucaagugcuacggcgugagccccaccaagcucaacgaccugugcuucaccaacgucuacgccgacuccuucgugauccgcggggacgaggugcggcagaucgcccccggccagaccgggaagaucgccgacuacaacuacaagcugccggacgacuucacgggcugcgucaucgcguggaacagcaacaaccucgacuccaaggucgggggcaacuacaacuaccuguuccgccuguuccgcaagagcaaccucaagcccuucgagcgggacaucuccaccgagaucuaccaggccggcagcacccccugcaacgggguggagggcuucaacugcuacuucccccugcaguccuacggguuccagccgaccaacggcgugggguaccagcccuaccggguggugguccugagcuucgagcuccugcacgcccccgccacggugugcggccccaagaaguccaccaaccuggugaagaacaagugcgucaacuucaacuucaacggccucaccgggaccggcgugcugaccgagagcaacaagaaguuccugccguuccagcaguucgggcgcgacaucgccgacacgaccgacgcggugcgcgacccccagacccuggagauccucgacaucacccccugcagcuucggcggggucuccgugaucacgccgggcaccaacaccagcaaccagguggccguccuguaccagggcgugaacugcaccgaggugcccgucgccauccacgccgaccagcugacgcccaccuggcggguguacuccaccgggagcaacguguuccagacccgcgccggcugccucaucggggcggagcacgucaacaacuccuacgagugcgacauccccaucggcgccggcaucugcgccagcuaccagacgcagaccaacuccccgcggcgcgcccggagcguggcgucccagagcgugaucgccuacaccaugucccugggggccgagaacagcgucgccuacuccaacaacagcaucgccauccccaccaacuucacgaucuccgugaccaccgagauccugcccgugagcaugaccaagacgagcgucgacugcaccauguacaucugcggcgacuccaccgagugcagcaaccuccugcugcaguacggguccuucugcacccagcucaaccgcgcgcugacgggcaucgccguggagcaggacaagaacacccaggagguguucgcccaggucaagcagaucuacaagacgcccccgaucaaggacuucgggggcuucaacuucagccagauccugcccgaccccuccaagcccagcaagcgguccuucaucgaggaccuccuguucaacaaggugacccuggccgacgccggcuucaucaagcaguacggggacugccucggcgacaucgcggcccgcgaccugaucugcgcccagaaguucaacgggcugaccgugcucccgccccugcugaccgacgagaugaucgcccaguacaccagcgcccuccuggcgggcaccaucacguccggguggaccuucggcgccggcgccgcccugcagauccccuucgcgaugcagauggccuaccgguucaacgggaucggcgucacccagaacgugcucuacgagaaccagaagcugaucgccaaccaguucaacagcgccaucgggaagauccaggacucccugagcuccaccgccagcgcgcucggcaagcugcaggacguggucaaccagaacgcccaggcccugaacacgcucgugaagcagcuguccagcaacuucggggccaucuccagcgugcugaacgacauccucucccgccuggacaaggucgaggccgaggugcagaucgaccggcugaucaccggccgccuccagagccugcagaccuacgugacccagcagcugauccgggcggccgagauccgcgccagcgccaaccucgccgcgaccaagauguccgagugcguccugggccagagcaagcggguggacuucugcgggaagggcuaccaccugauguccuucccccagagcgccccgcacgggguggucuuccuccacgugacguacguccccgcccaggagaagaacuucaccaccgcccccgcgaucugccacgacggcaaggcccacuucccccgcgaggggguguucguguccaacggcacccacugguucgucacgcagcggaacuucuacgagccgcagaucaucaccaccgacaacaccuucgugagcggcaacugcgacguggucaucgggaucgugaacaacacgguguacgacccccugcagcccgagcuggacuccuucaaggaggagcucgacaaguacuucaagaaccacaccagccccgacgucgaccugggcgacaucuccgggaucaacgccagcguggugaacauccagaaggagaucgaccgccugaacgaggucgccaagaaccucaacgagucccugaucgaccugcaggagcucggcaaguacgagcaguacaucaaguggccgugguacaucuggcugggcuucaucgccgggcugaucgcgaucgugaucgugaccaucaugcucugcugcaugaccagcugcugcuccugccugaagggcugcugcagcugcggguccugcugcaaguucgacgaggacgacagcgagcccguccugaagggcgugaagcuccacuacacgugaggacuaguuauaagacugacuagcccgaugggccucccaacgggcccuccuccccuccuugcaccgagauuaauaaaaaaaaaaaaaaaaaaaaaaaaaaaaaaaaaaaaaaaaaaaaaaaaaaaaaaaaaaaaaaaaugcaucccccccccccccccccccccccccccccccaaaggcucuuuucagagccaccagaauu

SEQ ID NO: 23219 - RNA, 4030 nt, Artificial Sequence
  SARS-CoV-2/Wuhan/WIV05/2019__EPI_ISL_402128 spike protein mRNA gc (1-1273)(H69del_V70del_Y144del_N501Y_A570D_D614G_P681H_T716I_S982 A_D1118H)
aggagaaagcuuaccauguucguguuccugguccuccugccccuggugagcucccagugcgugaaccucaccacccgcacgcagcugccgcccgccuacaccaacagcuucacccggggcgucuacuaccccgacaagguguuccgcuccagcgugcugcacuccacccaggaccucuuccugcccuucuucagcaacgucacgugguuccacgccaucuccgggaccaacggcaccaagcgguucgacaacccggugcugcccuucaacgacgggguguacuucgcgagcaccgagaaguccaacaucauccgcggcuggaucuucgggacgacccucgacagcaagacccagucccugcugaucgucaacaacgccaccaacguggugaucaaggucugcgaguuccaguucugcaacgaccccuuccucggcguguaccacaagaacaacaagagcuggauggaguccgaguuccggguguacagcuccgccaacaacugcacguucgaguacgucagccagcccuuccugauggaccuggagggcaagcaggggaacuucaagaaccuccgcgaguucguguucaagaacaucgacggcuacuucaagaucuacuccaagcacaccccgaucaaccuggugcgggaccugccccagggguucagcgcccucgagccccuggucgaccugcccaucggcaucaacaucacccgcuuccagacccuccuggcccugcaccgguccuaccucacgccgggggacagcagcuccggcuggaccgcgggcgccgccgccuacuacgugggguaccugcagccccgcaccuuccugcucaaguacaacgagaacggcaccaucacggacgcgguggacugcgcccuggacccccugagcgagaccaagugcacccucaaguccuucaccgucgagaaggggaucuaccagacgagcaacuuccgggugcagcccaccgaguccaucgugcgcuucccgaacaucaccaaccugugccccuucggcgaggucuucaacgccacccgguucgccagcguguacgccuggaaccgcaagcggaucuccaacugcgucgcggacuacagcgugcuguacaacuccgccagcuucuccacguucaagugcuacggcgugagccccaccaagcucaacgaccugugcuucaccaacgucuacgccgacuccuucgugauccgcggggacgaggugcggcagaucgcccccggccagaccgggaagaucgccgacuacaacuacaagcugccggacgacuucacgggcugcgucaucgcguggaacagcaacaaccucgacuccaaggucgggggcaacuacaacuaccuguaccgccuguuccgcaagagcaaccucaagcccuucgagcgggacaucuccaccgagaucuaccaggccggcagcacccccugcaacgggguggagggcuucaacugcuacuucccccugcaguccuacggguuccagccgaccuacggcgugggguaccagcccuaccggguggugguccugagcuucgagcuccugcacgcccccgccacggugugcggccccaagaaguccaccaaccuggugaagaacaagugcgucaacuucaacuucaacggccucaccgggaccggcgugcugaccgagagcaacaagaaguuccugccguuccagcaguucgggcgcgacaucgacgacacgaccgacgccgugcgcgacccccagacccuggagauccucgacaucacccccugcagcuucggcggggucuccgugaucacgccgggcaccaacaccagcaaccagguggcgguccuguaccagggcgugaacugcaccgaggugcccgucgccauccacgccgaccagcugacgcccaccuggcggguguacuccaccgggagcaacguguuccagacccgcgccggcugccucaucggggccgagcacgucaacaacuccuacgagugcgacauccccaucggcgcgggcaucugcgccagcuaccagacgcagaccaacucccaccggcgcgcccggagcguggccucccagagcaucaucgcguacaccaugucccugggggccgagaacagcguggccuacuccaacaacagcaucgccaucccgaucaacuucaccaucuccgucacgaccgagauccugcccgugagcaugaccaagaccagcguggacugcacgauguacaucugcggcgacuccaccgagugcagcaaccuccugcugcaguacggguccuucugcacccagcucaaccgcgcccugaccggcaucgcggucgagcaggacaagaacacgcaggagguguucgcccaggugaagcagaucuacaagaccccgcccaucaaggacuucgggggcuucaacuucagccagauccugcccgaccccuccaagcccagcaagcgguccuucaucgaggaccuccuguucaacaaggucacccuggccgacgccggcuucaucaagcaguacggggacugccucggcgacaucgccgcgcgcgaccugaucugcgcccagaaguucaacgggcugaccgugcugcccccgcuccugacggacgagaugaucgcccaguacaccagcgcccuccuggccggcaccaucaccuccggguggacguucggcgcgggcgccgcccugcagauccccuucgccaugcagauggcguaccgguucaacgggaucggcgugacccagaacguccucuacgagaaccagaagcugaucgccaaccaguucaacagcgccaucgggaagauccaggacucccugagcuccaccgccagcgcccucggcaagcugcaggacguggugaaccagaacgcgcaggcccugaacacccucgucaagcagcuguccagcaacuucggggccaucuccagcgugcugaacgacauccucgcccgccuggacaagguggaggccgagguccagaucgaccggcugaucacgggccgccuccagucccugcagaccuacgugacccagcagcugauccgggcggccgagauccgcgccagcgccaaccucgccgcgaccaagaugagcgagugcgugcugggccaguccaagcgggucgacuucugcgggaagggcuaccaccugaugagcuucccccaguccgcgccccacggggugguguuccuccacgucaccuacgugccggcccaggagaagaacuucacgaccgcccccgccaucugccacgacggcaaggcccacuucccccgcgagggggucuucgugagcaacggcacccacugguucgugacccagcggaacuucuacgagccccagaucaucacgacccacaacaccuucgucuccggcaacugcgacguggugaucgggaucgucaacaacaccguguacgacccgcugcagcccgagcuggacagcuucaaggaggagcucgacaaguacuucaagaaccacacgucccccgacguggaccugggcgacaucagcgggaucaacgccuccgucgugaacauccagaaggagaucgaccgccugaacgagguggccaagaaccucaacgagagccugaucgaccugcaggagcucggcaaguacgagcaguacaucaaguggcccugguacaucuggcugggcuucaucgccgggcugaucgcgaucgucauggugaccaucaugcucugcugcaugaccuccugcugcagcugccugaagggcugcugcuccugcgggagcugcugcaaguucgacgaggacgacuccgagccggugcugaagggcgucaagcuccacuacaccugaggacuaguuauaagacugacuagcccgaugggccucccaacgggcccuccuccccuccuugcaccgagauuaauaaaaaaaaaaaaaaaaaaaaaaaaaaaaaaaaaaaaaaaaaaaaaaaaaaaaaaaaaaaaaaaaugcaucccccccccccccccccccccccccccccccaaaggcucuuuucagagccaccagaauu

SEQ ID NO: 23220 - RNA, 4039 nt, Artificial Sequence
  SARS-CoV-2/Wuhan/WIV05/2019__EPI_ISL_402128 spike protein mRNA gc (1-1273)(K417N_E484K_N501Y_D614G)
aggagaaagcuuaccauguucguguuccugguccuccugccccuggugagcucccagugcgugaaccucaccacccgcacgcagcugccgcccgccuacaccaacagcuucacccggggcgucuacuaccccgacaagguguuccgcuccagcgugcugcacuccacccaggaccucuuccugcccuucuucagcaacgucacgugguuccacgccauccacguguccgggaccaacggcaccaagcgguucgacaacccggugcugcccuucaacgacggggucuacuucgcgagcaccgagaaguccaacaucauccgcggcuggaucuucgggacgacccucgacagcaagacccagucccugcugaucgugaacaacgccaccaacguggucaucaaggugugcgaguuccaguucugcaacgaccccuuccucggcguguacuaccacaagaacaacaagagcuggauggaguccgaguuccgggucuacagcuccgccaacaacugcacguucgaguacgugagccagcccuuccugauggaccuggagggcaagcaggggaacuucaagaaccuccgcgaguucguguucaagaacaucgacggcuacuucaagaucuacuccaagcacaccccgaucaaccugguccgggaccugccccagggguucagcgcccucgagccccugguggaccugcccaucggcaucaacaucacccgcuuccagacccuccuggcccugcaccgguccuaccucacgccgggggacagcagcuccggcuggaccgcgggcgccgccgccuacuacgugggguaccugcagccccgcaccuuccugcucaaguacaacgagaacggcaccaucacggacgcggucgacugcgcccuggacccccugagcgagaccaagugcacccucaaguccuucaccguggagaaggggaucuaccagacgagcaacuuccgggugcagcccaccgaguccaucguccgcuucccgaacaucaccaaccugugccccuucggcgagguguucaacgccacccgguucgccagcgucuacgccuggaaccgcaagcggaucuccaacugcguggcggacuacagcgugcuguacaacuccgccagcuucuccacguucaagugcuacggcgucagccccaccaagcucaacgaccugugcuucaccaacguguacgccgacuccuucgugauccgcggggacgagguccggcagaucgcccccggccagaccgggaacaucgccgacuacaacuacaagcugccggacgacuucacgggcugcgugaucgcguggaacagcaacaaccucgacuccaaggucgggggcaacuacaacuaccuguaccgccuguuccgcaagagcaaccucaagcccuucgagcgggacaucuccaccgagaucuaccaggccggcagcacccccugcaacggggugaagggcuucaacugcuacuucccccugcaguccuacggguuccagccgaccuacggcgugggguaccagcccuaccggguggucgugcugagcuucgagcuccugcacgcccccgccacggugugcggccccaagaaguccaccaaccuggucaagaacaagugcgugaacuucaacuucaacggccucaccgggaccggcgugcugaccgagagcaacaagaaguuccugccguuccagcaguucgggcgcgacaucgccgacacgaccgacgcgguccgcgacccccagacccuggagauccucgacaucacccccugcagcuucggcgggguguccgugaucacgccgggcaccaacaccagcaaccaggucgccgugcuguaccagggcgugaacugcaccgagguccccguggccauccacgccgaccagcugacgcccaccuggcggguguacuccaccgggagcaacgucuuccagacccgcgccggcugccucaucggggcggagcacgugaacaacuccuacgagugcgacauccccaucggcgccggcaucugcgccagcuaccagacgcagaccaacuccccgcggcgcgcccggagcguggcgucccagagcaucaucgccuacaccaugucccugggggccgagaacagcgucgccuacuccaacaacagcaucgccauccccaccaacuucacgaucuccgugaccaccgagauccugcccgugagcaugaccaagacgagcgucgacugcaccauguacaucugcggcgacuccaccgagugcagcaaccuccugcugcaguacggguccuucugcacccagcucaaccgcgcgcugacgggcaucgccguggagcaggacaagaacacccaggagguguucgcccaggucaagcagaucuacaagacgcccccgaucaaggacuucgggggcuucaacuucagccagauccugcccgaccccuccaagcccagcaagcgguccuucaucgaggaccuccuguucaacaaggugacccuggccgacgccggcuucaucaagcaguacggggacugccucggcgacaucgcggcccgcgaccugaucugcgcccagaaguucaacgggcugaccgugcucccgccccugcugaccgacgagaugaucgcccaguacaccagcgcccuccuggcgggcaccaucacguccggguggaccuucggcgccggcgccgcccugcagauccccuucgcgaugcagauggccuaccgguucaacgggaucggcgucacccagaacgugcucuacgagaaccagaagcugaucgccaaccaguucaacagcgccaucgggaagauccaggacucccugagcuccaccgccagcgcgcucggcaagcugcaggacguggucaaccagaacgcccaggcccugaacacgcucgugaagcagcuguccagcaacuucggggccaucuccagcgugcugaacgacauccucucccgccuggacaaggucgaggccgaggugcagaucgaccggcugaucaccggccgccuccagagccugcagaccuacgugacccagcagcugauccgggcggccgagauccgcgccagcgccaaccucgccgcgaccaagauguccgagugcguccugggccagagcaagcggguggacuucugcgggaagggcuaccaccugauguccuucccccagagcgccccgcacgggguggucuuccuccacgugacguacguccccgcccaggagaagaacuucaccaccgcccccgcgaucugccacgacggcaaggcccacuucccccgcgaggggguguucguguccaacggcacccacugguucgucacgcagcggaacuucuacgagccgcagaucaucaccaccgacaacaccuucgugagcggcaacugcgacguggucaucgggaucgugaacaacacgguguacgacccccugcagcccgagcuggacuccuucaaggaggagcucgacaaguacuucaagaaccacaccagccccgacgucgaccugggcgacaucuccgggaucaacgccagcguggugaacauccagaaggagaucgaccgccugaacgaggucgccaagaaccucaacgagucccugaucgaccugcaggagcucggcaaguacgagcaguacaucaaguggccgugguacaucuggcugggcuucaucgccgggcugaucgcgaucgugauggugaccaucaugcucugcugcaugaccagcugcugcuccugccugaagggcugcugcagcugcggguccugcugcaaguucgacgaggacgacagcgagcccguccugaagggcgugaagcuccacuacacgugaggacuaguuauaagacugacuagcccgaugggccucccaacgggcccuccuccccuccuugcaccgagauuaauaaaaaaaaaaaaaaaaaaaaaaaaaaaaaaaaaaaaaaaaaaaaaaaaaaaaaaaaaaaaaaaaugcaucccccccccccccccccccccccccccccccaaaggcucuuuucagagccaccagaauu

SEQ ID NO: 23221 - RNA, 4030 nt, Artificial Sequence
  SARS-CoV-2/Wuhan/WIV05/2019__EPI_ISL_402128 spike protein mRNA gc (1-1273)(L18F_D80A_D215G_L242del_A243del_L244del_R246I_K417N_E484 K_N501Y_D614G_A701V)
aggagaaagcuuaccauguucguguuccugguccuccugccccuggugagcucccagugcgugaacuucaccacccgcacgcagcucccgcccgccuacaccaacagcuucacccggggcgucuacuaccccgacaagguguuccgcuccagcgugcugcacuccacccaggaccuguuccuccccuucuucagcaacgucacgugguuccacgccauccacguguccgggaccaacggcaccaagcgguucgcgaacccggugcugcccuucaacgacggggucuacuucgccagcaccgagaaguccaacaucauccgcggcuggaucuucgggacgacccuggacagcaagacccagucccuccugaucgugaacaacgccaccaacguggucaucaaggugugcgaguuccaguucugcaacgaccccuuccugggcguguacuaccacaagaacaacaagagcuggauggaguccgaguuccgggucuacagcuccgccaacaacugcacguucgaguacgugagccagcccuuccucauggaccuggagggcaagcaggggaacuucaagaaccugcgcgaguucguguucaagaacaucgacggcuacuucaagaucuacuccaagcacaccccgaucaaccucguccgggggcugccccagggcuucagcgcccuggagccccucguggaccugcccaucgggaucaacaucacccgcuuccagacccugcacaucuccuaccucacgccgggcgacagcagcuccggcuggaccgcgggggccgccgccuacuacgugggcuaccugcagccccggaccuuccugcucaaguacaacgagaacgggaccaucacggacgcggucgacugcgcccuggacccccugagcgagaccaagugcacccucaaguccuucaccguggagaagggcaucuaccagacgagcaacuuccgcgugcagcccaccgaguccaucguccgguucccgaacaucaccaaccugugccccuucggcgagguguucaacgccacccgcuucgccagcgucuacgccuggaaccggaagcgcaucuccaacugcguggcggacuacagcgugcuguacaacuccgccagcuucuccacguucaagugcuacggggucagccccaccaagcucaacgaccugugcuucaccaacguguacgccgacuccuucgugauccggggcgacgagguccgccagaucgcccccgggcagaccggcaacaucgccgacuacaacuacaagcugccggacgacuucacggggugcgugaucgcguggaacagcaacaaccucgacuccaaggugggcggcaacuacaacuaccuguaccggcuguuccgcaagagcaaccucaagcccuucgagcgggacaucuccaccgagaucuaccaggccgggagcacccccugcaacggcgucaagggguucaacugcuacuucccccugcaguccuacggcuuccagccgaccuacggggugggcuaccagcccuaccgcguggucgugcugagcuucgagcuccugcacgcccccgccacggugugcggccccaagaaguccaccaaccuggucaagaacaagugcgugaacuucaacuucaacgggcucaccggcaccggggugcugaccgagagcaacaagaaguuccugccguuccagcaguucggccgggacaucgccgacacgaccgacgcgguccgcgacccccagacccucgagauccuggacaucacccccugcagcuucgggggcguguccgugaucacgccgggcaccaacaccagcaaccaggucgccgugcuguaccagggggugaacugcaccgagguccccguggccauccacgccgaccagcugacgcccaccuggcgcguguacuccaccggcagcaacgucuuccagacccgggccgggugccucaucggcgcggagcacgugaacaacuccuacgagugcgacauccccaucggcgccgggaucugcgccagcuaccagacgcagaccaacuccccgcgccgggcccgcagcguggcgucccagagcaucaucgccuacaccaugucccugggcgucgagaacagcguggccuacuccaacaacagcaucgccauccccaccaacuucacgaucuccgugaccaccgagauccugcccgucagcaugaccaagacgagcguggacugcaccauguacaucugcggggacuccaccgagugcagcaaccuccugcugcaguacggcuccuucugcacccagcucaaccgggcccugacggggaucgcgguggagcaggacaagaacacccaggaggucuucgcccaggugaagcagaucuacaagacgcccccgaucaaggacuucggcggcuucaacuucagccagauccugcccgaccccuccaagcccagcaagcgcuccuucaucgaggaccuccuguucaacaaggugacccuggccgacgccggguucaucaagcaguacggcgacugccucggggacaucgccgcgcgggaccugaucugcgcccagaaguucaacggccugaccguccucccgccccugcugaccgacgagaugaucgcccaguacaccagcgcccuccuggccgggaccaucacguccggcuggaccuucggcgcgggggccgcccugcagauccccuucgccaugcagauggcguaccgcuucaacggcaucggggugacccagaacgugcucuacgagaaccagaagcugaucgccaaccaguucaacagcgccaucggcaagauccaggacucccugagcuccaccgccagcgcccucgggaagcugcaggacgucgugaaccagaacgcgcaggcccugaacacgcucgugaagcagcuguccagcaacuucggcgccaucuccagcguccugaacgacauccucucccggcuggacaagguggaggccgaggugcagaucgaccgccugaucaccggccggcuccagagccugcagaccuacgucacccagcagcugauccgcgccgcggagauccgggccagcgccaaccucgccgccaccaagauguccgagugcgugcuggggcagagcaagcgcguggacuucugcggcaagggguaccaccugauguccuucccccagagcgcgccgcacggcgucguguuccuccacgucacguacgugcccgcccaggagaagaacuucaccaccgcccccgccaucugccacgacgggaaggcgcacuucccccgggagggcguguucgucuccaacggcacccacugguucgugacgcagcgcaacuucuacgagccgcagaucaucaccaccgacaacaccuucgugagcgggaacugcgacgucgugaucggcaucgugaacaacacggucuacgacccccugcagcccgagcuggacuccuucaaggaggagcucgacaaguacuucaagaaccacaccagccccgacguggaccugggggacaucuccggcaucaacgccagcguggucaacauccagaaggagaucgaccggcugaacgagguggccaagaaccucaacgagucccugaucgaccugcaggagcucggcaaguacgagcaguacaucaaguggccgugguacaucuggcugggguucaucgccggccugaucgccaucgugauggucaccaucaugcucugcugcaugaccagcugcugcuccugccugaaggggugcugcagcugcggcuccugcugcaaguucgacgaggacgacagcgagcccgugcugaagggggugaagcuccacuacacgugaggacuaguuauaagacugacuagcccgaugggccucccaacgggcccuccuccccuccuugcaccgagauuaauaaaaaaaaaaaaaaaaaaaaaaaaaaaaaaaaaaaaaaaaaaaaaaaaaaaaaaaaaaaaaaaaugcaucccccccccccccccccccccccccccccccaaaggcucuuuucagagccaccagaauu

SEQ ID NO: 23222 - RNA, 4039 nt, Artificial Sequence
  SARS-CoV-2/Wuhan/WIV05/2019__EPI_ISL_402128 spike protein mRNA gc (1-1273)(E484K_D614G)
aggagaaagcuuaccauguucguguuccugguccuccugccccuggugagcucccagugcgugaaccucaccacccgcacgcagcugccgcccgccuacaccaacagcuucacccggggcgucuacuaccccgacaagguguuccgcuccagcgugcugcacuccacccaggaccucuuccugcccuucuucagcaacgucacgugguuccacgccauccacguguccgggaccaacggcaccaagcgguucgacaacccggugcugcccuucaacgacggggucuacuucgcgagcaccgagaaguccaacaucauccgcggcuggaucuucgggacgacccucgacagcaagacccagucccugcugaucgugaacaacgccaccaacguggucaucaaggugugcgaguuccaguucugcaacgaccccuuccucggcguguacuaccacaagaacaacaagagcuggauggaguccgaguuccgggucuacagcuccgccaacaacugcacguucgaguacgugagccagcccuuccugauggaccuggagggcaagcaggggaacuucaagaaccuccgcgaguucguguucaagaacaucgacggcuacuucaagaucuacuccaagcacaccccgaucaaccugguccgggaccugccccagggguucagcgcccucgagccccugguggaccugcccaucggcaucaacaucacccgcuuccagacccuccuggcccugcaccgguccuaccucacgccgggggacagcagcuccggcuggaccgcgggcgccgccgccuacuacgugggguaccugcagccccgcaccuuccugcucaaguacaacgagaacggcaccaucacggacgcggucgacugcgcccuggacccccugagcgagaccaagugcacccucaaguccuucaccguggagaaggggaucuaccagacgagcaacuuccgggugcagcccaccgaguccaucguccgcuucccgaacaucaccaaccugugccccuucggcgagguguucaacgccacccgguucgccagcgucuacgccuggaaccgcaagcggaucuccaacugcguggcggacuacagcgugcuguacaacuccgccagcuucuccacguucaagugcuacggcgucagccccaccaagcucaacgaccugugcuucaccaacguguacgccgacuccuucgugauccgcggggacgagguccggcagaucgcccccggccagaccgggaagaucgccgacuacaacuacaagcugccggacgacuucacgggcugcgugaucgcguggaacagcaacaaccucgacuccaaggucgggggcaacuacaacuaccuguaccgccuguuccgcaagagcaaccucaagcccuucgagcgggacaucuccaccgagaucuaccaggccggcagcacccccugcaacggggugaagggcuucaacugcuacuucccccugcaguccuacggguuccagccgaccaacggcgugggguaccagcccuaccggguggucgugcugagcuucgagcuccugcacgcccccgccacggugugcggccccaagaaguccaccaaccuggucaagaacaagugcgugaacuucaacuucaacggccucaccgggaccggcgugcugaccgagagcaacaagaaguuccugccguuccagcaguucgggcgcgacaucgccgacacgaccgacgcgguccgcgacccccagacccuggagauccucgacaucacccccugcagcuucggcgggguguccgugaucacgccgggcaccaacaccagcaaccaggucgccgugcuguaccagggcgugaacugcaccgagguccccguggccauccacgccgaccagcugacgcccaccuggcggguguacuccaccgggagcaacgucuuccagacccgcgccggcugccucaucggggcggagcacgugaacaacuccuacgagugcgacauccccaucggcgccggcaucugcgccagcuaccagacgcagaccaacuccccgcggcgcgcccggagcguggcgucccagagcaucaucgccuacaccaugucccugggggccgagaacagcgucgccuacuccaacaacagcaucgccauccccaccaacuucacgaucuccgugaccaccgagauccugcccgugagcaugaccaagacgagcgucgacugcaccauguacaucugcggcgacuccaccgagugcagcaaccuccugcugcaguacggguccuucugcacccagcucaaccgcgcgcugacgggcaucgccguggagcaggacaagaacacccaggagguguucgcccaggucaagcagaucuacaagacgcccccgaucaaggacuucgggggcuucaacuucagccagauccugcccgaccccuccaagcccagcaagcgguccuucaucgaggaccuccuguucaacaaggugacccuggccgacgccggcuucaucaagcaguacggggacugccucggcgacaucgcggcccgcgaccugaucugcgcccagaaguucaacgggcugaccgugcucccgccccugcugaccgacgagaugaucgcccaguacaccagcgcccuccuggcgggcaccaucacguccggguggaccuucggcgccggcgccgcccugcagauccccuucgcgaugcagauggccuaccgguucaacgggaucggcgucacccagaacgugcucuacgagaaccagaagcugaucgccaaccaguucaacagcgccaucgggaagauccaggacucccugagcuccaccgccagcgcgcucggcaagcugcaggacguggucaaccagaacgcccaggcccugaacacgcucgugaagcagcuguccagcaacuucggggccaucuccagcgugcugaacgacauccucucccgccuggacaaggucgaggccgaggugcagaucgaccggcugaucaccggccgccuccagagccugcagaccuacgugacccagcagcugauccgggcggccgagauccgcgccagcgccaaccucgccgcgaccaagauguccgagugcguccugggccagagcaagcggguggacuucugcgggaagggcuaccaccugauguccuucccccagagcgccccgcacgggguggucuuccuccacgugacguacguccccgcccaggagaagaacuucaccaccgcccccgcgaucugccacgacggcaaggcccacuucccccgcgaggggguguucguguccaacggcacccacugguucgucacgcagcggaacuucuacgagccgcagaucaucaccaccgacaacaccuucgugagcggcaacugcgacguggucaucgggaucgugaacaacacgguguacgacccccugcagcccgagcuggacuccuucaaggaggagcucgacaaguacuucaagaaccacaccagccccgacgucgaccugggcgacaucuccgggaucaacgccagcguggugaacauccagaaggagaucgaccgccugaacgaggucgccaagaaccucaacgagucccugaucgaccugcaggagcucggcaaguacgagcaguacaucaaguggccgugguacaucuggcugggcuucaucgccgggcugaucgcgaucgugauggugaccaucaugcucugcugcaugaccagcugcugcuccugccugaagggcugcugcagcugcggguccugcugcaaguucgacgaggacgacagcgagcccguccugaagggcgugaagcuccacuacacgugaggacuaguuauaagacugacuagcccgaugggccucccaacgggcccuccuccccuccuugcaccgagauuaauaaaaaaaaaaaaaaaaaaaaaaaaaaaaaaaaaaaaaaaaaaaaaaaaaaaaaaaaaaaaaaaaugcaucccccccccccccccccccccccccccccccaaaggcucuuuucagagccaccagaauu

SEQ ID NO: 23223 - RNA, 4039 nt, Artificial Sequence
  SARS-CoV-2/Wuhan/WIV05/2019__EPI_ISL_402128 spike protein mRNA gc (1-1273)(L18F_T20N_P26S_D138Y_R190S_K417T_E484K_N501Y_D614G_H655Y _T1027I)
aggagaaagcuuaccauguucguguuccugguccuccugccccuggugagcucccagugcgugaacuucaccaaccgcacccagcucccgagcgccuacacgaacuccuucacccggggcgucuacuaccccgacaagguguuccgcagcuccgugcugcacagcacccaggaccuguuccuccccuucuucuccaacgucaccugguuccacgccauccacgugagcgggacgaacggcaccaagcgguucgacaaccccgugcugccguucaacgacggggucuacuucgcguccaccgagaaguccaacaucauccgcggcuggaucuucgggaccacgcuggacuccaagacccagagccuccugaucgugaacaacgccaccaacguggucaucaaggugugcgaguuccaguucugcaacuaccccuuccugggcguguacuaccacaagaacaacaaguccuggauggagagcgaguuccgggucuacuccagcgccaacaacugcaccuucgaguacgugucccagcccuuccucauggaccuggagggcaagcaggggaacuucaagaaccugagcgaguucguguucaagaacaucgacggcuacuucaagaucuacuccaagcacacgcccaucaaccucguccgcgaccugccgcagggguucagcgcccuggagccccucguggaccugcccaucggcaucaacaucacccgguuccagacccugcucgcccugcaccgcagcuaccugacccccggggacuccagcuccggcuggacggcgggcgccgccgccuacuacgugggguaccuccagccgcggaccuuccugcugaaguacaacgagaacggcaccaucaccgacgcggucgacugcgcccucgacccccugagcgagacgaagugcacccugaaguccuucaccguggagaaggggaucuaccagaccagcaacuuccgcgugcagcccacggaguccaucguccgguuccccaacaucaccaaccucugcccguucggcgagguguucaacgccacccgcuucgccagcgucuacgccuggaaccggaagcgcaucuccaacugcguggcggacuacagcgugcuguacaacuccgccagcuucuccaccuucaagugcuacggcgucagccccacgaagcugaacgaccucugcuucaccaacguguacgccgacuccuucgugauccgcggggacgagguccggcagaucgcccccggccagaccgggaccaucgccgacuacaacuacaagcugcccgacgacuucacgggcugcgugaucgcguggaacagcaacaaccuggacuccaaggucgggggcaacuacaacuaccucuaccggcuguuccgcaagagcaaccugaagccguucgagcgggacaucuccaccgagaucuaccaggccggcagcacccccugcaacggggugaagggcuucaacugcuacuucccccuccagagcuacggguuccagcccaccuacggcgugggguaccagccguaccgcguggucgugcuguccuucgagcugcuccacgcccccgccacggugugcggccccaagaaguccaccaaccuggucaagaacaagugcgugaacuucaacuucaacggccugaccgggaccggcgugcucaccgagagcaacaagaaguuccugcccuuccagcaguucgggcgggacaucgccgacacgaccgacgcgguccgcgacccgcagacccuggagauccuggacaucacccccugcagcuucggcgggguguccgugaucacgcccggcaccaacaccagcaaccaggucgccgugcucuaccagggcgugaacugcaccgaggucccgguggccauccacgccgaccagcugacgcccaccuggcgcguguacuccaccgggagcaacgucuuccagacccgggccggcugccugaucggggcggaguacgugaacaacuccuacgagugcgacauccccaucggcgccggcaucugcgccagcuaccagacgcagaccaacagcccccgccgggcccgcagcguggcgucccagagcaucaucgccuacaccaugucccucggggccgagaacagcgucgccuacuccaacaacagcaucgccaucccgaccaacuucacgaucagcgugaccaccgagauccugcccguguccaugaccaagacgagcgucgacugcaccauguacaucugcggcgacuccaccgagugcagcaaccugcuccugcaguacggguccuucugcacccagcugaaccgggcgcucacgggcaucgccguggagcaggacaagaacacccaggagguguucgcccaggucaagcagaucuacaagaccccgcccaucaaggacuucgggggcuucaacuucagccagauccugcccgaccccuccaagcccagcaagcgcuccuucaucgaggaccuccuguucaacaaggugacccuggccgacgccggcuucaucaagcaguacggggacugccugggcgacaucgcggcccgggaccucaucugcgcccagaaguucaacgggcugacggugcugcccccgcuccugaccgacgagaugaucgcccaguacaccagcgcccugcucgcgggcaccaucacguccggguggaccuucggcgccggcgccgcccugcagauccccuucgcgaugcagauggccuaccgcuucaacgggaucggcgucacccagaacgugcuguacgagaaccagaagcucaucgccaaccaguucaacagcgccaucgggaagauccaggacucccugagcuccaccgccagcgcgcugggcaagcuccaggacguggucaaccagaacgcccaggcccugaacacgcuggugaagcagcucuccagcaacuucggggccaucuccagcgugcugaacgacauccugagccggcucgacaaggucgaggccgaggugcagaucgaccgccugaucaccggccggcugcagucccuccagaccuacgugacccagcagcugauccgcgcggccgagauccgggccagcgccaaccuggccgcgaucaagauguccgagugcguccucggccagagcaagcgcguggacuucugcgggaagggcuaccaccugauguccuucccccagagcgcgccccacgggguggucuuccugcacgugaccuacgucccggcccaggagaagaacuucacgaccgcccccgccaucugccacgacggcaaggcccacuucccccgggaggggguguucguguccaacggcacccacugguucgucacccagcgcaacuucuacgagccccagaucaucacgaccgacaacaccuucgugagcggcaacugcgacguggucaucgggaucgugaacaacaccguguacgacccgcuccagcccgagcuggacuccuucaaggaggagcuggacaaguacuucaagaaccacacgagccccgacgucgaccucggcgacaucuccgggaucaacgccagcguggugaacauccagaaggagaucgaccggcugaacgaggucgccaagaaccugaacgagucccucaucgaccugcaggagcugggcaaguacgagcaguacaucaaguggcccugguacaucuggcucggcuucaucgccgggcugaucgcgaucgugauggugaccaucaugcugugcugcaugaccagcugcugcuccugccucaagggcugcugcagcugcggguccugcugcaaguucgacgaggacgacagcgagccgguccugaagggcgugaagcugcacuacaccugaggacuaguuauaagacugacuagcccgaugggccucccaacgggcccuccuccccuccuugcaccgagauuaauaaaaaaaaaaaaaaaaaaaaaaaaaaaaaaaaaaaaaaaaaaaaaaaaaaaaaaaaaaaaaaaaugcaucccccccccccccccccccccccccccccccaaaggcucuuuucagagccaccagaauu

SEQ ID NO: 23224 - RNA, 4039 nt, Artificial Sequence
  SARS-CoV-2/Wuhan/WIV05/2019__EPI_ISL_402128 spike protein mRNA gc (1-1273)(S13I_W152C_L452R_D614G)
aggagaaagcuuaccauguucguguuccugguccuccugccccuggugagcauccagugcgugaaccucaccacccgcacgcagcugccgcccgccuacaccaacuccuucacccggggcgucuacuaccccgacaagguguuccgcagcuccgugcugcacagcacccaggaccucuuccugcccuucuucuccaacgucacgugguuccacgccauccacgugagcgggaccaacggcaccaagcgguucgacaacccggugcugcccuucaacgacggggucuacuucgcguccaccgagaaguccaacaucauccgcggcuggaucuucgggacgacccucgacagcaagacccagagccugcugaucgugaacaacgccaccaacguggucaucaaggugugcgaguuccaguucugcaacgaccccuuccucggcguguacuaccacaagaacaacaaguccugcauggagagcgaguuccgggucuacuccagcgccaacaacugcacguucgaguacgugucccagcccuuccugauggaccuggagggcaagcaggggaacuucaagaaccuccgcgaguucguguucaagaacaucgacggcuacuucaagaucuacagcaagcacaccccgaucaaccugguccgggaccugccccagggguucuccgcccucgagccccugguggaccugcccaucggcaucaacaucacccgcuuccagacccuccuggcccugcaccggagcuaccucacgccgggggacuccagcagcggcuggaccgcgggcgccgccgccuacuacgugggguaccugcagccccgcaccuuccugcucaaguacaacgagaacggcaccaucacggacgcggucgacugcgcccuggacccccuguccgagaccaagugcacccucaagagcuucaccguggagaaggggaucuaccagacguccaacuuccgggugcagcccaccgagagcaucguccgcuucccgaacaucaccaaccugugccccuucggcgagguguucaacgccacccgguucgccuccgucuacgccuggaaccgcaagcggaucagcaacugcguggcggacuacuccgugcuguacaacagcgccuccuucagcacguucaagugcuacggcgucucccccaccaagcucaacgaccugugcuucaccaacguguacgccgacagcuucgugauccgcggggacgagguccggcagaucgcccccggccagaccgggaagaucgccgacuacaacuacaagcugccggacgacuucacgggcugcgugaucgcguggaacuccaacaaccucgacagcaaggucgggggcaacuacaacuaccgcuaccggcuguuccgcaaguccaaccugaagcccuucgagcgggacaucagcaccgagaucuaccaggccggcuccacccccugcaacgggguggagggcuucaacugcuacuucccccuccagagcuacggguuccagccgaccaacggcgugggguaccagcccuaccgcguggucgugcuguccuucgagcugcuccacgcccccgccacggugugcggccccaagaaguccaccaaccuggucaagaacaagugcgugaacuucaacuucaacggccugaccgggaccggcgugcucaccgagagcaacaagaaguuccugccguuccagcaguucgggcgcgacaucgccgacacgaccgacgcgguccgggacccccagacccuggagauccuggacaucacccccugcagcuucggcggggugagcgugaucacgccgggcaccaacaccuccaaccaggucgccgugcucuaccagggcgugaacugcaccgagguccccguggccauccacgccgaccagcugacgcccaccuggcgcguguacagcaccggguccaacgucuuccagacccgggccggcugccugaucggggcggagcacgugaacaacagcuacgagugcgacauccccaucggcgccggcaucugcgccuccuaccagacgcagaccaacagcccgcgccgggcccgcuccguggcgagccaguccaucaucgccuacaccaugagccucggggccgagaacuccgucgccuacagcaacaacuccaucgccauccccaccaacuucacgaucagcgugaccaccgagauccugcccguguccaugaccaagacgagcgucgacugcaccauguacaucugcggcgacagcaccgagugcuccaaccugcuccugcaguacgggagcuucugcacccagcugaaccgggcgcucacgggcaucgccguggagcaggacaagaacacccaggagguguucgcccaggucaagcagaucuacaagacgcccccgaucaaggacuucgggggcuucaacuucucccagauccugcccgaccccagcaagcccuccaagcgcagcuucaucgaggaccuccuguucaacaaggugacccuggccgacgccggcuucaucaagcaguacggggacugccugggcgacaucgcggcccgggaccucaucugcgcccagaaguucaacgggcugaccgugcugccgccccuccugaccgacgagaugaucgcccaguacaccuccgcccugcucgcgggcaccaucacgagcggguggaccuucggcgccggcgccgcccugcagauccccuucgcgaugcagauggccuaccgcuucaacgggaucggcgucacccagaacgugcuguacgagaaccagaagcucaucgccaaccaguucaacuccgccaucgggaagauccaggacagccuguccagcaccgccuccgcgcugggcaagcuccaggacguggucaaccagaacgcccaggcccugaacacgcuggugaagcagcucagcuccaacuucggggccaucagcuccgugcugaacgacauccugagccggcucgacaaggucgaggccgaggugcagaucgaccgccugaucaccggccggcugcagucccuccagaccuacgugacccagcagcugauccgcgcggccgagauccgggccagcgccaaccuggccgcgaccaagaugagcgagugcguccucggccaguccaagcgcguggacuucugcgggaagggcuaccaccugaugagcuucccccaguccgccccgcacgggguggucuuccugcacgugacguacguccccgcccaggagaagaacuucaccaccgcccccgcgaucugccacgacggcaaggcccacuucccccgggaggggguguucgugagcaacggcacccacugguucgucacgcagcgcaacuucuacgagccgcagaucaucaccaccgacaacaccuucguguccggcaacugcgacguggucaucgggaucgugaacaacacgguguacgacccccuccagcccgagcuggacagcuucaaggaggagcuggacaaguacuucaagaaccacaccucccccgacgucgaccucggcgacaucagcgggaucaacgccuccguggugaacauccagaaggagaucgaccggcugaacgaggucgccaagaaccugaacgagagccucaucgaccugcaggagcugggcaaguacgagcaguacaucaaguggccgugguacaucuggcucggcuucaucgccgggcugaucgcgaucgugauggugaccaucaugcugugcugcaugaccuccugcugcagcugccucaagggcugcugcuccugcgggagcugcugcaaguucgacgaggacgacuccgagcccguccugaagggcgugaagcugcacuacacgugaggacuaguuauaagacugacuagcccgaugggccucccaacgggcccuccuccccuccuugcaccgagauuaauaaaaaaaaaaaaaaaaaaaaaaaaaaaaaaaaaaaaaaaaaaaaaaaaaaaaaaaaaaaaaaaaugcaucccccccccccccccccccccccccccccccaaaggcucuuuucagagccaccagaauu

SEQ ID NO: 23225 - RNA, 4039 nt, Artificial Sequence
  SARS-CoV-2/Wuhan/WIV05/2019__EPI_ISL_402128 spike protein mRNA gc (1-1273)
aggagaaagcuuaccauguucguguuccuggugcugcugccccuggugagcagccagugcgugaaccugaccacccggacccagcugccaccagccuacaccaacagcuucacccggggcgucuacuaccccgacaagguguuccggagcagcguccugcacagcacccaggaccuguuccugcccuucuucagcaacgugaccugguuccacgccauccacgugagcggcaccaacggcaccaagcgguucgacaaccccgugcugcccuucaacgacggcguguacuucgccagcaccgagaagagcaacaucauccggggcuggaucuucggcaccacccuggacagcaagacccagagccugcugaucgugaauaacgccaccaacguggugaucaaggugugcgaguuccaguucugcaacgaccccuuccugggcguguacuaccacaagaacaacaagagcuggauggagagcgaguuccggguguacagcagcgccaacaacugcaccuucgaguacgugagccagcccuuccugauggaccuggagggcaagcagggcaacuucaagaaccugcgggaguucguguucaagaacaucgacggcuacuucaagaucuacagcaagcacaccccaaucaaccuggugcgggaucugccccagggcuucucagcccuggagccccugguggaccugcccaucggcaucaacaucacccgguuccagacccugcuggcccugcaccggagcuaccugaccccaggcgacagcagcagcggguggacagcaggcgcggcugcuuacuacgugggcuaccugcagccccggaccuuccugcugaaguacaacgagaacggcaccaucaccgacgccguggacugcgcccuggacccucugagcgagaccaagugcacccugaagagcuucaccguggagaagggcaucuaccagaccagcaacuuccgggugcagcccaccgagagcaucgugcgguuccccaacaucaccaaccugugccccuucggcgagguguucaacgccacccgguucgccagcguguacgccuggaaccggaagcggaucagcaacugcguggccgacuacagcgugcuguacaacagcgccagcuucagcaccuucaagugcuacggcgugagccccaccaagcugaacgaccugugcuucaccaacguguacgccgacagcuucgugauccguggcgacgaggugcggcagaucgcacccggccagacaggcaagaucgccgacuacaacuacaagcugcccgacgacuucaccggcugcgugaucgccuggaacagcaacaaccucgacagcaaggugggcggcaacuacaacuaccuguaccggcuguuccggaagagcaaccugaagcccuucgagcgggacaucagcaccgagaucuaccaagccggcuccaccccuugcaacggcguggagggcuucaacugcuacuucccucugcagagcuacggcuuccagcccaccaacggcgugggcuaccagcccuaccgggugguggugcugagcuucgagcugcugcacgccccagccaccguguguggccccaagaagagcaccaaccuggugaagaacaagugcgugaacuucaacuucaacggccuuaccggcaccggcgugcugaccgagagcaacaagaaauuccugcccuuucagcaguucggccgggacaucgccgacaccaccgacgcugugcgggauccccagacccuggagauccuggacaucaccccuugcagcuucggcggcgugagcgugaucaccccaggcaccaacaccagcaaccagguggccgugcuguaccaggacgugaacugcaccgaggugcccguggccauccacgccgaccagcugacacccaccuggcgggucuacagcaccggcagcaacguguuccagacccgggccgguugccugaucggcgccgagcacgugaacaacagcuacgagugcgacauccccaucggcgccggcaucugugccagcuaccagacccagaccaauucaccccggagggcaaggagcguggccagccagagcaucaucgccuacaccaugagccugggcgccgagaacagcguggccuacagcaacaacagcaucgccauccccaccaacuucaccaucagcgugaccaccgagauucugcccgugagcaugaccaagaccagcguggacugcaccauguacaucugcggcgacagcaccgagugcagcaaccugcugcugcaguacggcagcuucugcacccagcugaaccgggcccugaccggcaucgccguggagcaggacaagaacacccaggagguguucgcccaggugaagcagaucuacaagaccccucccaucaaggacuucggcggcuucaacuucagccagauccugcccgaccccagcaagcccagcaagcggagcuucaucgaggaccugcuguucaacaaggugacccuagccgacgccggcuucaucaagcaguacggcgacugccucggcgacauagccgcccgggaccugaucugcgcccagaaguucaacggccugaccgugcugccuccccugcugaccgacgagaugaucgcccaguacaccagcgcccuguuagccggaaccaucaccagcggcuggacuuucggcgcuggagccgcucugcagauccccuucgccaugcagauggccuaccgguucaacggcaucggcgugacccagaacgugcuguacgagaaccagaagcugaucgccaaccaguucaacagcgccaucggcaagauccaggacagccugagcagcaccgcuagcgcccugggcaagcugcaggacguggugaaccagaacgcccaggcccugaacacccuggugaagcagcugagcagcaacuucggcgccaucagcagcgugcugaacgacauccugagccggcuggacaaggucgaggccgaggugcagaucgaccggcugaucacuggccggcugcagagccugcagaccuacgugacccagcagcugauccgggccgccgagauucgggccagcgccaaccuggccgccaccaagaugagcgagugcgugcugggccagagcaagcggguggacuucugcggcaagggcuaccaccugaugagcuuuccccagagcgcaccccacggagugguguuccugcacgugaccuacgugcccgcccaggagaagaacuucaccaccgccccagccaucugccacgacggcaaggcccacuuuccccgggagggcguguucgugagcaacggcacccacugguucgugacccagcggaacuucuacgagccccagaucaucaccaccgacaacaccuucgugagcggcaacugcgacguggugaucggcaucgugaacaacaccguguacgauccccugcagcccgagcuggacagcuucaaggaggagcuggacaaguacuucaagaaucacaccagccccgacguggaccugggcgacaucagcggcaucaacgccagcguggugaacauccagaaggagaucgaucggcugaacgagguggccaagaaccugaacgagagccugaucgaccugcaggagcugggcaaguacgagcaguacaucaaguggcccugguacaucuggcugggcuucaucgccggccugaucgccaucgugauggugaccaucaugcugugcugcaugaccagcugcugcagcugccugaagggcuguugcagcugcggcagcugcugcaaguucgacgaggacgacagcgagcccgugcugaagggcgugaagcugcacuacaccugaggacuaguuauaagacugacuagcccgaugggccucccaacgggcccuccuccccuccuugcaccgagauuaauaaaaaaaaaaaaaaaaaaaaaaaaaaaaaaaaaaaaaaaaaaaaaaaaaaaaaaaaaaaaaaaaugcaucccccccccccccccccccccccccccccccaaaggcucuuuucagagccaccagaauu

SEQ ID NO: 23226 - RNA, 4039 nt, Artificial Sequence
  SARS-CoV-2/Wuhan/WIV05/2019__EPI_ISL_402128 spike protein mRNA gc (1-1273)(D614G)
aggagaaagcuuaccauguucguguuccuggugcugcugccccuggugagcagccagugcgugaaccugaccacccggacccagcugccaccagccuacaccaacagcuucacccggggcgucuacuaccccgacaagguguuccggagcagcguccugcacagcacccaggaccuguuccugcccuucuucagcaacgugaccugguuccacgccauccacgugagcggcaccaacggcaccaagcgguucgacaaccccgugcugcccuucaacgacggcguguacuucgccagcaccgagaagagcaacaucauccggggcuggaucuucggcaccacccuggacagcaagacccagagccugcugaucgugaauaacgccaccaacguggugaucaaggugugcgaguuccaguucugcaacgaccccuuccugggcguguacuaccacaagaacaacaagagcuggauggagagcgaguuccggguguacagcagcgccaacaacugcaccuucgaguacgugagccagcccuuccugauggaccuggagggcaagcagggcaacuucaagaaccugcgggaguucguguucaagaacaucgacggcuacuucaagaucuacagcaagcacaccccaaucaaccuggugcgggaucugccccagggcuucucagcccuggagccccugguggaccugcccaucggcaucaacaucacccgguuccagacccugcuggcccugcaccggagcuaccugaccccaggcgacagcagcagcggguggacagcaggcgcggcugcuuacuacgugggcuaccugcagccccggaccuuccugcugaaguacaacgagaacggcaccaucaccgacgccguggacugcgcccuggacccucugagcgagaccaagugcacccugaagagcuucaccguggagaagggcaucuaccagaccagcaacuuccgggugcagcccaccgagagcaucgugcgguuccccaacaucaccaaccugugccccuucggcgagguguucaacgccacccgguucgccagcguguacgccuggaaccggaagcggaucagcaacugcguggccgacuacagcgugcuguacaacagcgccagcuucagcaccuucaagugcuacggcgugagccccaccaagcugaacgaccugugcuucaccaacguguacgccgacagcuucgugauccguggcgacgaggugcggcagaucgcacccggccagacaggcaagaucgccgacuacaacuacaagcugcccgacgacuucaccggcugcgugaucgccuggaacagcaacaaccucgacagcaaggugggcggcaacuacaacuaccuguaccggcuguuccggaagagcaaccugaagcccuucgagcgggacaucagcaccgagaucuaccaagccggcuccaccccuugcaacggcguggagggcuucaacugcuacuucccucugcagagcuacggcuuccagcccaccaacggcgugggcuaccagcccuaccgggugguggugcugagcuucgagcugcugcacgccccagccaccguguguggccccaagaagagcaccaaccuggugaagaacaagugcgugaacuucaacuucaacggccuuaccggcaccggcgugcugaccgagagcaacaagaaauuccugcccuuucagcaguucggccgggacaucgccgacaccaccgacgcugugcgggauccccagacccuggagauccuggacaucaccccuugcagcuucggcggcgugagcgugaucaccccaggcaccaacaccagcaaccagguggccgugcuguaccagggcgugaacugcaccgaggugcccguggccauccacgccgaccagcugacacccaccuggcgggucuacagcaccggcagcaacguguuccagacccgggccgguugccugaucggcgccgagcacgugaacaacagcuacgagugcgacauccccaucggcgccggcaucugugccagcuaccagacccagaccaauucaccccggagggcaaggagcguggccagccagagcaucaucgccuacaccaugagccugggcgccgagaacagcguggccuacagcaacaacagcaucgccauccccaccaacuucaccaucagcgugaccaccgagauucugcccgugagcaugaccaagaccagcguggacugcaccauguacaucugcggcgacagcaccgagugcagcaaccugcugcugcaguacggcagcuucugcacccagcugaaccgggcccugaccggcaucgccguggagcaggacaagaacacccaggagguguucgcccaggugaagcagaucuacaagaccccucccaucaaggacuucggcggcuucaacuucagccagauccugcccgaccccagcaagcccagcaagcggagcuucaucgaggaccugcuguucaacaaggugacccuagccgacgccggcuucaucaagcaguacggcgacugccucggcgacauagccgcccgggaccugaucugcgcccagaaguucaacggccugaccgugcugccuccccugcugaccgacgagaugaucgcccaguacaccagcgcccuguuagccggaaccaucaccagcggcuggacuuucggcgcuggagccgcucugcagauccccuucgccaugcagauggccuaccgguucaacggcaucggcgugacccagaacgugcuguacgagaaccagaagcugaucgccaaccaguucaacagcgccaucggcaagauccaggacagccugagcagcaccgcuagcgcccugggcaagcugcaggacguggugaaccagaacgcccaggcccugaacacccuggugaagcagcugagcagcaacuucggcgccaucagcagcgugcugaacgacauccugagccggcuggacaaggucgaggccgaggugcagaucgaccggcugaucacuggccggcugcagagccugcagaccuacgugacccagcagcugauccgggccgccgagauucgggccagcgccaaccuggccgccaccaagaugagcgagugcgugcugggccagagcaagcggguggacuucugcggcaagggcuaccaccugaugagcuuuccccagagcgcaccccacggagugguguuccugcacgugaccuacgugcccgcccaggagaagaacuucaccaccgccccagccaucugccacgacggcaaggcccacuuuccccgggagggcguguucgugagcaacggcacccacugguucgugacccagcggaacuucuacgagccccagaucaucaccaccgacaacaccuucgugagcggcaacugcgacguggugaucggcaucgugaacaacaccguguacgauccccugcagcccgagcuggacagcuucaaggaggagcuggacaaguacuucaagaaucacaccagccccgacguggaccugggcgacaucagcggcaucaacgccagcguggugaacauccagaaggagaucgaucggcugaacgagguggccaagaaccugaacgagagccugaucgaccugcaggagcugggcaaguacgagcaguacaucaaguggcccugguacaucuggcugggcuucaucgccggccugaucgccaucgugauggugaccaucaugcugugcugcaugaccagcugcugcagcugccugaagggcuguugcagcugcggcagcugcugcaaguucgacgaggacgacagcgagcccgugcugaagggcgugaagcugcacuacaccugaggacuaguuauaagacugacuagcccgaugggccucccaacgggcccuccuccccuccuugcaccgagauuaauaaaaaaaaaaaaaaaaaaaaaaaaaaaaaaaaaaaaaaaaaaaaaaaaaaaaaaaaaaaaaaaaugcaucccccccccccccccccccccccccccccccaaaggcucuuuucagagccaccagaauu

SEQ ID NO: 23227 - RNA, 4039 nt, Artificial Sequence
  SARS-CoV-2/Wuhan/WIV05/2019__EPI_ISL_402128 spike protein mRNA gc (1-1273)(A222V_D614G)
aggagaaagcuuaccauguucguguuccuggugcugcugccccuggugagcagccagugcgugaaccugaccacccggacccagcugccaccagccuacaccaacagcuucacccggggcgucuacuaccccgacaagguguuccggagcagcguccugcacagcacccaggaccuguuccugcccuucuucagcaacgugaccugguuccacgccauccacgugagcggcaccaacggcaccaagcgguucgacaaccccgugcugcccuucaacgacggcguguacuucgccagcaccgagaagagcaacaucauccggggcuggaucuucggcaccacccuggacagcaagacccagagccugcugaucgugaauaacgccaccaacguggugaucaaggugugcgaguuccaguucugcaacgaccccuuccugggcguguacuaccacaagaacaacaagagcuggauggagagcgaguuccggguguacagcagcgccaacaacugcaccuucgaguacgugagccagcccuuccugauggaccuggagggcaagcagggcaacuucaagaaccugcgggaguucguguucaagaacaucgacggcuacuucaagaucuacagcaagcacaccccaaucaaccuggugcgggaucugccccagggcuucucagugcuggagccccugguggaccugcccaucggcaucaacaucacccgguuccagacccugcuggcccugcaccggagcuaccugaccccaggcgacagcagcagcggguggacagcaggcgcggcugcuuacuacgugggcuaccugcagccccggaccuuccugcugaaguacaacgagaacggcaccaucaccgacgccguggacugcgcccuggacccucugagcgagaccaagugcacccugaagagcuucaccguggagaagggcaucuaccagaccagcaacuuccgggugcagcccaccgagagcaucgugcgguuccccaacaucaccaaccugugccccuucggcgagguguucaacgccacccgguucgccagcguguacgccuggaaccggaagcggaucagcaacugcguggccgacuacagcgugcuguacaacagcgccagcuucagcaccuucaagugcuacggcgugagccccaccaagcugaacgaccugugcuucaccaacguguacgccgacagcuucgugauccguggcgacgaggugcggcagaucgcacccggccagacaggcaagaucgccgacuacaacuacaagcugcccgacgacuucaccggcugcgugaucgccuggaacagcaacaaccucgacagcaaggugggcggcaacuacaacuaccuguaccggcuguuccggaagagcaaccugaagcccuucgagcgggacaucagcaccgagaucuaccaagccggcuccaccccuugcaacggcguggagggcuucaacugcuacuucccucugcagagcuacggcuuccagcccaccaacggcgugggcuaccagcccuaccgggugguggugcugagcuucgagcugcugcacgccccagccaccguguguggccccaagaagagcaccaaccuggugaagaacaagugcgugaacuucaacuucaacggccuuaccggcaccggcgugcugaccgagagcaacaagaaauuccugcccuuucagcaguucggccgggacaucgccgacaccaccgacgcugugcgggauccccagacccuggagauccuggacaucaccccuugcagcuucggcggcgugagcgugaucaccccaggcaccaacaccagcaaccagguggccgugcuguaccagggcgugaacugcaccgaggugcccguggccauccacgccgaccagcugacacccaccuggcgggucuacagcaccggcagcaacguguuccagacccgggccgguugccugaucggcgccgagcacgugaacaacagcuacgagugcgacauccccaucggcgccggcaucugugccagcuaccagacccagaccaauucaccccggagggcaaggagcguggccagccagagcaucaucgccuacaccaugagccugggcgccgagaacagcguggccuacagcaacaacagcaucgccauccccaccaacuucaccaucagcgugaccaccgagauucugcccgugagcaugaccaagaccagcguggacugcaccauguacaucugcggcgacagcaccgagugcagcaaccugcugcugcaguacggcagcuucugcacccagcugaaccgggcccugaccggcaucgccguggagcaggacaagaacacccaggagguguucgcccaggugaagcagaucuacaagaccccucccaucaaggacuucggcggcuucaacuucagccagauccugcccgaccccagcaagcccagcaagcggagcuucaucgaggaccugcuguucaacaaggugacccuagccgacgccggcuucaucaagcaguacggcgacugccucggcgacauagccgcccgggaccugaucugcgcccagaaguucaacggccugaccgugcugccuccccugcugaccgacgagaugaucgcccaguacaccagcgcccuguuagccggaaccaucaccagcggcuggacuuucggcgcuggagccgcucugcagauccccuucgccaugcagauggccuaccgguucaacggcaucggcgugacccagaacgugcuguacgagaaccagaagcugaucgccaaccaguucaacagcgccaucggcaagauccaggacagccugagcagcaccgcuagcgcccugggcaagcugcaggacguggugaaccagaacgcccaggcccugaacacccuggugaagcagcugagcagcaacuucggcgccaucagcagcgugcugaacgacauccugagccggcuggacaaggucgaggccgaggugcagaucgaccggcugaucacuggccggcugcagagccugcagaccuacgugacccagcagcugauccgggccgccgagauucgggccagcgccaaccuggccgccaccaagaugagcgagugcgugcugggccagagcaagcggguggacuucugcggcaagggcuaccaccugaugagcuuuccccagagcgcaccccacggagugguguuccugcacgugaccuacgugcccgcccaggagaagaacuucaccaccgccccagccaucugccacgacggcaaggcccacuuuccccgggagggcguguucgugagcaacggcacccacugguucgugacccagcggaacuucuacgagccccagaucaucaccaccgacaacaccuucgugagcggcaacugcgacguggugaucggcaucgugaacaacaccguguacgauccccugcagcccgagcuggacagcuucaaggaggagcuggacaaguacuucaagaaucacaccagccccgacguggaccugggcgacaucagcggcaucaacgccagcguggugaacauccagaaggagaucgaucggcugaacgagguggccaagaaccugaacgagagccugaucgaccugcaggagcugggcaaguacgagcaguacaucaaguggcccugguacaucuggcugggcuucaucgccggccugaucgccaucgugauggugaccaucaugcugugcugcaugaccagcugcugcagcugccugaagggcuguugcagcugcggcagcugcugcaaguucgacgaggacgacagcgagcccgugcugaagggcgugaagcugcacuacaccugaggacuaguuauaagacugacuagcccgaugggccucccaacgggcccuccuccccuccuugcaccgagauuaauaaaaaaaaaaaaaaaaaaaaaaaaaaaaaaaaaaaaaaaaaaaaaaaaaaaaaaaaaaaaaaaaugcaucccccccccccccccccccccccccccccccaaaggcucuuuucagagccaccagaauu

SEQ ID NO: 23228 - RNA, 4039 nt, Artificial Sequence
  SARS-CoV-2/Wuhan/WIV05/2019__EPI_ISL_402128 spike protein mRNA gc (1-1273)(N439K_D614G)
aggagaaagcuuaccauguucguguuccuggugcugcugccccuggugagcagccagugcgugaaccugaccacccggacccagcugccaccagccuacaccaacagcuucacccggggcgucuacuaccccgacaagguguuccggagcagcguccugcacagcacccaggaccuguuccugcccuucuucagcaacgugaccugguuccacgccauccacgugagcggcaccaacggcaccaagcgguucgacaaccccgugcugcccuucaacgacggcguguacuucgccagcaccgagaagagcaacaucauccggggcuggaucuucggcaccacccuggacagcaagacccagagccugcugaucgugaauaacgccaccaacguggugaucaaggugugcgaguuccaguucugcaacgaccccuuccugggcguguacuaccacaagaacaacaagagcuggauggagagcgaguuccggguguacagcagcgccaacaacugcaccuucgaguacgugagccagcccuuccugauggaccuggagggcaagcagggcaacuucaagaaccugcgggaguucguguucaagaacaucgacggcuacuucaagaucuacagcaagcacaccccaaucaaccuggugcgggaucugccccagggcuucucagcccuggagccccugguggaccugcccaucggcaucaacaucacccgguuccagacccugcuggcccugcaccggagcuaccugaccccaggcgacagcagcagcggguggacagcaggcgcggcugcuuacuacgugggcuaccugcagccccggaccuuccugcugaaguacaacgagaacggcaccaucaccgacgccguggacugcgcccuggacccucugagcgagaccaagugcacccugaagagcuucaccguggagaagggcaucuaccagaccagcaacuuccgggugcagcccaccgagagcaucgugcgguuccccaacaucaccaaccugugccccuucggcgagguguucaacgccacccgguucgccagcguguacgccuggaaccggaagcggaucagcaacugcguggccgacuacagcgugcuguacaacagcgccagcuucagcaccuucaagugcuacggcgugagccccaccaagcugaacgaccugugcuucaccaacguguacgccgacagcuucgugauccguggcgacgaggugcggcagaucgcacccggccagacaggcaagaucgccgacuacaacuacaagcugcccgacgacuucaccggcugcgugaucgccuggaacagcaagaaccucgacagcaaggugggcggcaacuacaacuaccuguaccggcuguuccggaagagcaaccugaagcccuucgagcgggacaucagcaccgagaucuaccaagccggcuccaccccuugcaacggcguggagggcuucaacugcuacuucccucugcagagcuacggcuuccagcccaccaacggcgugggcuaccagcccuaccgggugguggugcugagcuucgagcugcugcacgccccagccaccguguguggccccaagaagagcaccaaccuggugaagaacaagugcgugaacuucaacuucaacggccuuaccggcaccggcgugcugaccgagagcaacaagaaauuccugcccuuucagcaguucggccgggacaucgccgacaccaccgacgcugugcgggauccccagacccuggagauccuggacaucaccccuugcagcuucggcggcgugagcgugaucaccccaggcaccaacaccagcaaccagguggccgugcuguaccagggcgugaacugcaccgaggugcccguggccauccacgccgaccagcugacacccaccuggcgggucuacagcaccggcagcaacguguuccagacccgggccgguugccugaucggcgccgagcacgugaacaacagcuacgagugcgacauccccaucggcgccggcaucugugccagcuaccagacccagaccaauucaccccggagggcaaggagcguggccagccagagcaucaucgccuacaccaugagccugggcgccgagaacagcguggccuacagcaacaacagcaucgccauccccaccaacuucaccaucagcgugaccaccgagauucugcccgugagcaugaccaagaccagcguggacugcaccauguacaucugcggcgacagcaccgagugcagcaaccugcugcugcaguacggcagcuucugcacccagcugaaccgggcccugaccggcaucgccguggagcaggacaagaacacccaggagguguucgcccaggugaagcagaucuacaagaccccucccaucaaggacuucggcggcuucaacuucagccagauccugcccgaccccagcaagcccagcaagcggagcuucaucgaggaccugcuguucaacaaggugacccuagccgacgccggcuucaucaagcaguacggcgacugccucggcgacauagccgcccgggaccugaucugcgcccagaaguucaacggccugaccgugcugccuccccugcugaccgacgagaugaucgcccaguacaccagcgcccuguuagccggaaccaucaccagcggcuggacuuucggcgcuggagccgcucugcagauccccuucgccaugcagauggccuaccgguucaacggcaucggcgugacccagaacgugcuguacgagaaccagaagcugaucgccaaccaguucaacagcgccaucggcaagauccaggacagccugagcagcaccgcuagcgcccugggcaagcugcaggacguggugaaccagaacgcccaggcccugaacacccuggugaagcagcugagcagcaacuucggcgccaucagcagcgugcugaacgacauccugagccggcuggacaaggucgaggccgaggugcagaucgaccggcugaucacuggccggcugcagagccugcagaccuacgugacccagcagcugauccgggccgccgagauucgggccagcgccaaccuggccgccaccaagaugagcgagugcgugcugggccagagcaagcggguggacuucugcggcaagggcuaccaccugaugagcuuuccccagagcgcaccccacggagugguguuccugcacgugaccuacgugcccgcccaggagaagaacuucaccaccgccccagccaucugccacgacggcaaggcccacuuuccccgggagggcguguucgugagcaacggcacccacugguucgugacccagcggaacuucuacgagccccagaucaucaccaccgacaacaccuucgugagcggcaacugcgacguggugaucggcaucgugaacaacaccguguacgauccccugcagcccgagcuggacagcuucaaggaggagcuggacaaguacuucaagaaucacaccagccccgacguggaccugggcgacaucagcggcaucaacgccagcguggugaacauccagaaggagaucgaucggcugaacgagguggccaagaaccugaacgagagccugaucgaccugcaggagcugggcaaguacgagcaguacaucaaguggcccugguacaucuggcugggcuucaucgccggccugaucgccaucgugauggugaccaucaugcugugcugcaugaccagcugcugcagcugccugaagggcuguugcagcugcggcagcugcugcaaguucgacgaggacgacagcgagcccgugcugaagggcgugaagcugcacuacaccugaggacuaguuauaagacugacuagcccgaugggccucccaacgggcccuccuccccuccuugcaccgagauuaauaaaaaaaaaaaaaaaaaaaaaaaaaaaaaaaaaaaaaaaaaaaaaaaaaaaaaaaaaaaaaaaaugcaucccccccccccccccccccccccccccccccaaaggcucuuuucagagccaccagaauu

SEQ ID NO: 23229 - RNA, 4039 nt, Artificial Sequence
  SARS-CoV-2/Wuhan/WIV05/2019__EPI_ISL_402128 spike protein mRNA gc (1-1273)(S477N_D614G)
aggagaaagcuuaccauguucguguuccuggugcugcugccccuggugagcagccagugcgugaaccugaccacccggacccagcugccaccagccuacaccaacagcuucacccggggcgucuacuaccccgacaagguguuccggagcagcguccugcacagcacccaggaccuguuccugcccuucuucagcaacgugaccugguuccacgccauccacgugagcggcaccaacggcaccaagcgguucgacaaccccgugcugcccuucaacgacggcguguacuucgccagcaccgagaagagcaacaucauccggggcuggaucuucggcaccacccuggacagcaagacccagagccugcugaucgugaauaacgccaccaacguggugaucaaggugugcgaguuccaguucugcaacgaccccuuccugggcguguacuaccacaagaacaacaagagcuggauggagagcgaguuccggguguacagcagcgccaacaacugcaccuucgaguacgugagccagcccuuccugauggaccuggagggcaagcagggcaacuucaagaaccugcgggaguucguguucaagaacaucgacggcuacuucaagaucuacagcaagcacaccccaaucaaccuggugcgggaucugccccagggcuucucagcccuggagccccugguggaccugcccaucggcaucaacaucacccgguuccagacccugcuggcccugcaccggagcuaccugaccccaggcgacagcagcagcggguggacagcaggcgcggcugcuuacuacgugggcuaccugcagccccggaccuuccugcugaaguacaacgagaacggcaccaucaccgacgccguggacugcgcccuggacccucugagcgagaccaagugcacccugaagagcuucaccguggagaagggcaucuaccagaccagcaacuuccgggugcagcccaccgagagcaucgugcgguuccccaacaucaccaaccugugccccuucggcgagguguucaacgccacccgguucgccagcguguacgccuggaaccggaagcggaucagcaacugcguggccgacuacagcgugcuguacaacagcgccagcuucagcaccuucaagugcuacggcgugagccccaccaagcugaacgaccugugcuucaccaacguguacgccgacagcuucgugauccguggcgacgaggugcggcagaucgcacccggccagacaggcaagaucgccgacuacaacuacaagcugcccgacgacuucaccggcugcgugaucgccuggaacagcaacaaccucgacagcaaggugggcggcaacuacaacuaccuguaccggcuguuccggaagagcaaccugaagcccuucgagcgggacaucagcaccgagaucuaccaagccggcaacaccccuugcaacggcguggagggcuucaacugcuacuucccucugcagagcuacggcuuccagcccaccaacggcgugggcuaccagcccuaccgggugguggugcugagcuucgagcugcugcacgccccagccaccguguguggccccaagaagagcaccaaccuggugaagaacaagugcgugaacuucaacuucaacggccuuaccggcaccggcgugcugaccgagagcaacaagaaauuccugcccuuucagcaguucggccgggacaucgccgacaccaccgacgcugugcgggauccccagacccuggagauccuggacaucaccccuugcagcuucggcggcgugagcgugaucaccccaggcaccaacaccagcaaccagguggccgugcuguaccagggcgugaacugcaccgaggugcccguggccauccacgccgaccagcugacacccaccuggcgggucuacagcaccggcagcaacguguuccagacccgggccgguugccugaucggcgccgagcacgugaacaacagcuacgagugcgacauccccaucggcgccggcaucugugccagcuaccagacccagaccaauucaccccggagggcaaggagcguggccagccagagcaucaucgccuacaccaugagccugggcgccgagaacagcguggccuacagcaacaacagcaucgccauccccaccaacuucaccaucagcgugaccaccgagauucugcccgugagcaugaccaagaccagcguggacugcaccauguacaucugcggcgacagcaccgagugcagcaaccugcugcugcaguacggcagcuucugcacccagcugaaccgggcccugaccggcaucgccguggagcaggacaagaacacccaggagguguucgcccaggugaagcagaucuacaagaccccucccaucaaggacuucggcggcuucaacuucagccagauccugcccgaccccagcaagcccagcaagcggagcuucaucgaggaccugcuguucaacaaggugacccuagccgacgccggcuucaucaagcaguacggcgacugccucggcgacauagccgcccgggaccugaucugcgcccagaaguucaacggccugaccgugcugccuccccugcugaccgacgagaugaucgcccaguacaccagcgcccuguuagccggaaccaucaccagcggcuggacuuucggcgcuggagccgcucugcagauccccuucgccaugcagauggccuaccgguucaacggcaucggcgugacccagaacgugcuguacgagaaccagaagcugaucgccaaccaguucaacagcgccaucggcaagauccaggacagccugagcagcaccgcuagcgcccugggcaagcugcaggacguggugaaccagaacgcccaggcccugaacacccuggugaagcagcugagcagcaacuucggcgccaucagcagcgugcugaacgacauccugagccggcuggacaaggucgaggccgaggugcagaucgaccggcugaucacuggccggcugcagagccugcagaccuacgugacccagcagcugauccgggccgccgagauucgggccagcgccaaccuggccgccaccaagaugagcgagugcgugcugggccagagcaagcggguggacuucugcggcaagggcuaccaccugaugagcuuuccccagagcgcaccccacggagugguguuccugcacgugaccuacgugcccgcccaggagaagaacuucaccaccgccccagccaucugccacgacggcaaggcccacuuuccccgggagggcguguucgugagcaacggcacccacugguucgugacccagcggaacuucuacgagccccagaucaucaccaccgacaacaccuucgugagcggcaacugcgacguggugaucggcaucgugaacaacaccguguacgauccccugcagcccgagcuggacagcuucaaggaggagcuggacaaguacuucaagaaucacaccagccccgacguggaccugggcgacaucagcggcaucaacgccagcguggugaacauccagaaggagaucgaucggcugaacgagguggccaagaaccugaacgagagccugaucgaccugcaggagcugggcaaguacgagcaguacaucaaguggcccugguacaucuggcugggcuucaucgccggccugaucgccaucgugauggugaccaucaugcugugcugcaugaccagcugcugcagcugccugaagggcuguugcagcugcggcagcugcugcaaguucgacgaggacgacagcgagcccgugcugaagggcgugaagcugcacuacaccugaggacuaguuauaagacugacuagcccgaugggccucccaacgggcccuccuccccuccuugcaccgagauuaauaaaaaaaaaaaaaaaaaaaaaaaaaaaaaaaaaaaaaaaaaaaaaaaaaaaaaaaaaaaaaaaaugcaucccccccccccccccccccccccccccccccaaaggcucuuuucagagccaccagaauu

SEQ ID NO: 23230 - RNA, 4039 nt, Artificial Sequence
  SARS-CoV-2/Wuhan/WIV05/2019__EPI_ISL_402128 spike protein mRNA gc (1-1273)(N501Y_D614G)
aggagaaagcuuaccauguucguguuccuggugcugcugccccuggugagcagccagugcgugaaccugaccacccggacccagcugccaccagccuacaccaacagcuucacccggggcgucuacuaccccgacaagguguuccggagcagcguccugcacagcacccaggaccuguuccugcccuucuucagcaacgugaccugguuccacgccauccacgugagcggcaccaacggcaccaagcgguucgacaaccccgugcugcccuucaacgacggcguguacuucgccagcaccgagaagagcaacaucauccggggcuggaucuucggcaccacccuggacagcaagacccagagccugcugaucgugaauaacgccaccaacguggugaucaaggugugcgaguuccaguucugcaacgaccccuuccugggcguguacuaccacaagaacaacaagagcuggauggagagcgaguuccggguguacagcagcgccaacaacugcaccuucgaguacgugagccagcccuuccugauggaccuggagggcaagcagggcaacuucaagaaccugcgggaguucguguucaagaacaucgacggcuacuucaagaucuacagcaagcacaccccaaucaaccuggugcgggaucugccccagggcuucucagcccuggagccccugguggaccugcccaucggcaucaacaucacccgguuccagacccugcuggcccugcaccggagcuaccugaccccaggcgacagcagcagcggguggacagcaggcgcggcugcuuacuacgugggcuaccugcagccccggaccuuccugcugaaguacaacgagaacggcaccaucaccgacgccguggacugcgcccuggacccucugagcgagaccaagugcacccugaagagcuucaccguggagaagggcaucuaccagaccagcaacuuccgggugcagcccaccgagagcaucgugcgguuccccaacaucaccaaccugugccccuucggcgagguguucaacgccacccgguucgccagcguguacgccuggaaccggaagcggaucagcaacugcguggccgacuacagcgugcuguacaacagcgccagcuucagcaccuucaagugcuacggcgugagccccaccaagcugaacgaccugugcuucaccaacguguacgccgacagcuucgugauccguggcgacgaggugcggcagaucgcacccggccagacaggcaagaucgccgacuacaacuacaagcugcccgacgacuucaccggcugcgugaucgccuggaacagcaacaaccucgacagcaaggugggcggcaacuacaacuaccuguaccggcuguuccggaagagcaaccugaagcccuucgagcgggacaucagcaccgagaucuaccaagccggcuccaccccuugcaacggcguggagggcuucaacugcuacuucccucugcagagcuacggcuuccagcccaccuacggcgugggcuaccagcccuaccgggugguggugcugagcuucgagcugcugcacgccccagccaccguguguggccccaagaagagcaccaaccuggugaagaacaagugcgugaacuucaacuucaacggccuuaccggcaccggcgugcugaccgagagcaacaagaaauuccugcccuuucagcaguucggccgggacaucgccgacaccaccgacgcugugcgggauccccagacccuggagauccuggacaucaccccuugcagcuucggcggcgugagcgugaucaccccaggcaccaacaccagcaaccagguggccgugcuguaccagggcgugaacugcaccgaggugcccguggccauccacgccgaccagcugacacccaccuggcgggucuacagcaccggcagcaacguguuccagacccgggccgguugccugaucggcgccgagcacgugaacaacagcuacgagugcgacauccccaucggcgccggcaucugugccagcuaccagacccagaccaauucaccccggagggcaaggagcguggccagccagagcaucaucgccuacaccaugagccugggcgccgagaacagcguggccuacagcaacaacagcaucgccauccccaccaacuucaccaucagcgugaccaccgagauucugcccgugagcaugaccaagaccagcguggacugcaccauguacaucugcggcgacagcaccgagugcagcaaccugcugcugcaguacggcagcuucugcacccagcugaaccgggcccugaccggcaucgccguggagcaggacaagaacacccaggagguguucgcccaggugaagcagaucuacaagaccccucccaucaaggacuucggcggcuucaacuucagccagauccugcccgaccccagcaagcccagcaagcggagcuucaucgaggaccugcuguucaacaaggugacccuagccgacgccggcuucaucaagcaguacggcgacugccucggcgacauagccgcccgggaccugaucugcgcccagaaguucaacggccugaccgugcugccuccccugcugaccgacgagaugaucgcccaguacaccagcgcccuguuagccggaaccaucaccagcggcuggacuuucggcgcuggagccgcucugcagauccccuucgccaugcagauggccuaccgguucaacggcaucggcgugacccagaacgugcuguacgagaaccagaagcugaucgccaaccaguucaacagcgccaucggcaagauccaggacagccugagcagcaccgcuagcgcccugggcaagcugcaggacguggugaaccagaacgcccaggcccugaacacccuggugaagcagcugagcagcaacuucggcgccaucagcagcgugcugaacgacauccugagccggcuggacaaggucgaggccgaggugcagaucgaccggcugaucacuggccggcugcagagccugcagaccuacgugacccagcagcugauccgggccgccgagauucgggccagcgccaaccuggccgccaccaagaugagcgagugcgugcugggccagagcaagcggguggacuucugcggcaagggcuaccaccugaugagcuuuccccagagcgcaccccacggagugguguuccugcacgugaccuacgugcccgcccaggagaagaacuucaccaccgccccagccaucugccacgacggcaaggcccacuuuccccgggagggcguguucgugagcaacggcacccacugguucgugacccagcggaacuucuacgagccccagaucaucaccaccgacaacaccuucgugagcggcaacugcgacguggugaucggcaucgugaacaacaccguguacgauccccugcagcccgagcuggacagcuucaaggaggagcuggacaaguacuucaagaaucacaccagccccgacguggaccugggcgacaucagcggcaucaacgccagcguggugaacauccagaaggagaucgaucggcugaacgagguggccaagaaccugaacgagagccugaucgaccugcaggagcugggcaaguacgagcaguacaucaaguggcccugguacaucuggcugggcuucaucgccggccugaucgccaucgugauggugaccaucaugcugugcugcaugaccagcugcugcagcugccugaagggcuguugcagcugcggcagcugcugcaaguucgacgaggacgacagcgagcccgugcugaagggcgugaagcugcacuacaccugaggacuaguuauaagacugacuagcccgaugggccucccaacgggcccuccuccccuccuugcaccgagauuaauaaaaaaaaaaaaaaaaaaaaaaaaaaaaaaaaaaaaaaaaaaaaaaaaaaaaaaaaaaaaaaaaugcaucccccccccccccccccccccccccccccccaaaggcucuuuucagagccaccagaauu

SEQ ID NO: 23231 - RNA, 4033 nt, Artificial Sequence
  SARS-CoV-2/Wuhan/WIV05/2019__EPI_ISL_402128 spike protein mRNA gc (1-1273)(H69del_V70del_D614G)
aggagaaagcuuaccauguucguguuccuggugcugcugccccuggugagcagccagugcgugaaccugaccacccggacccagcugccaccagccuacaccaacagcuucacccggggcgucuacuaccccgacaagguguuccggagcagcguccugcacagcacccaggaccuguuccugcccuucuucagcaacgugaccugguuccacgccaucagcggcaccaacggcaccaagcgguucgacaaccccgugcugcccuucaacgacggcguguacuucgccagcaccgagaagagcaacaucauccggggcuggaucuucggcaccacccuggacagcaagacccagagccugcugaucgugaauaacgccaccaacguggugaucaaggugugcgaguuccaguucugcaacgaccccuuccugggcguguacuaccacaagaacaacaagagcuggauggagagcgaguuccggguguacagcagcgccaacaacugcaccuucgaguacgugagccagcccuuccugauggaccuggagggcaagcagggcaacuucaagaaccugcgggaguucguguucaagaacaucgacggcuacuucaagaucuacagcaagcacaccccaaucaaccuggugcgggaucugccccagggcuucucagcccuggagccccugguggaccugcccaucggcaucaacaucacccgguuccagacccugcuggcccugcaccggagcuaccugaccccaggcgacagcagcagcggguggacagcaggcgcggcugcuuacuacgugggcuaccugcagccccggaccuuccugcugaaguacaacgagaacggcaccaucaccgacgccguggacugcgcccuggacccucugagcgagaccaagugcacccugaagagcuucaccguggagaagggcaucuaccagaccagcaacuuccgggugcagcccaccgagagcaucgugcgguuccccaacaucaccaaccugugccccuucggcgagguguucaacgccacccgguucgccagcguguacgccuggaaccggaagcggaucagcaacugcguggccgacuacagcgugcuguacaacagcgccagcuucagcaccuucaagugcuacggcgugagccccaccaagcugaacgaccugugcuucaccaacguguacgccgacagcuucgugauccguggcgacgaggugcggcagaucgcacccggccagacaggcaagaucgccgacuacaacuacaagcugcccgacgacuucaccggcugcgugaucgccuggaacagcaacaaccucgacagcaaggugggcggcaacuacaacuaccuguaccggcuguuccggaagagcaaccugaagcccuucgagcgggacaucagcaccgagaucuaccaagccggcuccaccccuugcaacggcguggagggcuucaacugcuacuucccucugcagagcuacggcuuccagcccaccaacggcgugggcuaccagcccuaccgggugguggugcugagcuucgagcugcugcacgccccagccaccguguguggccccaagaagagcaccaaccuggugaagaacaagugcgugaacuucaacuucaacggccuuaccggcaccggcgugcugaccgagagcaacaagaaauuccugcccuuucagcaguucggccgggacaucgccgacaccaccgacgcugugcgggauccccagacccuggagauccuggacaucaccccuugcagcuucggcggcgugagcgugaucaccccaggcaccaacaccagcaaccagguggccgugcuguaccagggcgugaacugcaccgaggugcccguggccauccacgccgaccagcugacacccaccuggcgggucuacagcaccggcagcaacguguuccagacccgggccgguugccugaucggcgccgagcacgugaacaacagcuacgagugcgacauccccaucggcgccggcaucugugccagcuaccagacccagaccaauucaccccggagggcaaggagcguggccagccagagcaucaucgccuacaccaugagccugggcgccgagaacagcguggccuacagcaacaacagcaucgccauccccaccaacuucaccaucagcgugaccaccgagauucugcccgugagcaugaccaagaccagcguggacugcaccauguacaucugcggcgacagcaccgagugcagcaaccugcugcugcaguacggcagcuucugcacccagcugaaccgggcccugaccggcaucgccguggagcaggacaagaacacccaggagguguucgcccaggugaagcagaucuacaagaccccucccaucaaggacuucggcggcuucaacuucagccagauccugcccgaccccagcaagcccagcaagcggagcuucaucgaggaccugcuguucaacaaggugacccuagccgacgccggcuucaucaagcaguacggcgacugccucggcgacauagccgcccgggaccugaucugcgcccagaaguucaacggccugaccgugcugccuccccugcugaccgacgagaugaucgcccaguacaccagcgcccuguuagccggaaccaucaccagcggcuggacuuucggcgcuggagccgcucugcagauccccuucgccaugcagauggccuaccgguucaacggcaucggcgugacccagaacgugcuguacgagaaccagaagcugaucgccaaccaguucaacagcgccaucggcaagauccaggacagccugagcagcaccgcuagcgcccugggcaagcugcaggacguggugaaccagaacgcccaggcccugaacacccuggugaagcagcugagcagcaacuucggcgccaucagcagcgugcugaacgacauccugagccggcuggacaaggucgaggccgaggugcagaucgaccggcugaucacuggccggcugcagagccugcagaccuacgugacccagcagcugauccgggccgccgagauucgggccagcgccaaccuggccgccaccaagaugagcgagugcgugcugggccagagcaagcggguggacuucugcggcaagggcuaccaccugaugagcuuuccccagagcgcaccccacggagugguguuccugcacgugaccuacgugcccgcccaggagaagaacuucaccaccgccccagccaucugccacgacggcaaggcccacuuuccccgggagggcguguucgugagcaacggcacccacugguucgugacccagcggaacuucuacgagccccagaucaucaccaccgacaacaccuucgugagcggcaacugcgacguggugaucggcaucgugaacaacaccguguacgauccccugcagcccgagcuggacagcuucaaggaggagcuggacaaguacuucaagaaucacaccagccccgacguggaccugggcgacaucagcggcaucaacgccagcguggugaacauccagaaggagaucgaucggcugaacgagguggccaagaaccugaacgagagccugaucgaccugcaggagcugggcaaguacgagcaguacaucaaguggcccugguacaucuggcugggcuucaucgccggccugaucgccaucgugauggugaccaucaugcugugcugcaugaccagcugcugcagcugccugaagggcuguugcagcugcggcagcugcugcaaguucgacgaggacgacagcgagcccgugcugaagggcgugaagcugcacuacaccugaggacuaguuauaagacugacuagcccgaugggccucccaacgggcccuccuccccuccuugcaccgagauuaauaaaaaaaaaaaaaaaaaaaaaaaaaaaaaaaaaaaaaaaaaaaaaaaaaaaaaaaaaaaaaaaaugcaucccccccccccccccccccccccccccccccaaaggcucuuuucagagccaccagaauu

SEQ ID NO: 23232 - RNA, 4039 nt, Artificial Sequence
  SARS-CoV-2/Wuhan/WIV05/2019__EPI_ISL_402128 spike protein mRNA gc (1-1273)(Y453F_D614G)
aggagaaagcuuaccauguucguguuccuggugcugcugccccuggugagcagccagugcgugaaccugaccacccggacccagcugccaccagccuacaccaacagcuucacccggggcgucuacuaccccgacaagguguuccggagcagcguccugcacagcacccaggaccuguuccugcccuucuucagcaacgugaccugguuccacgccauccacgugagcggcaccaacggcaccaagcgguucgacaaccccgugcugcccuucaacgacggcguguacuucgccagcaccgagaagagcaacaucauccggggcuggaucuucggcaccacccuggacagcaagacccagagccugcugaucgugaauaacgccaccaacguggugaucaaggugugcgaguuccaguucugcaacgaccccuuccugggcguguacuaccacaagaacaacaagagcuggauggagagcgaguuccggguguacagcagcgccaacaacugcaccuucgaguacgugagccagcccuuccugauggaccuggagggcaagcagggcaacuucaagaaccugcgggaguucguguucaagaacaucgacggcuacuucaagaucuacagcaagcacaccccaaucaaccuggugcgggaucugccccagggcuucucagcccuggagccccugguggaccugcccaucggcaucaacaucacccgguuccagacccugcuggcccugcaccggagcuaccugaccccaggcgacagcagcagcggguggacagcaggcgcggcugcuuacuacgugggcuaccugcagccccggaccuuccugcugaaguacaacgagaacggcaccaucaccgacgccguggacugcgcccuggacccucugagcgagaccaagugcacccugaagagcuucaccguggagaagggcaucuaccagaccagcaacuuccgggugcagcccaccgagagcaucgugcgguuccccaacaucaccaaccugugccccuucggcgagguguucaacgccacccgguucgccagcguguacgccuggaaccggaagcggaucagcaacugcguggccgacuacagcgugcuguacaacagcgccagcuucagcaccuucaagugcuacggcgugagccccaccaagcugaacgaccugugcuucaccaacguguacgccgacagcuucgugauccguggcgacgaggugcggcagaucgcacccggccagacaggcaagaucgccgacuacaacuacaagcugcccgacgacuucaccggcugcgugaucgccuggaacagcaacaaccucgacagcaaggugggcggcaacuacaacuaccuguuccggcuguuccggaagagcaaccugaagcccuucgagcgggacaucagcaccgagaucuaccaagccggcuccaccccuugcaacggcguggagggcuucaacugcuacuucccucugcagagcuacggcuuccagcccaccaacggcgugggcuaccagcccuaccgggugguggugcugagcuucgagcugcugcacgccccagccaccguguguggccccaagaagagcaccaaccuggugaagaacaagugcgugaacuucaacuucaacggccuuaccggcaccggcgugcugaccgagagcaacaagaaauuccugcccuuucagcaguucggccgggacaucgccgacaccaccgacgcugugcgggauccccagacccuggagauccuggacaucaccccuugcagcuucggcggcgugagcgugaucaccccaggcaccaacaccagcaaccagguggccgugcuguaccagggcgugaacugcaccgaggugcccguggccauccacgccgaccagcugacacccaccuggcgggucuacagcaccggcagcaacguguuccagacccgggccgguugccugaucggcgccgagcacgugaacaacagcuacgagugcgacauccccaucggcgccggcaucugugccagcuaccagacccagaccaauucaccccggagggcaaggagcguggccagccagagcaucaucgccuacaccaugagccugggcgccgagaacagcguggccuacagcaacaacagcaucgccauccccaccaacuucaccaucagcgugaccaccgagauucugcccgugagcaugaccaagaccagcguggacugcaccauguacaucugcggcgacagcaccgagugcagcaaccugcugcugcaguacggcagcuucugcacccagcugaaccgggcccugaccggcaucgccguggagcaggacaagaacacccaggagguguucgcccaggugaagcagaucuacaagaccccucccaucaaggacuucggcggcuucaacuucagccagauccugcccgaccccagcaagcccagcaagcggagcuucaucgaggaccugcuguucaacaaggugacccuagccgacgccggcuucaucaagcaguacggcgacugccucggcgacauagccgcccgggaccugaucugcgcccagaaguucaacggccugaccgugcugccuccccugcugaccgacgagaugaucgcccaguacaccagcgcccuguuagccggaaccaucaccagcggcuggacuuucggcgcuggagccgcucugcagauccccuucgccaugcagauggccuaccgguucaacggcaucggcgugacccagaacgugcuguacgagaaccagaagcugaucgccaaccaguucaacagcgccaucggcaagauccaggacagccugagcagcaccgcuagcgcccugggcaagcugcaggacguggugaaccagaacgcccaggcccugaacacccuggugaagcagcugagcagcaacuucggcgccaucagcagcgugcugaacgacauccugagccggcuggacaaggucgaggccgaggugcagaucgaccggcugaucacuggccggcugcagagccugcagaccuacgugacccagcagcugauccgggccgccgagauucgggccagcgccaaccuggccgccaccaagaugagcgagugcgugcugggccagagcaagcggguggacuucugcggcaagggcuaccaccugaugagcuuuccccagagcgcaccccacggagugguguuccugcacgugaccuacgugcccgcccaggagaagaacuucaccaccgccccagccaucugccacgacggcaaggcccacuuuccccgggagggcguguucgugagcaacggcacccacugguucgugacccagcggaacuucuacgagccccagaucaucaccaccgacaacaccuucgugagcggcaacugcgacguggugaucggcaucgugaacaacaccguguacgauccccugcagcccgagcuggacagcuucaaggaggagcuggacaaguacuucaagaaucacaccagccccgacguggaccugggcgacaucagcggcaucaacgccagcguggugaacauccagaaggagaucgaucggcugaacgagguggccaagaaccugaacgagagccugaucgaccugcaggagcugggcaaguacgagcaguacaucaaguggcccugguacaucuggcugggcuucaucgccggccugaucgccaucgugauggugaccaucaugcugugcugcaugaccagcugcugcagcugccugaagggcuguugcagcugcggcagcugcugcaaguucgacgaggacgacagcgagcccgugcugaagggcgugaagcugcacuacaccugaggacuaguuauaagacugacuagcccgaugggccucccaacgggcccuccuccccuccuugcaccgagauuaauaaaaaaaaaaaaaaaaaaaaaaaaaaaaaaaaaaaaaaaaaaaaaaaaaaaaaaaaaaaaaaaaugcaucccccccccccccccccccccccccccccccaaaggcucuuuucagagccaccagaauu

SEQ ID NO: 23233 - RNA, 4039 nt, Artificial Sequence
  SARS-CoV-2/Wuhan/WIV05/2019__EPI_ISL_402128 spike protein mRNA gc (1-1273)(D614G_I692V)
aggagaaagcuuaccauguucguguuccuggugcugcugccccuggugagcagccagugcgugaaccugaccacccggacccagcugccaccagccuacaccaacagcuucacccggggcgucuacuaccccgacaagguguuccggagcagcguccugcacagcacccaggaccuguuccugcccuucuucagcaacgugaccugguuccacgccauccacgugagcggcaccaacggcaccaagcgguucgacaaccccgugcugcccuucaacgacggcguguacuucgccagcaccgagaagagcaacaucauccggggcuggaucuucggcaccacccuggacagcaagacccagagccugcugaucgugaauaacgccaccaacguggugaucaaggugugcgaguuccaguucugcaacgaccccuuccugggcguguacuaccacaagaacaacaagagcuggauggagagcgaguuccggguguacagcagcgccaacaacugcaccuucgaguacgugagccagcccuuccugauggaccuggagggcaagcagggcaacuucaagaaccugcgggaguucguguucaagaacaucgacggcuacuucaagaucuacagcaagcacaccccaaucaaccuggugcgggaucugccccagggcuucucagcccuggagccccugguggaccugcccaucggcaucaacaucacccgguuccagacccugcuggcccugcaccggagcuaccugaccccaggcgacagcagcagcggguggacagcaggcgcggcugcuuacuacgugggcuaccugcagccccggaccuuccugcugaaguacaacgagaacggcaccaucaccgacgccguggacugcgcccuggacccucugagcgagaccaagugcacccugaagagcuucaccguggagaagggcaucuaccagaccagcaacuuccgggugcagcccaccgagagcaucgugcgguuccccaacaucaccaaccugugccccuucggcgagguguucaacgccacccgguucgccagcguguacgccuggaaccggaagcggaucagcaacugcguggccgacuacagcgugcuguacaacagcgccagcuucagcaccuucaagugcuacggcgugagccccaccaagcugaacgaccugugcuucaccaacguguacgccgacagcuucgugauccguggcgacgaggugcggcagaucgcacccggccagacaggcaagaucgccgacuacaacuacaagcugcccgacgacuucaccggcugcgugaucgccuggaacagcaacaaccucgacagcaaggugggcggcaacuacaacuaccuguaccggcuguuccggaagagcaaccugaagcccuucgagcgggacaucagcaccgagaucuaccaagccggcuccaccccuugcaacggcguggagggcuucaacugcuacuucccucugcagagcuacggcuuccagcccaccaacggcgugggcuaccagcccuaccgggugguggugcugagcuucgagcugcugcacgccccagccaccguguguggccccaagaagagcaccaaccuggugaagaacaagugcgugaacuucaacuucaacggccuuaccggcaccggcgugcugaccgagagcaacaagaaauuccugcccuuucagcaguucggccgggacaucgccgacaccaccgacgcugugcgggauccccagacccuggagauccuggacaucaccccuugcagcuucggcggcgugagcgugaucaccccaggcaccaacaccagcaaccagguggccgugcuguaccagggcgugaacugcaccgaggugcccguggccauccacgccgaccagcugacacccaccuggcgggucuacagcaccggcagcaacguguuccagacccgggccgguugccugaucggcgccgagcacgugaacaacagcuacgagugcgacauccccaucggcgccggcaucugugccagcuaccagacccagaccaauucaccccggagggcaaggagcguggccagccagagcgugaucgccuacaccaugagccugggcgccgagaacagcguggccuacagcaacaacagcaucgccauccccaccaacuucaccaucagcgugaccaccgagauucugcccgugagcaugaccaagaccagcguggacugcaccauguacaucugcggcgacagcaccgagugcagcaaccugcugcugcaguacggcagcuucugcacccagcugaaccgggcccugaccggcaucgccguggagcaggacaagaacacccaggagguguucgcccaggugaagcagaucuacaagaccccucccaucaaggacuucggcggcuucaacuucagccagauccugcccgaccccagcaagcccagcaagcggagcuucaucgaggaccugcuguucaacaaggugacccuagccgacgccggcuucaucaagcaguacggcgacugccucggcgacauagccgcccgggaccugaucugcgcccagaaguucaacggccugaccgugcugccuccccugcugaccgacgagaugaucgcccaguacaccagcgcccuguuagccggaaccaucaccagcggcuggacuuucggcgcuggagccgcucugcagauccccuucgccaugcagauggccuaccgguucaacggcaucggcgugacccagaacgugcuguacgagaaccagaagcugaucgccaaccaguucaacagcgccaucggcaagauccaggacagccugagcagcaccgcuagcgcccugggcaagcugcaggacguggugaaccagaacgcccaggcccugaacacccuggugaagcagcugagcagcaacuucggcgccaucagcagcgugcugaacgacauccugagccggcuggacaaggucgaggccgaggugcagaucgaccggcugaucacuggccggcugcagagccugcagaccuacgugacccagcagcugauccgggccgccgagauucgggccagcgccaaccuggccgccaccaagaugagcgagugcgugcugggccagagcaagcggguggacuucugcggcaagggcuaccaccugaugagcuuuccccagagcgcaccccacggagugguguuccugcacgugaccuacgugcccgcccaggagaagaacuucaccaccgccccagccaucugccacgacggcaaggcccacuuuccccgggagggcguguucgugagcaacggcacccacugguucgugacccagcggaacuucuacgagccccagaucaucaccaccgacaacaccuucgugagcggcaacugcgacguggugaucggcaucgugaacaacaccguguacgauccccugcagcccgagcuggacagcuucaaggaggagcuggacaaguacuucaagaaucacaccagccccgacguggaccugggcgacaucagcggcaucaacgccagcguggugaacauccagaaggagaucgaucggcugaacgagguggccaagaaccugaacgagagccugaucgaccugcaggagcugggcaaguacgagcaguacaucaaguggcccugguacaucuggcugggcuucaucgccggccugaucgccaucgugauggugaccaucaugcugugcugcaugaccagcugcugcagcugccugaagggcuguugcagcugcggcagcugcugcaaguucgacgaggacgacagcgagcccgugcugaagggcgugaagcugcacuacaccugaggacuaguuauaagacugacuagcccgaugggccucccaacgggcccuccuccccuccuugcaccgagauuaauaaaaaaaaaaaaaaaaaaaaaaaaaaaaaaaaaaaaaaaaaaaaaaaaaaaaaaaaaaaaaaaaugcaucccccccccccccccccccccccccccccccaaaggcucuuuucagagccaccagaauu

SEQ ID NO: 23234 - RNA, 4039 nt, Artificial Sequence
  SARS-CoV-2/Wuhan/WIV05/2019__EPI_ISL_402128 spike protein mRNA gc (1-1273)(D614G_M1229I)
aggagaaagcuuaccauguucguguuccuggugcugcugccccuggugagcagccagugcgugaaccugaccacccggacccagcugccaccagccuacaccaacagcuucacccggggcgucuacuaccccgacaagguguuccggagcagcguccugcacagcacccaggaccuguuccugcccuucuucagcaacgugaccugguuccacgccauccacgugagcggcaccaacggcaccaagcgguucgacaaccccgugcugcccuucaacgacggcguguacuucgccagcaccgagaagagcaacaucauccggggcuggaucuucggcaccacccuggacagcaagacccagagccugcugaucgugaauaacgccaccaacguggugaucaaggugugcgaguuccaguucugcaacgaccccuuccugggcguguacuaccacaagaacaacaagagcuggauggagagcgaguuccggguguacagcagcgccaacaacugcaccuucgaguacgugagccagcccuuccugauggaccuggagggcaagcagggcaacuucaagaaccugcgggaguucguguucaagaacaucgacggcuacuucaagaucuacagcaagcacaccccaaucaaccuggugcgggaucugccccagggcuucucagcccuggagccccugguggaccugcccaucggcaucaacaucacccgguuccagacccugcuggcccugcaccggagcuaccugaccccaggcgacagcagcagcggguggacagcaggcgcggcugcuuacuacgugggcuaccugcagccccggaccuuccugcugaaguacaacgagaacggcaccaucaccgacgccguggacugcgcccuggacccucugagcgagaccaagugcacccugaagagcuucaccguggagaagggcaucuaccagaccagcaacuuccgggugcagcccaccgagagcaucgugcgguuccccaacaucaccaaccugugccccuucggcgagguguucaacgccacccgguucgccagcguguacgccuggaaccggaagcggaucagcaacugcguggccgacuacagcgugcuguacaacagcgccagcuucagcaccuucaagugcuacggcgugagccccaccaagcugaacgaccugugcuucaccaacguguacgccgacagcuucgugauccguggcgacgaggugcggcagaucgcacccggccagacaggcaagaucgccgacuacaacuacaagcugcccgacgacuucaccggcugcgugaucgccuggaacagcaacaaccucgacagcaaggugggcggcaacuacaacuaccuguaccggcuguuccggaagagcaaccugaagcccuucgagcgggacaucagcaccgagaucuaccaagccggcuccaccccuugcaacggcguggagggcuucaacugcuacuucccucugcagagcuacggcuuccagcccaccaacggcgugggcuaccagcccuaccgggugguggugcugagcuucgagcugcugcacgccccagccaccguguguggccccaagaagagcaccaaccuggugaagaacaagugcgugaacuucaacuucaacggccuuaccggcaccggcgugcugaccgagagcaacaagaaauuccugcccuuucagcaguucggccgggacaucgccgacaccaccgacgcugugcgggauccccagacccuggagauccuggacaucaccccuugcagcuucggcggcgugagcgugaucaccccaggcaccaacaccagcaaccagguggccgugcuguaccagggcgugaacugcaccgaggugcccguggccauccacgccgaccagcugacacccaccuggcgggucuacagcaccggcagcaacguguuccagacccgggccgguugccugaucggcgccgagcacgugaacaacagcuacgagugcgacauccccaucggcgccggcaucugugccagcuaccagacccagaccaauucaccccggagggcaaggagcguggccagccagagcaucaucgccuacaccaugagccugggcgccgagaacagcguggccuacagcaacaacagcaucgccauccccaccaacuucaccaucagcgugaccaccgagauucugcccgugagcaugaccaagaccagcguggacugcaccauguacaucugcggcgacagcaccgagugcagcaaccugcugcugcaguacggcagcuucugcacccagcugaaccgggcccugaccggcaucgccguggagcaggacaagaacacccaggagguguucgcccaggugaagcagaucuacaagaccccucccaucaaggacuucggcggcuucaacuucagccagauccugcccgaccccagcaagcccagcaagcggagcuucaucgaggaccugcuguucaacaaggugacccuagccgacgccggcuucaucaagcaguacggcgacugccucggcgacauagccgcccgggaccugaucugcgcccagaaguucaacggccugaccgugcugccuccccugcugaccgacgagaugaucgcccaguacaccagcgcccuguuagccggaaccaucaccagcggcuggacuuucggcgcuggagccgcucugcagauccccuucgccaugcagauggccuaccgguucaacggcaucggcgugacccagaacgugcuguacgagaaccagaagcugaucgccaaccaguucaacagcgccaucggcaagauccaggacagccugagcagcaccgcuagcgcccugggcaagcugcaggacguggugaaccagaacgcccaggcccugaacacccuggugaagcagcugagcagcaacuucggcgccaucagcagcgugcugaacgacauccugagccggcuggacaaggucgaggccgaggugcagaucgaccggcugaucacuggccggcugcagagccugcagaccuacgugacccagcagcugauccgggccgccgagauucgggccagcgccaaccuggccgccaccaagaugagcgagugcgugcugggccagagcaagcggguggacuucugcggcaagggcuaccaccugaugagcuuuccccagagcgcaccccacggagugguguuccugcacgugaccuacgugcccgcccaggagaagaacuucaccaccgccccagccaucugccacgacggcaaggcccacuuuccccgggagggcguguucgugagcaacggcacccacugguucgugacccagcggaacuucuacgagccccagaucaucaccaccgacaacaccuucgugagcggcaacugcgacguggugaucggcaucgugaacaacaccguguacgauccccugcagcccgagcuggacagcuucaaggaggagcuggacaaguacuucaagaaucacaccagccccgacguggaccugggcgacaucagcggcaucaacgccagcguggugaacauccagaaggagaucgaucggcugaacgagguggccaagaaccugaacgagagccugaucgaccugcaggagcugggcaaguacgagcaguacaucaaguggcccugguacaucuggcugggcuucaucgccggccugaucgccaucgugaucgugaccaucaugcugugcugcaugaccagcugcugcagcugccugaagggcuguugcagcugcggcagcugcugcaaguucgacgaggacgacagcgagcccgugcugaagggcgugaagcugcacuacaccugaggacuaguuauaagacugacuagcccgaugggccucccaacgggcccuccuccccuccuugcaccgagauuaauaaaaaaaaaaaaaaaaaaaaaaaaaaaaaaaaaaaaaaaaaaaaaaaaaaaaaaaaaaaaaaaaugcaucccccccccccccccccccccccccccccccaaaggcucuuuucagagccaccagaauu

SEQ ID NO: 23235 - RNA, 4033 nt, Artificial Sequence
  SARS-CoV-2/Wuhan/WIV05/2019__EPI_ISL_402128 spike protein mRNA gc (1-1273)(H69del_V70del_A222V_Y453F_S477N_D614G_I692V)
aggagaaagcuuaccauguucguguuccuggugcugcugccccuggugagcagccagugcgugaaccugaccacccggacccagcugccaccagccuacaccaacagcuucacccggggcgucuacuaccccgacaagguguuccggagcagcguccugcacagcacccaggaccuguuccugcccuucuucagcaacgugaccugguuccacgccaucagcggcaccaacggcaccaagcgguucgacaaccccgugcugcccuucaacgacggcguguacuucgccagcaccgagaagagcaacaucauccggggcuggaucuucggcaccacccuggacagcaagacccagagccugcugaucgugaauaacgccaccaacguggugaucaaggugugcgaguuccaguucugcaacgaccccuuccugggcguguacuaccacaagaacaacaagagcuggauggagagcgaguuccggguguacagcagcgccaacaacugcaccuucgaguacgugagccagcccuuccugauggaccuggagggcaagcagggcaacuucaagaaccugcgggaguucguguucaagaacaucgacggcuacuucaagaucuacagcaagcacaccccaaucaaccuggugcgggaucugccccagggcuucucagugcuggagccccugguggaccugcccaucggcaucaacaucacccgguuccagacccugcuggcccugcaccggagcuaccugaccccaggcgacagcagcagcggguggacagcaggcgcggcugcuuacuacgugggcuaccugcagccccggaccuuccugcugaaguacaacgagaacggcaccaucaccgacgccguggacugcgcccuggacccucugagcgagaccaagugcacccugaagagcuucaccguggagaagggcaucuaccagaccagcaacuuccgggugcagcccaccgagagcaucgugcgguuccccaacaucaccaaccugugccccuucggcgagguguucaacgccacccgguucgccagcguguacgccuggaaccggaagcggaucagcaacugcguggccgacuacagcgugcuguacaacagcgccagcuucagcaccuucaagugcuacggcgugagccccaccaagcugaacgaccugugcuucaccaacguguacgccgacagcuucgugauccguggcgacgaggugcggcagaucgcacccggccagacaggcaagaucgccgacuacaacuacaagcugcccgacgacuucaccggcugcgugaucgccuggaacagcaacaaccucgacagcaaggugggcggcaacuacaacuaccuguuccggcuguuccggaagagcaaccugaagcccuucgagcgggacaucagcaccgagaucuaccaagccggcaacaccccuugcaacggcguggagggcuucaacugcuacuucccucugcagagcuacggcuuccagcccaccaacggcgugggcuaccagcccuaccgggugguggugcugagcuucgagcugcugcacgccccagccaccguguguggccccaagaagagcaccaaccuggugaagaacaagugcgugaacuucaacuucaacggccuuaccggcaccggcgugcugaccgagagcaacaagaaauuccugcccuuucagcaguucggccgggacaucgccgacaccaccgacgcugugcgggauccccagacccuggagauccuggacaucaccccuugcagcuucggcggcgugagcgugaucaccccaggcaccaacaccagcaaccagguggccgugcuguaccagggcgugaacugcaccgaggugcccguggccauccacgccgaccagcugacacccaccuggcgggucuacagcaccggcagcaacguguuccagacccgggccgguugccugaucggcgccgagcacgugaacaacagcuacgagugcgacauccccaucggcgccggcaucugugccagcuaccagacccagaccaauucaccccggagggcaaggagcguggccagccagagcgugaucgccuacaccaugagccugggcgccgagaacagcguggccuacagcaacaacagcaucgccauccccaccaacuucaccaucagcgugaccaccgagauucugcccgugagcaugaccaagaccagcguggacugcaccauguacaucugcggcgacagcaccgagugcagcaaccugcugcugcaguacggcagcuucugcacccagcugaaccgggcccugaccggcaucgccguggagcaggacaagaacacccaggagguguucgcccaggugaagcagaucuacaagaccccucccaucaaggacuucggcggcuucaacuucagccagauccugcccgaccccagcaagcccagcaagcggagcuucaucgaggaccugcuguucaacaaggugacccuagccgacgccggcuucaucaagcaguacggcgacugccucggcgacauagccgcccgggaccugaucugcgcccagaaguucaacggccugaccgugcugccuccccugcugaccgacgagaugaucgcccaguacaccagcgcccuguuagccggaaccaucaccagcggcuggacuuucggcgcuggagccgcucugcagauccccuucgccaugcagauggccuaccgguucaacggcaucggcgugacccagaacgugcuguacgagaaccagaagcugaucgccaaccaguucaacagcgccaucggcaagauccaggacagccugagcagcaccgcuagcgcccugggcaagcugcaggacguggugaaccagaacgcccaggcccugaacacccuggugaagcagcugagcagcaacuucggcgccaucagcagcgugcugaacgacauccugagccggcuggacaaggucgaggccgaggugcagaucgaccggcugaucacuggccggcugcagagccugcagaccuacgugacccagcagcugauccgggccgccgagauucgggccagcgccaaccuggccgccaccaagaugagcgagugcgugcugggccagagcaagcggguggacuucugcggcaagggcuaccaccugaugagcuuuccccagagcgcaccccacggagugguguuccugcacgugaccuacgugcccgcccaggagaagaacuucaccaccgccccagccaucugccacgacggcaaggcccacuuuccccgggagggcguguucgugagcaacggcacccacugguucgugacccagcggaacuucuacgagccccagaucaucaccaccgacaacaccuucgugagcggcaacugcgacguggugaucggcaucgugaacaacaccguguacgauccccugcagcccgagcuggacagcuucaaggaggagcuggacaaguacuucaagaaucacaccagccccgacguggaccugggcgacaucagcggcaucaacgccagcguggugaacauccagaaggagaucgaucggcugaacgagguggccaagaaccugaacgagagccugaucgaccugcaggagcugggcaaguacgagcaguacaucaaguggcccugguacaucuggcugggcuucaucgccggccugaucgccaucgugauggugaccaucaugcugugcugcaugaccagcugcugcagcugccugaagggcuguugcagcugcggcagcugcugcaaguucgacgaggacgacagcgagcccgugcugaagggcgugaagcugcacuacaccugaggacuaguuauaagacugacuagcccgaugggccucccaacgggcccuccuccccuccuugcaccgagauuaauaaaaaaaaaaaaaaaaaaaaaaaaaaaaaaaaaaaaaaaaaaaaaaaaaaaaaaaaaaaaaaaaugcaucccccccccccccccccccccccccccccccaaaggcucuuuucagagccaccagaauu

SEQ ID NO: 23236 - RNA, 4033 nt, Artificial Sequence
  SARS-CoV-2/Wuhan/WIV05/2019__EPI_ISL_402128 spike protein mRNA gc (1-1273)(H69del_V70del_Y453F_D614G_I692V_M1229I)
aggagaaagcuuaccauguucguguuccuggugcugcugccccuggugagcagccagugcgugaaccugaccacccggacccagcugccaccagccuacaccaacagcuucacccggggcgucuacuaccccgacaagguguuccggagcagcguccugcacagcacccaggaccuguuccugcccuucuucagcaacgugaccugguuccacgccaucagcggcaccaacggcaccaagcgguucgacaaccccgugcugcccuucaacgacggcguguacuucgccagcaccgagaagagcaacaucauccggggcuggaucuucggcaccacccuggacagcaagacccagagccugcugaucgugaauaacgccaccaacguggugaucaaggugugcgaguuccaguucugcaacgaccccuuccugggcguguacuaccacaagaacaacaagagcuggauggagagcgaguuccggguguacagcagcgccaacaacugcaccuucgaguacgugagccagcccuuccugauggaccuggagggcaagcagggcaacuucaagaaccugcgggaguucguguucaagaacaucgacggcuacuucaagaucuacagcaagcacaccccaaucaaccuggugcgggaucugccccagggcuucucagcccuggagccccugguggaccugcccaucggcaucaacaucacccgguuccagacccugcuggcccugcaccggagcuaccugaccccaggcgacagcagcagcggguggacagcaggcgcggcugcuuacuacgugggcuaccugcagccccggaccuuccugcugaaguacaacgagaacggcaccaucaccgacgccguggacugcgcccuggacccucugagcgagaccaagugcacccugaagagcuucaccguggagaagggcaucuaccagaccagcaacuuccgggugcagcccaccgagagcaucgugcgguuccccaacaucaccaaccugugccccuucggcgagguguucaacgccacccgguucgccagcguguacgccuggaaccggaagcggaucagcaacugcguggccgacuacagcgugcuguacaacagcgccagcuucagcaccuucaagugcuacggcgugagccccaccaagcugaacgaccugugcuucaccaacguguacgccgacagcuucgugauccguggcgacgaggugcggcagaucgcacccggccagacaggcaagaucgccgacuacaacuacaagcugcccgacgacuucaccggcugcgugaucgccuggaacagcaacaaccucgacagcaaggugggcggcaacuacaacuaccuguuccggcuguuccggaagagcaaccugaagcccuucgagcgggacaucagcaccgagaucuaccaagccggcuccaccccuugcaacggcguggagggcuucaacugcuacuucccucugcagagcuacggcuuccagcccaccaacggcgugggcuaccagcccuaccgggugguggugcugagcuucgagcugcugcacgccccagccaccguguguggccccaagaagagcaccaaccuggugaagaacaagugcgugaacuucaacuucaacggccuuaccggcaccggcgugcugaccgagagcaacaagaaauuccugcccuuucagcaguucggccgggacaucgccgacaccaccgacgcugugcgggauccccagacccuggagauccuggacaucaccccuugcagcuucggcggcgugagcgugaucaccccaggcaccaacaccagcaaccagguggccgugcuguaccagggcgugaacugcaccgaggugcccguggccauccacgccgaccagcugacacccaccuggcgggucuacagcaccggcagcaacguguuccagacccgggccgguugccugaucggcgccgagcacgugaacaacagcuacgagugcgacauccccaucggcgccggcaucugugccagcuaccagacccagaccaauucaccccggagggcaaggagcguggccagccagagcgugaucgccuacaccaugagccugggcgccgagaacagcguggccuacagcaacaacagcaucgccauccccaccaacuucaccaucagcgugaccaccgagauucugcccgugagcaugaccaagaccagcguggacugcaccauguacaucugcggcgacagcaccgagugcagcaaccugcugcugcaguacggcagcuucugcacccagcugaaccgggcccugaccggcaucgccguggagcaggacaagaacacccaggagguguucgcccaggugaagcagaucuacaagaccccucccaucaaggacuucggcggcuucaacuucagccagauccugcccgaccccagcaagcccagcaagcggagcuucaucgaggaccugcuguucaacaaggugacccuagccgacgccggcuucaucaagcaguacggcgacugccucggcgacauagccgcccgggaccugaucugcgcccagaaguucaacggccugaccgugcugccuccccugcugaccgacgagaugaucgcccaguacaccagcgcccuguuagccggaaccaucaccagcggcuggacuuucggcgcuggagccgcucugcagauccccuucgccaugcagauggccuaccgguucaacggcaucggcgugacccagaacgugcuguacgagaaccagaagcugaucgccaaccaguucaacagcgccaucggcaagauccaggacagccugagcagcaccgcuagcgcccugggcaagcugcaggacguggugaaccagaacgcccaggcccugaacacccuggugaagcagcugagcagcaacuucggcgccaucagcagcgugcugaacgacauccugagccggcuggacaaggucgaggccgaggugcagaucgaccggcugaucacuggccggcugcagagccugcagaccuacgugacccagcagcugauccgggccgccgagauucgggccagcgccaaccuggccgccaccaagaugagcgagugcgugcugggccagagcaagcggguggacuucugcggcaagggcuaccaccugaugagcuuuccccagagcgcaccccacggagugguguuccugcacgugaccuacgugcccgcccaggagaagaacuucaccaccgccccagccaucugccacgacggcaaggcccacuuuccccgggagggcguguucgugagcaacggcacccacugguucgugacccagcggaacuucuacgagccccagaucaucaccaccgacaacaccuucgugagcggcaacugcgacguggugaucggcaucgugaacaacaccguguacgauccccugcagcccgagcuggacagcuucaaggaggagcuggacaaguacuucaagaaucacaccagccccgacguggaccugggcgacaucagcggcaucaacgccagcguggugaacauccagaaggagaucgaucggcugaacgagguggccaagaaccugaacgagagccugaucgaccugcaggagcugggcaaguacgagcaguacaucaaguggcccugguacaucuggcugggcuucaucgccggccugaucgccaucgugaucgugaccaucaugcugugcugcaugaccagcugcugcagcugccugaagggcuguugcagcugcggcagcugcugcaaguucgacgaggacgacagcgagcccgugcugaagggcgugaagcugcacuacaccugaggacuaguuauaagacugacuagcccgaugggccucccaacgggcccuccuccccuccuugcaccgagauuaauaaaaaaaaaaaaaaaaaaaaaaaaaaaaaaaaaaaaaaaaaaaaaaaaaaaaaaaaaaaaaaaaugcaucccccccccccccccccccccccccccccccaaaggcucuuuucagagccaccagaauu

SEQ ID NO: 23237 - RNA, 4030 nt, Artificial Sequence
  SARS-CoV-2/Wuhan/WIV05/2019__EPI_ISL_402128 spike protein mRNA gc (1-1273)(H69del_V70del_Y144del_N501Y_A570D_D614G_P681H_T716I_S982 A_D1118H)
aggagaaagcuuaccauguucguguuccuggugcugcugccccuggugagcagccagugcgugaaccugaccacccggacccagcugccaccagccuacaccaacagcuucacccggggcgucuacuaccccgacaagguguuccggagcagcguccugcacagcacccaggaccuguuccugcccuucuucagcaacgugaccugguuccacgccaucagcggcaccaacggcaccaagcgguucgacaaccccgugcugcccuucaacgacggcguguacuucgccagcaccgagaagagcaacaucauccggggcuggaucuucggcaccacccuggacagcaagacccagagccugcugaucgugaauaacgccaccaacguggugaucaaggugugcgaguuccaguucugcaacgaccccuuccugggcguguaccacaagaacaacaagagcuggauggagagcgaguuccggguguacagcagcgccaacaacugcaccuucgaguacgugagccagcccuuccugauggaccuggagggcaagcagggcaacuucaagaaccugcgggaguucguguucaagaacaucgacggcuacuucaagaucuacagcaagcacaccccaaucaaccuggugcgggaucugccccagggcuucucagcccuggagccccugguggaccugcccaucggcaucaacaucacccgguuccagacccugcuggcccugcaccggagcuaccugaccccaggcgacagcagcagcggguggacagcaggcgcggcugcuuacuacgugggcuaccugcagccccggaccuuccugcugaaguacaacgagaacggcaccaucaccgacgccguggacugcgcccuggacccucugagcgagaccaagugcacccugaagagcuucaccguggagaagggcaucuaccagaccagcaacuuccgggugcagcccaccgagagcaucgugcgguuccccaacaucaccaaccugugccccuucggcgagguguucaacgccacccgguucgccagcguguacgccuggaaccggaagcggaucagcaacugcguggccgacuacagcgugcuguacaacagcgccagcuucagcaccuucaagugcuacggcgugagccccaccaagcugaacgaccugugcuucaccaacguguacgccgacagcuucgugauccguggcgacgaggugcggcagaucgcacccggccagacaggcaagaucgccgacuacaacuacaagcugcccgacgacuucaccggcugcgugaucgccuggaacagcaacaaccucgacagcaaggugggcggcaacuacaacuaccuguaccggcuguuccggaagagcaaccugaagcccuucgagcgggacaucagcaccgagaucuaccaagccggcuccaccccuugcaacggcguggagggcuucaacugcuacuucccucugcagagcuacggcuuccagcccaccuacggcgugggcuaccagcccuaccgggugguggugcugagcuucgagcugcugcacgccccagccaccguguguggccccaagaagagcaccaaccuggugaagaacaagugcgugaacuucaacuucaacggccuuaccggcaccggcgugcugaccgagagcaacaagaaauuccugcccuuucagcaguucggccgggacaucgacgacaccaccgacgcugugcgggauccccagacccuggagauccuggacaucaccccuugcagcuucggcggcgugagcgugaucaccccaggcaccaacaccagcaaccagguggccgugcuguaccagggcgugaacugcaccgaggugcccguggccauccacgccgaccagcugacacccaccuggcgggucuacagcaccggcagcaacguguuccagacccgggccgguugccugaucggcgccgagcacgugaacaacagcuacgagugcgacauccccaucggcgccggcaucugugccagcuaccagacccagaccaauucacaccggagggcaaggagcguggccagccagagcaucaucgccuacaccaugagccugggcgccgagaacagcguggccuacagcaacaacagcaucgccauccccaucaacuucaccaucagcgugaccaccgagauucugcccgugagcaugaccaagaccagcguggacugcaccauguacaucugcggcgacagcaccgagugcagcaaccugcugcugcaguacggcagcuucugcacccagcugaaccgggcccugaccggcaucgccguggagcaggacaagaacacccaggagguguucgcccaggugaagcagaucuacaagaccccucccaucaaggacuucggcggcuucaacuucagccagauccugcccgaccccagcaagcccagcaagcggagcuucaucgaggaccugcuguucaacaaggugacccuagccgacgccggcuucaucaagcaguacggcgacugccucggcgacauagccgcccgggaccugaucugcgcccagaaguucaacggccugaccgugcugccuccccugcugaccgacgagaugaucgcccaguacaccagcgcccuguuagccggaaccaucaccagcggcuggacuuucggcgcuggagccgcucugcagauccccuucgccaugcagauggccuaccgguucaacggcaucggcgugacccagaacgugcuguacgagaaccagaagcugaucgccaaccaguucaacagcgccaucggcaagauccaggacagccugagcagcaccgcuagcgcccugggcaagcugcaggacguggugaaccagaacgcccaggcccugaacacccuggugaagcagcugagcagcaacuucggcgccaucagcagcgugcugaacgacauccuggcccggcuggacaaggucgaggccgaggugcagaucgaccggcugaucacuggccggcugcagagccugcagaccuacgugacccagcagcugauccgggccgccgagauucgggccagcgccaaccuggccgccaccaagaugagcgagugcgugcugggccagagcaagcggguggacuucugcggcaagggcuaccaccugaugagcuuuccccagagcgcaccccacggagugguguuccugcacgugaccuacgugcccgcccaggagaagaacuucaccaccgccccagccaucugccacgacggcaaggcccacuuuccccgggagggcguguucgugagcaacggcacccacugguucgugacccagcggaacuucuacgagccccagaucaucaccacccacaacaccuucgugagcggcaacugcgacguggugaucggcaucgugaacaacaccguguacgauccccugcagcccgagcuggacagcuucaaggaggagcuggacaaguacuucaagaaucacaccagccccgacguggaccugggcgacaucagcggcaucaacgccagcguggugaacauccagaaggagaucgaucggcugaacgagguggccaagaaccugaacgagagccugaucgaccugcaggagcugggcaaguacgagcaguacaucaaguggcccugguacaucuggcugggcuucaucgccggccugaucgccaucgugauggugaccaucaugcugugcugcaugaccagcugcugcagcugccugaagggcuguugcagcugcggcagcugcugcaaguucgacgaggacgacagcgagcccgugcugaagggcgugaagcugcacuacaccugaggacuaguuauaagacugacuagcccgaugggccucccaacgggcccuccuccccuccuugcaccgagauuaauaaaaaaaaaaaaaaaaaaaaaaaaaaaaaaaaaaaaaaaaaaaaaaaaaaaaaaaaaaaaaaaaugcaucccccccccccccccccccccccccccccccaaaggcucuuuucagagccaccagaauu

SEQ ID NO: 23238 - RNA, 4039 nt, Artificial Sequence
  SARS-CoV-2/Wuhan/WIV05/2019__EPI_ISL_402128 spike protein mRNA gc (1-1273)(K417N_E484K_N501Y_D614G)
aggagaaagcuuaccauguucguguuccuggugcugcugccccuggugagcagccagugcgugaaccugaccacccggacccagcugccaccagccuacaccaacagcuucacccggggcgucuacuaccccgacaagguguuccggagcagcguccugcacagcacccaggaccuguuccugcccuucuucagcaacgugaccugguuccacgccauccacgugagcggcaccaacggcaccaagcgguucgacaaccccgugcugcccuucaacgacggcguguacuucgccagcaccgagaagagcaacaucauccggggcuggaucuucggcaccacccuggacagcaagacccagagccugcugaucgugaauaacgccaccaacguggugaucaaggugugcgaguuccaguucugcaacgaccccuuccugggcguguacuaccacaagaacaacaagagcuggauggagagcgaguuccggguguacagcagcgccaacaacugcaccuucgaguacgugagccagcccuuccugauggaccuggagggcaagcagggcaacuucaagaaccugcgggaguucguguucaagaacaucgacggcuacuucaagaucuacagcaagcacaccccaaucaaccuggugcgggaucugccccagggcuucucagcccuggagccccugguggaccugcccaucggcaucaacaucacccgguuccagacccugcuggcccugcaccggagcuaccugaccccaggcgacagcagcagcggguggacagcaggcgcggcugcuuacuacgugggcuaccugcagccccggaccuuccugcugaaguacaacgagaacggcaccaucaccgacgccguggacugcgcccuggacccucugagcgagaccaagugcacccugaagagcuucaccguggagaagggcaucuaccagaccagcaacuuccgggugcagcccaccgagagcaucgugcgguuccccaacaucaccaaccugugccccuucggcgagguguucaacgccacccgguucgccagcguguacgccuggaaccggaagcggaucagcaacugcguggccgacuacagcgugcuguacaacagcgccagcuucagcaccuucaagugcuacggcgugagccccaccaagcugaacgaccugugcuucaccaacguguacgccgacagcuucgugauccguggcgacgaggugcggcagaucgcacccggccagacaggcaacaucgccgacuacaacuacaagcugcccgacgacuucaccggcugcgugaucgccuggaacagcaacaaccucgacagcaaggugggcggcaacuacaacuaccuguaccggcuguuccggaagagcaaccugaagcccuucgagcgggacaucagcaccgagaucuaccaagccggcuccaccccuugcaacggcgugaagggcuucaacugcuacuucccucugcagagcuacggcuuccagcccaccuacggcgugggcuaccagcccuaccgggugguggugcugagcuucgagcugcugcacgccccagccaccguguguggccccaagaagagcaccaaccuggugaagaacaagugcgugaacuucaacuucaacggccuuaccggcaccggcgugcugaccgagagcaacaagaaauuccugcccuuucagcaguucggccgggacaucgccgacaccaccgacgcugugcgggauccccagacccuggagauccuggacaucaccccuugcagcuucggcggcgugagcgugaucaccccaggcaccaacaccagcaaccagguggccgugcuguaccagggcgugaacugcaccgaggugcccguggccauccacgccgaccagcugacacccaccuggcgggucuacagcaccggcagcaacguguuccagacccgggccgguugccugaucggcgccgagcacgugaacaacagcuacgagugcgacauccccaucggcgccggcaucugugccagcuaccagacccagaccaauucaccccggagggcaaggagcguggccagccagagcaucaucgccuacaccaugagccugggcgccgagaacagcguggccuacagcaacaacagcaucgccauccccaccaacuucaccaucagcgugaccaccgagauucugcccgugagcaugaccaagaccagcguggacugcaccauguacaucugcggcgacagcaccgagugcagcaaccugcugcugcaguacggcagcuucugcacccagcugaaccgggcccugaccggcaucgccguggagcaggacaagaacacccaggagguguucgcccaggugaagcagaucuacaagaccccucccaucaaggacuucggcggcuucaacuucagccagauccugcccgaccccagcaagcccagcaagcggagcuucaucgaggaccugcuguucaacaaggugacccuagccgacgccggcuucaucaagcaguacggcgacugccucggcgacauagccgcccgggaccugaucugcgcccagaaguucaacggccugaccgugcugccuccccugcugaccgacgagaugaucgcccaguacaccagcgcccuguuagccggaaccaucaccagcggcuggacuuucggcgcuggagccgcucugcagauccccuucgccaugcagauggccuaccgguucaacggcaucggcgugacccagaacgugcuguacgagaaccagaagcugaucgccaaccaguucaacagcgccaucggcaagauccaggacagccugagcagcaccgcuagcgcccugggcaagcugcaggacguggugaaccagaacgcccaggcccugaacacccuggugaagcagcugagcagcaacuucggcgccaucagcagcgugcugaacgacauccugagccggcuggacaaggucgaggccgaggugcagaucgaccggcugaucacuggccggcugcagagccugcagaccuacgugacccagcagcugauccgggccgccgagauucgggccagcgccaaccuggccgccaccaagaugagcgagugcgugcugggccagagcaagcggguggacuucugcggcaagggcuaccaccugaugagcuuuccccagagcgcaccccacggagugguguuccugcacgugaccuacgugcccgcccaggagaagaacuucaccaccgccccagccaucugccacgacggcaaggcccacuuuccccgggagggcguguucgugagcaacggcacccacugguucgugacccagcggaacuucuacgagccccagaucaucaccaccgacaacaccuucgugagcggcaacugcgacguggugaucggcaucgugaacaacaccguguacgauccccugcagcccgagcuggacagcuucaaggaggagcuggacaaguacuucaagaaucacaccagccccgacguggaccugggcgacaucagcggcaucaacgccagcguggugaacauccagaaggagaucgaucggcugaacgagguggccaagaaccugaacgagagccugaucgaccugcaggagcugggcaaguacgagcaguacaucaaguggcccugguacaucuggcugggcuucaucgccggccugaucgccaucgugauggugaccaucaugcugugcugcaugaccagcugcugcagcugccugaagggcuguugcagcugcggcagcugcugcaaguucgacgaggacgacagcgagcccgugcugaagggcgugaagcugcacuacaccugaggacuaguuauaagacugacuagcccgaugggccucccaacgggcccuccuccccuccuugcaccgagauuaauaaaaaaaaaaaaaaaaaaaaaaaaaaaaaaaaaaaaaaaaaaaaaaaaaaaaaaaaaaaaaaaaugcaucccccccccccccccccccccccccccccccaaaggcucuuuucagagccaccagaauu

SEQ ID NO: 23239 - RNA, 4030 nt, Artificial Sequence
  SARS-CoV-2/Wuhan/WIV05/2019__EPI_ISL_402128 spike protein mRNA gc (1-1273)(L18F_D80A_D215G_L242del_A243del_L244del_R246I_K417N_E484 K_N501Y_D614G_A701V)
aggagaaagcuuaccauguucguguuccuggugcugcugccccuggugagcagccagugcgugaacuucaccacccggacccagcugccaccagccuacaccaacagcuucacccggggcgucuacuaccccgacaagguguuccggagcagcguccugcacagcacccaggaccuguuccugcccuucuucagcaacgugaccugguuccacgccauccacgugagcggcaccaacggcaccaagcgguucgccaaccccgugcugcccuucaacgacggcguguacuucgccagcaccgagaagagcaacaucauccggggcuggaucuucggcaccacccuggacagcaagacccagagccugcugaucgugaauaacgccaccaacguggugaucaaggugugcgaguuccaguucugcaacgaccccuuccugggcguguacuaccacaagaacaacaagagcuggauggagagcgaguuccggguguacagcagcgccaacaacugcaccuucgaguacgugagccagcccuuccugauggaccuggagggcaagcagggcaacuucaagaaccugcgggaguucguguucaagaacaucgacggcuacuucaagaucuacagcaagcacaccccaaucaaccuggugcggggccugccccagggcuucucagcccuggagccccugguggaccugcccaucggcaucaacaucacccgguuccagacccugcacaucagcuaccugaccccaggcgacagcagcagcggguggacagcaggcgcggcugcuuacuacgugggcuaccugcagccccggaccuuccugcugaaguacaacgagaacggcaccaucaccgacgccguggacugcgcccuggacccucugagcgagaccaagugcacccugaagagcuucaccguggagaagggcaucuaccagaccagcaacuuccgggugcagcccaccgagagcaucgugcgguuccccaacaucaccaaccugugccccuucggcgagguguucaacgccacccgguucgccagcguguacgccuggaaccggaagcggaucagcaacugcguggccgacuacagcgugcuguacaacagcgccagcuucagcaccuucaagugcuacggcgugagccccaccaagcugaacgaccugugcuucaccaacguguacgccgacagcuucgugauccguggcgacgaggugcggcagaucgcacccggccagacaggcaacaucgccgacuacaacuacaagcugcccgacgacuucaccggcugcgugaucgccuggaacagcaacaaccucgacagcaaggugggcggcaacuacaacuaccuguaccggcuguuccggaagagcaaccugaagcccuucgagcgggacaucagcaccgagaucuaccaagccggcuccaccccuugcaacggcgugaagggcuucaacugcuacuucccucugcagagcuacggcuuccagcccaccuacggcgugggcuaccagcccuaccgggugguggugcugagcuucgagcugcugcacgccccagccaccguguguggccccaagaagagcaccaaccuggugaagaacaagugcgugaacuucaacuucaacggccuuaccggcaccggcgugcugaccgagagcaacaagaaauuccugcccuuucagcaguucggccgggacaucgccgacaccaccgacgcugugcgggauccccagacccuggagauccuggacaucaccccuugcagcuucggcggcgugagcgugaucaccccaggcaccaacaccagcaaccagguggccgugcuguaccagggcgugaacugcaccgaggugcccguggccauccacgccgaccagcugacacccaccuggcgggucuacagcaccggcagcaacguguuccagacccgggccgguugccugaucggcgccgagcacgugaacaacagcuacgagugcgacauccccaucggcgccggcaucugugccagcuaccagacccagaccaauucaccccggagggcaaggagcguggccagccagagcaucaucgccuacaccaugagccugggcguggagaacagcguggccuacagcaacaacagcaucgccauccccaccaacuucaccaucagcgugaccaccgagauucugcccgugagcaugaccaagaccagcguggacugcaccauguacaucugcggcgacagcaccgagugcagcaaccugcugcugcaguacggcagcuucugcacccagcugaaccgggcccugaccggcaucgccguggagcaggacaagaacacccaggagguguucgcccaggugaagcagaucuacaagaccccucccaucaaggacuucggcggcuucaacuucagccagauccugcccgaccccagcaagcccagcaagcggagcuucaucgaggaccugcuguucaacaaggugacccuagccgacgccggcuucaucaagcaguacggcgacugccucggcgacauagccgcccgggaccugaucugcgcccagaaguucaacggccugaccgugcugccuccccugcugaccgacgagaugaucgcccaguacaccagcgcccuguuagccggaaccaucaccagcggcuggacuuucggcgcuggagccgcucugcagauccccuucgccaugcagauggccuaccgguucaacggcaucggcgugacccagaacgugcuguacgagaaccagaagcugaucgccaaccaguucaacagcgccaucggcaagauccaggacagccugagcagcaccgcuagcgcccugggcaagcugcaggacguggugaaccagaacgcccaggcccugaacacccuggugaagcagcugagcagcaacuucggcgccaucagcagcgugcugaacgacauccugagccggcuggacaaggucgaggccgaggugcagaucgaccggcugaucacuggccggcugcagagccugcagaccuacgugacccagcagcugauccgggccgccgagauucgggccagcgccaaccuggccgccaccaagaugagcgagugcgugcugggccagagcaagcggguggacuucugcggcaagggcuaccaccugaugagcuuuccccagagcgcaccccacggagugguguuccugcacgugaccuacgugcccgcccaggagaagaacuucaccaccgccccagccaucugccacgacggcaaggcccacuuuccccgggagggcguguucgugagcaacggcacccacugguucgugacccagcggaacuucuacgagccccagaucaucaccaccgacaacaccuucgugagcggcaacugcgacguggugaucggcaucgugaacaacaccguguacgauccccugcagcccgagcuggacagcuucaaggaggagcuggacaaguacuucaagaaucacaccagccccgacguggaccugggcgacaucagcggcaucaacgccagcguggugaacauccagaaggagaucgaucggcugaacgagguggccaagaaccugaacgagagccugaucgaccugcaggagcugggcaaguacgagcaguacaucaaguggcccugguacaucuggcugggcuucaucgccggccugaucgccaucgugauggugaccaucaugcugugcugcaugaccagcugcugcagcugccugaagggcuguugcagcugcggcagcugcugcaaguucgacgaggacgacagcgagcccgugcugaagggcgugaagcugcacuacaccugaggacuaguuauaagacugacuagcccgaugggccucccaacgggcccuccuccccuccuugcaccgagauuaauaaaaaaaaaaaaaaaaaaaaaaaaaaaaaaaaaaaaaaaaaaaaaaaaaaaaaaaaaaaaaaaaugcaucccccccccccccccccccccccccccccccaaaggcucuuuucagagccaccagaauu

SEQ ID NO: 23240 - RNA, 4039 nt, Artificial Sequence
  SARS-CoV-2/Wuhan/WIV05/2019__EPI_ISL_402128 spike protein mRNA gc (1-1273)(E484K_D614G)
aggagaaagcuuaccauguucguguuccuggugcugcugccccuggugagcagccagugcgugaaccugaccacccggacccagcugccaccagccuacaccaacagcuucacccggggcgucuacuaccccgacaagguguuccggagcagcguccugcacagcacccaggaccuguuccugcccuucuucagcaacgugaccugguuccacgccauccacgugagcggcaccaacggcaccaagcgguucgacaaccccgugcugcccuucaacgacggcguguacuucgccagcaccgagaagagcaacaucauccggggcuggaucuucggcaccacccuggacagcaagacccagagccugcugaucgugaauaacgccaccaacguggugaucaaggugugcgaguuccaguucugcaacgaccccuuccugggcguguacuaccacaagaacaacaagagcuggauggagagcgaguuccggguguacagcagcgccaacaacugcaccuucgaguacgugagccagcccuuccugauggaccuggagggcaagcagggcaacuucaagaaccugcgggaguucguguucaagaacaucgacggcuacuucaagaucuacagcaagcacaccccaaucaaccuggugcgggaucugccccagggcuucucagcccuggagccccugguggaccugcccaucggcaucaacaucacccgguuccagacccugcuggcccugcaccggagcuaccugaccccaggcgacagcagcagcggguggacagcaggcgcggcugcuuacuacgugggcuaccugcagccccggaccuuccugcugaaguacaacgagaacggcaccaucaccgacgccguggacugcgcccuggacccucugagcgagaccaagugcacccugaagagcuucaccguggagaagggcaucuaccagaccagcaacuuccgggugcagcccaccgagagcaucgugcgguuccccaacaucaccaaccugugccccuucggcgagguguucaacgccacccgguucgccagcguguacgccuggaaccggaagcggaucagcaacugcguggccgacuacagcgugcuguacaacagcgccagcuucagcaccuucaagugcuacggcgugagccccaccaagcugaacgaccugugcuucaccaacguguacgccgacagcuucgugauccguggcgacgaggugcggcagaucgcacccggccagacaggcaagaucgccgacuacaacuacaagcugcccgacgacuucaccggcugcgugaucgccuggaacagcaacaaccucgacagcaaggugggcggcaacuacaacuaccuguaccggcuguuccggaagagcaaccugaagcccuucgagcgggacaucagcaccgagaucuaccaagccggcuccaccccuugcaacggcgugaagggcuucaacugcuacuucccucugcagagcuacggcuuccagcccaccaacggcgugggcuaccagcccuaccgggugguggugcugagcuucgagcugcugcacgccccagccaccguguguggccccaagaagagcaccaaccuggugaagaacaagugcgugaacuucaacuucaacggccuuaccggcaccggcgugcugaccgagagcaacaagaaauuccugcccuuucagcaguucggccgggacaucgccgacaccaccgacgcugugcgggauccccagacccuggagauccuggacaucaccccuugcagcuucggcggcgugagcgugaucaccccaggcaccaacaccagcaaccagguggccgugcuguaccagggcgugaacugcaccgaggugcccguggccauccacgccgaccagcugacacccaccuggcgggucuacagcaccggcagcaacguguuccagacccgggccgguugccugaucggcgccgagcacgugaacaacagcuacgagugcgacauccccaucggcgccggcaucugugccagcuaccagacccagaccaauucaccccggagggcaaggagcguggccagccagagcaucaucgccuacaccaugagccugggcgccgagaacagcguggccuacagcaacaacagcaucgccauccccaccaacuucaccaucagcgugaccaccgagauucugcccgugagcaugaccaagaccagcguggacugcaccauguacaucugcggcgacagcaccgagugcagcaaccugcugcugcaguacggcagcuucugcacccagcugaaccgggcccugaccggcaucgccguggagcaggacaagaacacccaggagguguucgcccaggugaagcagaucuacaagaccccucccaucaaggacuucggcggcuucaacuucagccagauccugcccgaccccagcaagcccagcaagcggagcuucaucgaggaccugcuguucaacaaggugacccuagccgacgccggcuucaucaagcaguacggcgacugccucggcgacauagccgcccgggaccugaucugcgcccagaaguucaacggccugaccgugcugccuccccugcugaccgacgagaugaucgcccaguacaccagcgcccuguuagccggaaccaucaccagcggcuggacuuucggcgcuggagccgcucugcagauccccuucgccaugcagauggccuaccgguucaacggcaucggcgugacccagaacgugcuguacgagaaccagaagcugaucgccaaccaguucaacagcgccaucggcaagauccaggacagccugagcagcaccgcuagcgcccugggcaagcugcaggacguggugaaccagaacgcccaggcccugaacacccuggugaagcagcugagcagcaacuucggcgccaucagcagcgugcugaacgacauccugagccggcuggacaaggucgaggccgaggugcagaucgaccggcugaucacuggccggcugcagagccugcagaccuacgugacccagcagcugauccgggccgccgagauucgggccagcgccaaccuggccgccaccaagaugagcgagugcgugcugggccagagcaagcggguggacuucugcggcaagggcuaccaccugaugagcuuuccccagagcgcaccccacggagugguguuccugcacgugaccuacgugcccgcccaggagaagaacuucaccaccgccccagccaucugccacgacggcaaggcccacuuuccccgggagggcguguucgugagcaacggcacccacugguucgugacccagcggaacuucuacgagccccagaucaucaccaccgacaacaccuucgugagcggcaacugcgacguggugaucggcaucgugaacaacaccguguacgauccccugcagcccgagcuggacagcuucaaggaggagcuggacaaguacuucaagaaucacaccagccccgacguggaccugggcgacaucagcggcaucaacgccagcguggugaacauccagaaggagaucgaucggcugaacgagguggccaagaaccugaacgagagccugaucgaccugcaggagcugggcaaguacgagcaguacaucaaguggcccugguacaucuggcugggcuucaucgccggccugaucgccaucgugauggugaccaucaugcugugcugcaugaccagcugcugcagcugccugaagggcuguugcagcugcggcagcugcugcaaguucgacgaggacgacagcgagcccgugcugaagggcgugaagcugcacuacaccugaggacuaguuauaagacugacuagcccgaugggccucccaacgggcccuccuccccuccuugcaccgagauuaauaaaaaaaaaaaaaaaaaaaaaaaaaaaaaaaaaaaaaaaaaaaaaaaaaaaaaaaaaaaaaaaaugcaucccccccccccccccccccccccccccccccaaaggcucuuuucagagccaccagaauu

SEQ ID NO: 23241 - RNA, 4039 nt, Artificial Sequence
  SARS-CoV-2/Wuhan/WIV05/2019__EPI_ISL_402128 spike protein mRNA gc (1-1273)(L18F_T20N_P26S_D138Y_R190S_K417T_E484K_N501Y_D614G_H655Y _T1027I)
aggagaaagcuuaccauguucguguuccuggugcugcugccccuggugagcagccagugcgugaacuucaccaaccggacccagcugccaagcgccuacaccaacagcuucacccggggcgucuacuaccccgacaagguguuccggagcagcguccugcacagcacccaggaccuguuccugcccuucuucagcaacgugaccugguuccacgccauccacgugagcggcaccaacggcaccaagcgguucgacaaccccgugcugcccuucaacgacggcguguacuucgccagcaccgagaagagcaacaucauccggggcuggaucuucggcaccacccuggacagcaagacccagagccugcugaucgugaauaacgccaccaacguggugaucaaggugugcgaguuccaguucugcaacuaccccuuccugggcguguacuaccacaagaacaacaagagcuggauggagagcgaguuccggguguacagcagcgccaacaacugcaccuucgaguacgugagccagcccuuccugauggaccuggagggcaagcagggcaacuucaagaaccugagcgaguucguguucaagaacaucgacggcuacuucaagaucuacagcaagcacaccccaaucaaccuggugcgggaucugccccagggcuucucagcccuggagccccugguggaccugcccaucggcaucaacaucacccgguuccagacccugcuggcccugcaccggagcuaccugaccccaggcgacagcagcagcggguggacagcaggcgcggcugcuuacuacgugggcuaccugcagccccggaccuuccugcugaaguacaacgagaacggcaccaucaccgacgccguggacugcgcccuggacccucugagcgagaccaagugcacccugaagagcuucaccguggagaagggcaucuaccagaccagcaacuuccgggugcagcccaccgagagcaucgugcgguuccccaacaucaccaaccugugccccuucggcgagguguucaacgccacccgguucgccagcguguacgccuggaaccggaagcggaucagcaacugcguggccgacuacagcgugcuguacaacagcgccagcuucagcaccuucaagugcuacggcgugagccccaccaagcugaacgaccugugcuucaccaacguguacgccgacagcuucgugauccguggcgacgaggugcggcagaucgcacccggccagacaggcaccaucgccgacuacaacuacaagcugcccgacgacuucaccggcugcgugaucgccuggaacagcaacaaccucgacagcaaggugggcggcaacuacaacuaccuguaccggcuguuccggaagagcaaccugaagcccuucgagcgggacaucagcaccgagaucuaccaagccggcuccaccccuugcaacggcgugaagggcuucaacugcuacuucccucugcagagcuacggcuuccagcccaccuacggcgugggcuaccagcccuaccgggugguggugcugagcuucgagcugcugcacgccccagccaccguguguggccccaagaagagcaccaaccuggugaagaacaagugcgugaacuucaacuucaacggccuuaccggcaccggcgugcugaccgagagcaacaagaaauuccugcccuuucagcaguucggccgggacaucgccgacaccaccgacgcugugcgggauccccagacccuggagauccuggacaucaccccuugcagcuucggcggcgugagcgugaucaccccaggcaccaacaccagcaaccagguggccgugcuguaccagggcgugaacugcaccgaggugcccguggccauccacgccgaccagcugacacccaccuggcgggucuacagcaccggcagcaacguguuccagacccgggccgguugccugaucggcgccgaguacgugaacaacagcuacgagugcgacauccccaucggcgccggcaucugugccagcuaccagacccagaccaauucaccccggagggcaaggagcguggccagccagagcaucaucgccuacaccaugagccugggcgccgagaacagcguggccuacagcaacaacagcaucgccauccccaccaacuucaccaucagcgugaccaccgagauucugcccgugagcaugaccaagaccagcguggacugcaccauguacaucugcggcgacagcaccgagugcagcaaccugcugcugcaguacggcagcuucugcacccagcugaaccgggcccugaccggcaucgccguggagcaggacaagaacacccaggagguguucgcccaggugaagcagaucuacaagaccccucccaucaaggacuucggcggcuucaacuucagccagauccugcccgaccccagcaagcccagcaagcggagcuucaucgaggaccugcuguucaacaaggugacccuagccgacgccggcuucaucaagcaguacggcgacugccucggcgacauagccgcccgggaccugaucugcgcccagaaguucaacggccugaccgugcugccuccccugcugaccgacgagaugaucgcccaguacaccagcgcccuguuagccggaaccaucaccagcggcuggacuuucggcgcuggagccgcucugcagauccccuucgccaugcagauggccuaccgguucaacggcaucggcgugacccagaacgugcuguacgagaaccagaagcugaucgccaaccaguucaacagcgccaucggcaagauccaggacagccugagcagcaccgcuagcgcccugggcaagcugcaggacguggugaaccagaacgcccaggcccugaacacccuggugaagcagcugagcagcaacuucggcgccaucagcagcgugcugaacgacauccugagccggcuggacaaggucgaggccgaggugcagaucgaccggcugaucacuggccggcugcagagccugcagaccuacgugacccagcagcugauccgggccgccgagauucgggccagcgccaaccuggccgccaucaagaugagcgagugcgugcugggccagagcaagcggguggacuucugcggcaagggcuaccaccugaugagcuuuccccagagcgcaccccacggagugguguuccugcacgugaccuacgugcccgcccaggagaagaacuucaccaccgccccagccaucugccacgacggcaaggcccacuuuccccgggagggcguguucgugagcaacggcacccacugguucgugacccagcggaacuucuacgagccccagaucaucaccaccgacaacaccuucgugagcggcaacugcgacguggugaucggcaucgugaacaacaccguguacgauccccugcagcccgagcuggacagcuucaaggaggagcuggacaaguacuucaagaaucacaccagccccgacguggaccugggcgacaucagcggcaucaacgccagcguggugaacauccagaaggagaucgaucggcugaacgagguggccaagaaccugaacgagagccugaucgaccugcaggagcugggcaaguacgagcaguacaucaaguggcccugguacaucuggcugggcuucaucgccggccugaucgccaucgugauggugaccaucaugcugugcugcaugaccagcugcugcagcugccugaagggcuguugcagcugcggcagcugcugcaaguucgacgaggacgacagcgagcccgugcugaagggcgugaagcugcacuacaccugaggacuaguuauaagacugacuagcccgaugggccucccaacgggcccuccuccccuccuugcaccgagauuaauaaaaaaaaaaaaaaaaaaaaaaaaaaaaaaaaaaaaaaaaaaaaaaaaaaaaaaaaaaaaaaaaugcaucccccccccccccccccccccccccccccccaaaggcucuuuucagagccaccagaauu

SEQ ID NO: 23242 - RNA, 4039 nt, Artificial Sequence
  SARS-CoV-2/Wuhan/WIV05/2019__EPI_ISL_402128 spike protein mRNA gc (1-1273)(S13I_W152C_L452R_D614G)
aggagaaagcuuaccauguucguguuccuggugcugcugccccuggugagcauccagugcgugaaccugaccacccggacccagcugccaccagccuacaccaacagcuucacccggggcgucuacuaccccgacaagguguuccggagcagcguccugcacagcacccaggaccuguuccugcccuucuucagcaacgugaccugguuccacgccauccacgugagcggcaccaacggcaccaagcgguucgacaaccccgugcugcccuucaacgacggcguguacuucgccagcaccgagaagagcaacaucauccggggcuggaucuucggcaccacccuggacagcaagacccagagccugcugaucgugaauaacgccaccaacguggugaucaaggugugcgaguuccaguucugcaacgaccccuuccugggcguguacuaccacaagaacaacaagagcugcauggagagcgaguuccggguguacagcagcgccaacaacugcaccuucgaguacgugagccagcccuuccugauggaccuggagggcaagcagggcaacuucaagaaccugcgggaguucguguucaagaacaucgacggcuacuucaagaucuacagcaagcacaccccaaucaaccuggugcgggaucugccccagggcuucucagcccuggagccccugguggaccugcccaucggcaucaacaucacccgguuccagacccugcuggcccugcaccggagcuaccugaccccaggcgacagcagcagcggguggacagcaggcgcggcugcuuacuacgugggcuaccugcagccccggaccuuccugcugaaguacaacgagaacggcaccaucaccgacgccguggacugcgcccuggacccucugagcgagaccaagugcacccugaagagcuucaccguggagaagggcaucuaccagaccagcaacuuccgggugcagcccaccgagagcaucgugcgguuccccaacaucaccaaccugugccccuucggcgagguguucaacgccacccgguucgccagcguguacgccuggaaccggaagcggaucagcaacugcguggccgacuacagcgugcuguacaacagcgccagcuucagcaccuucaagugcuacggcgugagccccaccaagcugaacgaccugugcuucaccaacguguacgccgacagcuucgugauccguggcgacgaggugcggcagaucgcacccggccagacaggcaagaucgccgacuacaacuacaagcugcccgacgacuucaccggcugcgugaucgccuggaacagcaacaaccucgacagcaaggugggcggcaacuacaacuaccgcuaccggcuguuccggaagagcaaccugaagcccuucgagcgggacaucagcaccgagaucuaccaagccggcuccaccccuugcaacggcguggagggcuucaacugcuacuucccucugcagagcuacggcuuccagcccaccaacggcgugggcuaccagcccuaccgggugguggugcugagcuucgagcugcugcacgccccagccaccguguguggccccaagaagagcaccaaccuggugaagaacaagugcgugaacuucaacuucaacggccuuaccggcaccggcgugcugaccgagagcaacaagaaauuccugcccuuucagcaguucggccgggacaucgccgacaccaccgacgcugugcgggauccccagacccuggagauccuggacaucaccccuugcagcuucggcggcgugagcgugaucaccccaggcaccaacaccagcaaccagguggccgugcuguaccagggcgugaacugcaccgaggugcccguggccauccacgccgaccagcugacacccaccuggcgggucuacagcaccggcagcaacguguuccagacccgggccgguugccugaucggcgccgagcacgugaacaacagcuacgagugcgacauccccaucggcgccggcaucugugccagcuaccagacccagaccaauucaccccggagggcaaggagcguggccagccagagcaucaucgccuacaccaugagccugggcgccgagaacagcguggccuacagcaacaacagcaucgccauccccaccaacuucaccaucagcgugaccaccgagauucugcccgugagcaugaccaagaccagcguggacugcaccauguacaucugcggcgacagcaccgagugcagcaaccugcugcugcaguacggcagcuucugcacccagcugaaccgggcccugaccggcaucgccguggagcaggacaagaacacccaggagguguucgcccaggugaagcagaucuacaagaccccucccaucaaggacuucggcggcuucaacuucagccagauccugcccgaccccagcaagcccagcaagcggagcuucaucgaggaccugcuguucaacaaggugacccuagccgacgccggcuucaucaagcaguacggcgacugccucggcgacauagccgcccgggaccugaucugcgcccagaaguucaacggccugaccgugcugccuccccugcugaccgacgagaugaucgcccaguacaccagcgcccuguuagccggaaccaucaccagcggcuggacuuucggcgcuggagccgcucugcagauccccuucgccaugcagauggccuaccgguucaacggcaucggcgugacccagaacgugcuguacgagaaccagaagcugaucgccaaccaguucaacagcgccaucggcaagauccaggacagccugagcagcaccgcuagcgcccugggcaagcugcaggacguggugaaccagaacgcccaggcccugaacacccuggugaagcagcugagcagcaacuucggcgccaucagcagcgugcugaacgacauccugagccggcuggacaaggucgaggccgaggugcagaucgaccggcugaucacuggccggcugcagagccugcagaccuacgugacccagcagcugauccgggccgccgagauucgggccagcgccaaccuggccgccaccaagaugagcgagugcgugcugggccagagcaagcggguggacuucugcggcaagggcuaccaccugaugagcuuuccccagagcgcaccccacggagugguguuccugcacgugaccuacgugcccgcccaggagaagaacuucaccaccgccccagccaucugccacgacggcaaggcccacuuuccccgggagggcguguucgugagcaacggcacccacugguucgugacccagcggaacuucuacgagccccagaucaucaccaccgacaacaccuucgugagcggcaacugcgacguggugaucggcaucgugaacaacaccguguacgauccccugcagcccgagcuggacagcuucaaggaggagcuggacaaguacuucaagaaucacaccagccccgacguggaccugggcgacaucagcggcaucaacgccagcguggugaacauccagaaggagaucgaucggcugaacgagguggccaagaaccugaacgagagccugaucgaccugcaggagcugggcaaguacgagcaguacaucaaguggcccugguacaucuggcugggcuucaucgccggccugaucgccaucgugauggugaccaucaugcugugcugcaugaccagcugcugcagcugccugaagggcuguugcagcugcggcagcugcugcaaguucgacgaggacgacagcgagcccgugcugaagggcgugaagcugcacuacaccugaggacuaguuauaagacugacuagcccgaugggccucccaacgggcccuccuccccuccuugcaccgagauuaauaaaaaaaaaaaaaaaaaaaaaaaaaaaaaaaaaaaaaaaaaaaaaaaaaaaaaaaaaaaaaaaaugcaucccccccccccccccccccccccccccccccaaaggcucuuuucagagccaccagaauu

SEQ ID NO: 23243 - RNA, 4039 nt, Artificial Sequence
  SARS-CoV-2/Wuhan/WIV05/2019__EPI_ISL_402128 spike protein mRNA gc (1-1273)
aggagaaagcuuaccauguucguguuccuggugcugcugccccuggugagcagccagugcgugaaccugaccacccggacccagcugcccccugccuacaccaacagcuucacccggggcguguacuaccccgacaagguguuccggagcagcgugcugcacagcacccaggaccuguuccugcccuucuucagcaacgugaccugguuccacgccauccacgugagcggcaccaacggcaccaagcgguucgacaacccagugcugcccuucaacgacggcguguacuucgccagcaccgagaagucaaacaucauccggggcuggaucuucggcaccacccuggacagcaagacacagagccugcugaucgugaacaacgccaccaacguggugaucaaggugugcgaguuucaguucugcaacgaccccuuccugggcguguacuaccacaagaacaacaagagcuggauggagagcgaguuccgggucuacagcagcgcuaacaauugcaccuucgaguacgugagccagcccuuccugauggaccucgagggcaagcagggcaacuucaagaaccugcgggaguucguguucaagaacaucgauggcuacuucaagaucuacagcaagcacacccccaucaaccuggugcgggaccugccccagggauucagcgcccuggagccucugguggaccugcccaucggcaucaacaucaccagguuccagacccugcuggcccugcaccggagcuaccugacccccggcgacagcagcagcggcuggaccgccggcgccgccgcauacuacgugggcuaccugcagccacggaccuuccugcugaaguacaacgagaacggcaccaucaccgacgccguggacugcgcccuggacccccugagcgagaccaagugcacccuaaagagcuucaccguggagaagggcaucuaccagaccagcaacuuccgggugcagcccacugagagcaucgugcgguuccccaacauuaccaaccugugucccuucggcgagguguucaacgccacccgguucgccagcguguacgccuggaaccggaagcggaucagcaacugcguggccgacuacagcgugcuguacaacagcgccagcuucagcaccuucaagugcuacggcgugagcccuaccaagcugaacgaccugugcuucaccaacguguacgcugacagcuucgugauccggggcgacgaggugcggcagaucgcccccggccagaccggcaagaucgccgacuacaacuacaagcugcccgacgacuucaccggcugcgugaucgccuggaacagcaacaaccuggacagcaaggugggcggcaacuacaacuaccuguaccggcuguuccguaagagcaaccugaagccauucgagcgggacaucagcaccgagaucuaccaggccggcagcacccccugcaacgguguggagggcuuuaacugcuacuucccccugcagagcuacggcuuccagcccaccaacggcgugggcuaccagcccuaccgggugguggugcugagcuucgagcugcugcacgcccccgccaccgugugcggcccuaaaaagagcaccaaccuggugaagaacaagugcgugaacuucaauuucaacggccugaccggcaccggcgugcugaccgagagcaacaagaaguuccugcccuuccagcaguucggccgggauaucgccgacaccaccgacgcagugcgggacccccagacccuggagauccuggacaucaccccaugcagcuucggcggcgugagcgucaucacccccggcacaaacaccagcaaccagguggccgugcuguaccaggacgugaacugcaccgaggugcccguggccauccacgccgaccagcugacccccaccuggcggguguacagcaccggaagcaacguguuccagacccgggccggcugccugaucggcgccgagcacgugaacaacuccuacgagugcgacauccccaucggcgcuggcaucugcgccagcuaccagacccagaccaacagcccccggcgggcccggagcguggccagccagagcaucaucgccuacaccaugagcuuaggcgccgagaacagcguggccuacagcaacaacagcaucgcgaucccuaccaacuucaccaucagcgugaccaccgagauacugcccgugagcaugaccaagaccagcguggacuguaccauguacaucugcggcgacagcaccgagugcagcaaccugcugcugcaguacggcagcuucugcacccagcugaaccgggcccugaccggcaucgccguggagcaggacaagaacacccaagagguguucgcccaggugaagcagaucuacaagacucccccaaucaaggacuucggcggcuucaacuucagccagauccugcccgaccccagcaagcccagcaagcggagcuucaucgaggaccugcuguucaacaaggugacccuggccgacgccggcuucaucaagcaguacggcgauugccugggcgacaucgccgcucgggaccugaucugcgcccagaaguucaacgggcugaccgugcugcccccucugcugaccgacgagaugaucgcccaguacaccagcgcccugcuugccggcaccaucaccagcggcuggaccuucggcgccggcgcagcccugcagauccccuucgccaugcagauggccuaccgguucaacggcaucggcgugacccagaacgugcuguacgagaaccagaagcugaucgccaaccaguucaacagcgccaucggcaagauccaggacagccugagcagcaccgccagcgcccugggcaagcugcaggacguggugaaccagaacgcucaggcccugaacacccuggugaagcagcugagcagcaacuucggcgccaucagcucagugcugaaugacauccugagcaggcuggacaagguggaggccgaggugcagaucgaccggcugaucaccggccggcugcagagccugcagaccuacgugacccagcagcugauccgggccgccgagauccgggccagcgccaaccuggcagccaccaagaugagcgagugcgugcugggccagagcaagcggguggacuuuugcggcaagggcuaccaccugaugagcuucccccagagcgccccacacggcgugguguuccuccacgucacauacgugcccgcccaggagaagaacuucaccaccgcccccgccauuugccacgacggcaaggcucacuucccccgggagggcguguucgugagcaacggaacccacugguucgugacccagcggaacuucuacgagccccagaucaucaccaccgacaacaccuucgugagcggcaacugcgacguggugaucggcaucgugaacaacaccguguacgacccccugcagccugagcuggacagcuucaaggaggagcuggacaaguacuucaagaaccacaccagccccgauguggaccugggcgacaucagcggcaucaacgccagcguggugaacauccagaaggagaucgaccggcugaacgagguggccaagaaccugaacgagagccugaucgaccugcaggagcugggcaaguacgagcaguacaucaaguggcccugguacaucuggcugggcuucaucgccggccugaucgccaucgugauggugaccaucaugcugugcugcaugaccagcugcuguagcugccugaagggcugcugcagcugcggcagcugcugcaaguucgacgaggacgacagcgagccagugcugaagggcgugaagcugcacuacaccugaggacuaguuauaagacugacuagcccgaugggccucccaacgggcccuccuccccuccuugcaccgagauuaauaaaaaaaaaaaaaaaaaaaaaaaaaaaaaaaaaaaaaaaaaaaaaaaaaaaaaaaaaaaaaaaaugcaucccccccccccccccccccccccccccccccaaaggcucuuuucagagccaccagaauu

SEQ ID NO: 23244 - RNA, 4039 nt, Artificial Sequence
  SARS-CoV-2/Wuhan/WIV05/2019__EPI_ISL_402128 spike protein mRNA gc (1-1273)(D614G)
aggagaaagcuuaccauguucguguuccuggugcugcugccccuggugagcagccagugcgugaaccugaccacccggacccagcugcccccugccuacaccaacagcuucacccggggcguguacuaccccgacaagguguuccggagcagcgugcugcacagcacccaggaccuguuccugcccuucuucagcaacgugaccugguuccacgccauccacgugagcggcaccaacggcaccaagcgguucgacaacccagugcugcccuucaacgacggcguguacuucgccagcaccgagaagucaaacaucauccggggcuggaucuucggcaccacccuggacagcaagacacagagccugcugaucgugaacaacgccaccaacguggugaucaaggugugcgaguuucaguucugcaacgaccccuuccugggcguguacuaccacaagaacaacaagagcuggauggagagcgaguuccgggucuacagcagcgcuaacaauugcaccuucgaguacgugagccagcccuuccugauggaccucgagggcaagcagggcaacuucaagaaccugcgggaguucguguucaagaacaucgauggcuacuucaagaucuacagcaagcacacccccaucaaccuggugcgggaccugccccagggauucagcgcccuggagccucugguggaccugcccaucggcaucaacaucaccagguuccagacccugcuggcccugcaccggagcuaccugacccccggcgacagcagcagcggcuggaccgccggcgccgccgcauacuacgugggcuaccugcagccacggaccuuccugcugaaguacaacgagaacggcaccaucaccgacgccguggacugcgcccuggacccccugagcgagaccaagugcacccuaaagagcuucaccguggagaagggcaucuaccagaccagcaacuuccgggugcagcccacugagagcaucgugcgguuccccaacauuaccaaccugugucccuucggcgagguguucaacgccacccgguucgccagcguguacgccuggaaccggaagcggaucagcaacugcguggccgacuacagcgugcuguacaacagcgccagcuucagcaccuucaagugcuacggcgugagcccuaccaagcugaacgaccugugcuucaccaacguguacgcugacagcuucgugauccggggcgacgaggugcggcagaucgcccccggccagaccggcaagaucgccgacuacaacuacaagcugcccgacgacuucaccggcugcgugaucgccuggaacagcaacaaccuggacagcaaggugggcggcaacuacaacuaccuguaccggcuguuccguaagagcaaccugaagccauucgagcgggacaucagcaccgagaucuaccaggccggcagcacccccugcaacgguguggagggcuuuaacugcuacuucccccugcagagcuacggcuuccagcccaccaacggcgugggcuaccagcccuaccgggugguggugcugagcuucgagcugcugcacgcccccgccaccgugugcggcccuaaaaagagcaccaaccuggugaagaacaagugcgugaacuucaauuucaacggccugaccggcaccggcgugcugaccgagagcaacaagaaguuccugcccuuccagcaguucggccgggauaucgccgacaccaccgacgcagugcgggacccccagacccuggagauccuggacaucaccccaugcagcuucggcggcgugagcgucaucacccccggcacaaacaccagcaaccagguggccgugcuguaccagggagugaacugcaccgaggugcccguggccauccacgccgaccagcugacccccaccuggcggguguacagcaccggcagcaacguguuccagacccgggccggcugccugaucggcgccgagcacgugaacaacuccuacgagugcgacauccccaucggcgcuggcaucugcgccagcuaccagacccagaccaacagcccccggcgggcccggagcguggccagccagagcaucaucgccuacaccaugagcuuaggcgccgagaacagcguggccuacagcaacaacagcaucgcgaucccuaccaacuucaccaucagcgugaccaccgagauacugcccgugagcaugaccaagaccagcguggacuguaccauguacaucugcggcgacagcaccgagugcagcaaccugcugcugcaguacggcagcuucugcacccagcugaaccgggcccugaccggcaucgccguggagcaggacaagaacacccaagagguguucgcccaggugaagcagaucuacaagacucccccaaucaaggacuucggcggcuucaacuucagccagauccugcccgaccccagcaagcccagcaagcggagcuucaucgaggaccugcuguucaacaaggugacccuggccgacgccggcuucaucaagcaguacggcgacugccugggggauaucgccgcucgggaccugaucugcgcccagaaguucaacggccugaccgugcugcccccucugcugaccgacgagaugaucgcccaguacaccagcgcccugcuugccggcaccaucaccagcggcuggaccuucggcgccggcgcagcccugcagauccccuucgccaugcagauggccuaccgguucaacggcaucggcgugacccagaacgugcuguacgagaaccagaagcugaucgccaaccaguucaacagcgccaucggcaagauccaggacagccugagcagcaccgccagcgcccugggcaagcugcaggacguggugaaccagaacgcucaggcccugaacacccuggugaagcagcugagcagcaacuucggcgccaucagcucagugcugaaugacauccugagcaggcuggacaagguggaggccgaggugcagaucgaccggcugaucaccggccggcugcagagccugcagaccuacgugacccagcagcugauccgggccgccgagauccgggccagcgccaaccuggcagccaccaagaugagcgagugcgugcugggccagagcaagcggguggacuuuugcggcaagggcuaccaccugaugagcuucccccagagcgccccacacggcgugguguuccuccacgucacauacgugcccgcccaggagaagaacuucaccaccgcccccgccauuugccacgacggcaaggcucacuucccccgggagggaguguucgugagcaacggcacccacugguucgugacccagcggaacuucuacgagccccagaucaucaccaccgacaacaccuucgugagcggcaacugcgacguggugaucggcaucgugaacaacaccguguacgacccccugcagccugagcuggacagcuucaaggaggagcuggacaaguacuucaagaaccacaccagccccgacguggaucugggcgacaucagcggcaucaacgccagcguggugaacauccagaaggagaucgaccggcugaacgagguggccaagaaccugaacgagagccugaucgaccugcaggagcugggcaaguacgagcaguacaucaaguggcccugguacaucuggcugggcuucaucgccggccugaucgccaucgugauggugaccaucaugcugugcugcaugaccagcugcuguagcugccugaagggcugcugcagcugcggcagcugcugcaaguucgacgaggacgacagcgagccagugcugaagggcgugaagcugcacuacaccugaggacuaguuauaagacugacuagcccgaugggccucccaacgggcccuccuccccuccuugcaccgagauuaauaaaaaaaaaaaaaaaaaaaaaaaaaaaaaaaaaaaaaaaaaaaaaaaaaaaaaaaaaaaaaaaaugcaucccccccccccccccccccccccccccccccaaaggcucuuuucagagccaccagaauu

SEQ ID NO: 23245 - RNA, 4039 nt, Artificial Sequence
  SARS-CoV-2/Wuhan/WIV05/2019__EPI_ISL_402128 spike protein mRNA gc (1-1273)(A222V_D614G)
aggagaaagcuuaccauguucguguuccuggugcugcugccccuggugagcagccagugcgugaaccugaccacccggacccagcugcccccugccuacaccaacagcuucacccggggcguguacuaccccgacaagguguuccggagcagcgugcugcacagcacccaggaccuguuccugcccuucuucagcaacgugaccugguuccacgccauccacgugagcggcaccaacggcaccaagcgguucgacaacccagugcugcccuucaacgacggcguguacuucgccagcaccgagaagucaaacaucauccggggcuggaucuucggcaccacccuggacagcaagacacagagccugcugaucgugaacaacgccaccaacguggugaucaaggugugcgaguuucaguucugcaacgaccccuuccugggcguguacuaccacaagaacaacaagagcuggauggagagcgaguuccgggucuacagcagcgcuaacaauugcaccuucgaguacgugagccagcccuuccugauggaccucgagggcaagcagggcaacuucaagaaccugcgggaguucguguucaagaacaucgauggcuacuucaagaucuacagcaagcacacccccaucaaccuggugcgggaccugccccagggauucagcgugcuggagccucugguggaccugcccaucggcaucaacaucaccagguuccagacccugcuggcccugcaccggagcuaccugacccccggcgacagcagcagcggcuggaccgccggcgccgccgccuacuacgugggcuaccugcagccacggaccuuccugcugaaguacaacgagaacggcaccaucaccgacgcaguggacugcgcccuggacccccugagcgagaccaagugcacccuaaagagcuucaccguggagaagggcaucuaccagaccagcaacuuccgggugcagcccacugagagcaucgugcgguuccccaacauuaccaaccugugucccuucggcgagguguucaacgccacccgguucgccagcguguacgccuggaaccggaagcggaucagcaacugcguggccgacuacagcgugcuguacaacagcgccagcuucagcaccuucaagugcuacggcgugagcccuaccaagcugaacgaccugugcuucaccaacguguacgccgacagcuucgugauccggggcgacgaggugcggcagaucgcucccggccagaccggcaagaucgccgacuacaacuacaagcugcccgacgacuucaccggcugcgugaucgccuggaacagcaacaaccuggacagcaaggugggcggcaacuacaacuaccuguaccggcuguuccguaagagcaaccugaagccauucgagcgggacaucagcaccgagaucuaccaggccggcagcacccccugcaacgguguggagggcuuuaacugcuacuucccccugcagagcuacggcuuccagcccaccaacggcgugggcuaccagcccuaccgggugguggugcugagcuucgagcugcugcacgcccccgccaccgugugcggcccuaaaaagagcaccaaccuggugaagaacaagugcgugaacuucaauuucaacggccugaccggcaccggcgugcugaccgagagcaacaagaaguuccugcccuuccagcaguucggccgggauaucgccgacaccaccgacgccgugcgggacccccagacccuggagauccuggacaucaccccaugcagcuucggcggcgucagcgugaucacccccggcacaaacaccagcaaccagguggcagugcuguaccagggagugaacugcaccgaggugcccguggccauccacgccgaccagcugacccccaccuggcggguguacagcaccggcagcaacguguuccagacccgggccggcugccugaucggcgccgagcacgugaacaacuccuacgagugcgacauccccaucggcgccggcaucugcgcuagcuaccagacccagaccaacagcccccggcgggcccggagcguggccagccagagcaucaucgccuacaccaugagcuuaggcgccgagaacagcguggccuacagcaacaacagcaucgccaucccuaccaacuucaccaucagcgugaccaccgagauacugcccgugagcaugaccaagaccagcguggacuguaccauguacaucugcggcgacagcaccgagugcagcaaccugcugcugcaguacggcagcuucugcacccagcugaaccgggcgcugaccggcaucgccguggagcaggacaagaacacccaagagguguucgcccaggugaagcagaucuacaagacucccccaaucaaggacuucggcggcuucaacuucagccagauccugcccgaccccagcaagcccagcaagcggagcuucaucgaggaccugcuguucaacaaggugacccuggccgacgccggcuucaucaagcaguacggcgacugccugggggauaucgccgcccgggaccugaucugcgcucagaaguucaacggccugaccgugcugcccccucugcugaccgacgagaugaucgcccaguacaccagcgcccugcuugccggcaccaucaccagcggcuggaccuucggcgccggcgccgcacugcagauccccuucgccaugcagauggccuaccgguucaacggcaucggcgugacccagaacgugcuguacgagaaccagaagcugaucgccaaccaguucaacagcgccaucggcaagauccaggacagccugagcagcaccgccagcgcccugggcaagcugcaggacguggugaaccagaacgcccaggcucugaacacccuggugaagcagcugagcagcaacuucggcgccaucagcucagugcugaaugacauccugagcaggcuggacaagguggaggccgaggugcagaucgaccggcugaucaccggccggcugcagagccugcagaccuacgugacccagcagcugauccgggccgccgagauccgggccagcgccaaccuggccgcaaccaagaugagcgagugcgugcugggccagagcaagcggguggacuuuugcggcaagggcuaccaccugaugagcuucccccagagcgccccacacggcguggucuuccuccacgugacauacgugcccgcccaggagaagaacuucaccaccgcccccgccauuugccacgacggcaaggcccacuucccccgggagggaguguucgugagcaacggcacccacugguucgugacccagcggaacuucuacgagccccagaucaucaccaccgacaacaccuucgugagcggcaacugcgacguggugaucggcaucgugaacaacaccguguacgacccccugcagccugagcuggacagcuucaaggaggagcuggacaaguacuucaagaaccacaccagccccgacguggaucugggcgacaucagcggcaucaacgcuagcguggugaacauccagaaggagaucgaccggcugaacgagguggccaagaaccugaacgagagccugaucgaccugcaggagcugggcaaguacgagcaguacaucaaguggcccugguacaucuggcugggcuucaucgccggccugaucgccaucgugauggugaccaucaugcugugcugcaugaccagcugcuguagcugccugaagggcugcugcagcugcggcagcugcugcaaguucgacgaggacgacagcgagccagugcugaagggcgugaagcugcacuacaccugaggacuaguuauaagacugacuagcccgaugggccucccaacgggcccuccuccccuccuugcaccgagauuaauaaaaaaaaaaaaaaaaaaaaaaaaaaaaaaaaaaaaaaaaaaaaaaaaaaaaaaaaaaaaaaaaugcaucccccccccccccccccccccccccccccccaaaggcucuuuucagagccaccagaauu

SEQ ID NO: 23246 - RNA, 4039 nt, Artificial Sequence
  SARS-CoV-2/Wuhan/WIV05/2019__EPI_ISL_402128 spike protein mRNA gc (1-1273)(N439K_D614G)
aggagaaagcuuaccauguucguguuccuggugcugcugccccuggugagcagccagugcgugaaccugaccacccggacccagcugcccccugccuacaccaacagcuucacccggggcguguacuaccccgacaagguguuccggagcagcgugcugcacagcacccaggaccuguuccugcccuucuucagcaacgugaccugguuccacgccauccacgugagcggcaccaacggcaccaagcgguucgacaacccagugcugcccuucaacgacggcguguacuucgccagcaccgagaagucaaacaucauccggggcuggaucuucggcaccacccuggacagcaagacacagagccugcugaucgugaacaacgccaccaacguggugaucaaggugugcgaguuucaguucugcaacgaccccuuccugggcguguacuaccacaagaacaacaagagcuggauggagagcgaguuccgggucuacagcagcgcuaacaauugcaccuucgaguacgugagccagcccuuccugauggaccucgagggcaagcagggcaacuucaagaaccugcgggaguucguguucaagaacaucgauggcuacuucaagaucuacagcaagcacacccccaucaaccuggugcgggaccugccccagggauucagcgcccuggagccucugguggaccugcccaucggcaucaacaucaccagguuccagacccugcuggcccugcaccggagcuaccugacccccggcgacagcagcagcggcuggaccgccggcgccgccgcauacuacgugggcuaccugcagccacggaccuuccugcugaaguacaacgagaacggcaccaucaccgacgccguggacugcgcccuggacccccugagcgagaccaagugcacccuaaagagcuucaccguggagaagggcaucuaccagaccagcaacuuccgggugcagcccacugagagcaucgugcgguuccccaacauuaccaaccugugucccuucggcgagguguucaacgccacccgguucgccagcguguacgccuggaaccggaagcggaucagcaacugcguggccgacuacagcgugcuguacaacagcgccagcuucagcaccuucaagugcuacggcgugagcccuaccaagcugaacgaccugugcuucaccaacguguacgcugacagcuucgugauccggggcgacgaggugcggcagaucgcccccggccagaccggcaagaucgccgacuacaacuacaagcugcccgacgacuucaccggcugcgugaucgccuggaacagcaagaaccuggacagcaaggugggcggcaacuacaacuaccuguaccggcuguuccguaagagcaaccugaagccauucgagcgggacaucagcaccgagaucuaccaggccggcagcacccccugcaacgguguggagggcuuuaacugcuacuucccccugcagagcuacggcuuccagcccaccaacggcgugggcuaccagcccuaccgggugguggugcugagcuucgagcugcugcacgcccccgccaccgugugcggcccuaaaaagagcaccaaccuggugaagaacaagugcgugaacuucaacuucaauggccugaccggcaccggcgugcugaccgagagcaacaagaaguuccugcccuuccagcaguucggccgggauaucgccgacaccaccgacgcagugcgggacccccagacccuggagauccuggacaucaccccaugcagcuucggcggcgugagcgucaucacccccggcacaaacaccagcaaccagguggccgugcuguaccagggagugaacugcaccgaggugcccguggccauccacgccgaccagcugacccccaccuggcggguguacagcaccggcagcaacguguuccagacccgggccggcugccugaucggcgccgagcacgugaacaacuccuacgagugcgacauccccaucggcgcuggcaucugcgccagcuaccagacccagaccaacagcccccggcgggcccggagcguggccagccagagcaucaucgccuacaccaugagcuuaggcgccgagaacagcguggccuacagcaacaacagcaucgcgaucccuaccaacuucaccaucagcgugaccaccgagauacugcccgugagcaugaccaagaccagcguggacuguaccauguacaucugcggcgacagcaccgagugcagcaaccugcugcugcaguacggcagcuucugcacccagcugaaccgggcccugaccggcaucgccguggagcaggacaagaacacccaagagguguucgcccaggugaagcagaucuacaagacucccccaaucaaggacuucggcggcuucaacuucagccagauccugcccgaccccagcaagcccagcaagcggagcuucaucgaggaccugcuguucaacaaggugacccuggccgacgccggcuucaucaagcaguacggcgacugccugggggauaucgccgcucgggaccugaucugcgcccagaaguucaacggccugaccgugcugcccccucugcugaccgacgagaugaucgcccaguacaccagcgcccugcuugccggcaccaucaccagcggcuggaccuucggcgccggcgcagcccugcagauccccuucgccaugcagauggccuaccgguucaacggcaucggcgugacccagaacgugcuguacgagaaccagaagcugaucgccaaccaguucaacagcgccaucggcaagauccaggacagccugagcagcaccgccagcgcccugggcaagcugcaggacguggugaaccagaacgcucaggcccugaacacccuggugaagcagcugagcagcaacuucggcgccaucagcucagugcugaacgacauccugagcaggcuggacaagguggaggccgaggugcagaucgaccggcugaucaccggccggcugcagagccugcagaccuacgugacccagcagcugauccgggccgccgagauccgggccagcgccaaucuggcagccaccaagaugagcgagugcgugcugggccagagcaagcggguggacuuuugcggcaagggcuaccaccugaugagcuucccccagagcgccccacacggcgugguguuccuccacgucacauacgugcccgcccaggagaagaacuucaccaccgcccccgccauuugccacgacggcaaggcucacuucccccgggagggaguguucgugagcaacggcacccacugguucgugacccagcggaacuucuacgagccccagaucaucaccaccgacaacaccuucgugagcggcaacugcgacguggugaucggcaucgugaacaacaccguguacgacccccugcagccugagcuggacagcuucaaggaggagcuggacaaguacuucaagaaccacaccagccccgacguggaucugggcgacaucagcggcaucaacgccagcguggugaacauccagaaggagaucgaccggcugaacgagguggccaagaaccugaacgagagccugaucgaccugcaggagcugggcaaguacgagcaguacaucaaguggcccugguacaucuggcugggcuucaucgccggccugaucgccaucgugauggugaccaucaugcugugcugcaugaccagcugcuguagcugccugaagggcugcugcagcugcggcagcugcugcaaguucgacgaggacgacagcgagccagugcugaagggcgugaagcugcacuacaccugaggacuaguuauaagacugacuagcccgaugggccucccaacgggcccuccuccccuccuugcaccgagauuaauaaaaaaaaaaaaaaaaaaaaaaaaaaaaaaaaaaaaaaaaaaaaaaaaaaaaaaaaaaaaaaaaugcaucccccccccccccccccccccccccccccccaaaggcucuuuucagagccaccagaauu

SEQ ID NO: 23247 - RNA, 4039 nt, Artificial Sequence
  SARS-CoV-2/Wuhan/WIV05/2019__EPI_ISL_402128 spike protein mRNA gc (1-1273)(S477N_D614G)
aggagaaagcuuaccauguucguguuccuggugcugcugccccuggugagcagccagugcgugaaccugaccacccggacccagcugcccccugccuacaccaacagcuucacccggggcguguacuaccccgacaagguguuccggagcagcgugcugcacagcacccaggaccuguuccugcccuucuucagcaacgugaccugguuccacgccauccacgugagcggcaccaacggcaccaagcgguucgacaacccagugcugcccuucaacgacggcguguacuucgccagcaccgagaagucaaacaucauccggggcuggaucuucggcaccacccuggacagcaagacacagagccugcugaucgugaacaacgccaccaacguggugaucaaggugugcgaguuucaguucugcaacgaccccuuccugggcguguacuaccacaagaacaacaagagcuggauggagagcgaguuccgggucuacagcagcgcuaacaauugcaccuucgaguacgugagccagcccuuccugauggaccucgagggcaagcagggcaacuucaagaaccugcgggaguucguguucaagaacaucgauggcuacuucaagaucuacagcaagcacacccccaucaaccuggugcgggaccugccccagggauucagcgcccuggagccucugguggaccugcccaucggcaucaacaucaccagguuccagacccugcuggcccugcaccggagcuaccugacccccggcgacagcagcagcggcuggaccgccggcgccgccgcauacuacgugggcuaccugcagccacggaccuuccugcugaaguacaacgagaacggcaccaucaccgacgccguggacugcgcccuggacccccugagcgagaccaagugcacccuaaagagcuucaccguggagaagggcaucuaccagaccagcaacuuccgggugcagcccacugagagcaucgugcgguuccccaacauuaccaaccugugucccuucggcgagguguucaacgccacccgguucgccagcguguacgccuggaaccggaagcggaucagcaacugcguggccgacuacagcgugcuguacaacagcgccagcuucagcaccuucaagugcuacggcgugagcccuaccaagcugaacgaccugugcuucaccaacguguacgcugacagcuucgugauccggggcgacgaggugcggcagaucgcccccggccagaccggcaagaucgccgacuacaacuacaagcugcccgacgacuucaccggcugcgugaucgccuggaacagcaacaaccuggacagcaaggugggcggcaacuacaacuaccuguaccggcuguuccguaagagcaaccugaagccauucgagcgggacaucagcaccgagaucuaccaggccggcaacacccccugcaacgguguggagggcuuuaacugcuacuucccccugcagagcuacggcuuccagcccaccaacggcgugggcuaccagcccuaccgggugguggugcugagcuucgagcugcugcacgcccccgccaccgugugcggcccuaaaaagagcaccaaccuggugaagaacaagugcgugaauuucaacuucaacggccugaccggcaccggcgugcugaccgagagcaacaagaaguuccugcccuuccagcaguucggccgggauaucgccgacaccaccgacgcagugcgggacccccagacccuggagauccuggacaucaccccaugcagcuucggcggcgugagcgucaucacccccggcacaaacaccagcaaccagguggccgugcuguaccagggagugaacugcaccgaggugcccguggccauccacgccgaccagcugacccccaccuggcggguguacagcaccggcagcaacguguuccagacccgggccggcugccugaucggcgccgagcacgugaacaacagcuacgagugcgacauccccaucggcgcuggcaucugcgccuccuaccagacccagaccaacagcccccggcgggcccggagcguggccagccagagcaucaucgccuacaccaugagcuuaggcgccgagaacagcguggccuacagcaacaacagcaucgcgaucccuaccaacuucaccaucagcgugaccaccgagauacugcccgugagcaugaccaagaccagcguggacuguaccauguacaucugcggcgacagcaccgagugcagcaaccugcugcugcaguacggcagcuucugcacccagcugaaccgggcccugaccggcaucgccguggagcaggacaagaacacccaagagguguucgcccaggugaagcagaucuacaagacucccccaaucaaggacuucggcggcuucaacuucagccagauccugcccgaccccagcaagcccagcaagcggagcuucaucgaggaccugcuguucaacaaggugacccuggccgacgccggcuucaucaagcaguacggcgacugccugggggauaucgccgcucgggaccugaucugcgcccagaaguucaacggccugaccgugcugcccccucugcugaccgacgagaugaucgcccaguacaccagcgcccugcuugccggcaccaucaccagcggcuggaccuucggcgccggcgcagcccugcagauccccuucgccaugcagauggccuaccgguucaacggcaucggcgugacccagaacgugcuguacgagaaccagaagcugaucgccaaccaguucaacagcgccaucggcaagauccaggacagccugagcagcaccgccagcgcccugggcaagcugcaggacguggugaaccagaacgcucaggcccugaacacccuggugaagcagcugagcagcaauuucggcgccaucagcagcgugcugaacgacauccugucaaggcuggacaagguggaggccgaggugcagaucgaccggcugaucaccggccggcugcagagccugcagaccuacgugacccagcagcugauccgggccgccgagauccgggccagcgccaaccuggcagccaccaagaugagcgagugcgugcugggccagagcaagcggguggacuuuugcggcaagggcuaccaccugaugagcuucccccagagcgccccacacggcgugguguuccuccacgucacauacgugcccgcccaggagaagaacuucaccaccgcccccgccauuugccacgacggcaaggcucacuucccccgggagggaguguucgugagcaacggcacccacugguucgugacccagcggaacuucuacgagccccagaucaucaccaccgacaacaccuucgugagcggcaacugcgacguggugaucggcaucgugaacaacaccguguacgacccccugcagccugagcuggacagcuucaaggaggagcuggacaaguacuucaagaaccacaccagccccgacguggaucugggcgacaucagcggcaucaacgccagcguggugaacauccagaaggagaucgaccggcugaacgagguggccaagaaccugaacgagagccugaucgaccugcaggagcugggcaaguacgagcaguacaucaaguggcccugguacaucuggcugggcuucaucgccggccugaucgccaucgugauggugaccaucaugcugugcugcaugaccagcugcuguagcugccugaagggcugcugcagcugcggcagcugcugcaaguucgacgaggacgacagcgagccagugcugaagggcgugaagcugcacuacaccugaggacuaguuauaagacugacuagcccgaugggccucccaacgggcccuccuccccuccuugcaccgagauuaauaaaaaaaaaaaaaaaaaaaaaaaaaaaaaaaaaaaaaaaaaaaaaaaaaaaaaaaaaaaaaaaaugcaucccccccccccccccccccccccccccccccaaaggcucuuuucagagccaccagaauu

SEQ ID NO: 23248 - RNA, 4039 nt, Artificial Sequence
  SARS-CoV-2/Wuhan/WIV05/2019__EPI_ISL_402128 spike protein mRNA gc (1-1273)(N501Y_D614G)
aggagaaagcuuaccauguucguguuccuggugcugcugccccuggugagcagccagugcgugaaccugaccacccggacccagcugcccccugccuacaccaacagcuucacccggggcguguacuaccccgacaagguguuccggagcagcgugcugcacagcacccaggaccuguuccugcccuucuucagcaacgugaccugguuccacgccauccacgugagcggcaccaacggcaccaagcgguucgacaacccagugcugcccuucaacgacggcguguacuucgccagcaccgagaagucaaacaucauccggggcuggaucuucggcaccacccuggacagcaagacacagagccugcugaucgugaacaacgccaccaacguggugaucaaggugugcgaguuucaguucugcaacgaccccuuccugggcguguacuaccacaagaacaacaagagcuggauggagagcgaguuccgggucuacagcagcgcuaacaauugcaccuucgaguacgugagccagcccuuccugauggaccucgagggcaagcagggcaacuucaagaaccugcgggaguucguguucaagaacaucgauggcuacuucaagaucuacagcaagcacacccccaucaaccuggugcgggaccugccccagggauucagcgcccuggagccucugguggaccugcccaucggcaucaacaucaccagguuccagacccugcuggcccugcaccggagcuaccugacccccggcgacagcagcagcggcuggaccgccggcgccgccgcauacuacgugggcuaccugcagccacggaccuuccugcugaaguacaacgagaacggcaccaucaccgacgccguggacugcgcccuggacccccugagcgagaccaagugcacccuaaagagcuucaccguggagaagggcaucuaccagaccagcaacuuccgggugcagcccacugagagcaucgugcgguuccccaacauuaccaaccugugucccuucggcgagguguucaacgccacccgguucgccagcguguacgccuggaaccggaagcggaucagcaacugcguggccgacuacagcgugcuguacaacagcgccagcuucagcaccuucaagugcuacggcgugagcccuaccaagcugaacgaccugugcuucaccaacguguacgcugacagcuucgugauccggggcgacgaggugcggcagaucgcccccggccagaccggcaagaucgccgacuacaacuacaagcugcccgacgacuucaccggcugcgugaucgccuggaacagcaacaaccuggacagcaaggugggcggcaacuacaacuaccuguaccggcuguuccguaagagcaaccugaagccauucgagcgggacaucagcaccgagaucuaccaggccggcagcacccccugcaacgguguggagggcuuuaacugcuacuucccccugcagagcuacggcuuccagcccaccuacggcgugggcuaccagcccuaccgggugguggugcugagcuucgagcugcugcacgcccccgccaccgugugcggcccuaaaaagagcaccaaccuggugaagaacaagugcgugaacuucaacuucaauggccugaccggcaccggcgugcugaccgagagcaacaagaaguuccugcccuuccagcaguucggccgggauaucgccgacaccaccgacgcagugcgggacccccagacccuggagauccuggacaucaccccaugcagcuucggcggcgugagcgucaucacccccggcacaaacaccagcaaccagguggccgugcuguaccagggagugaacugcaccgaggugcccguggccauccacgccgaccagcugacccccaccuggcggguguacagcaccggcagcaacguguuccagacccgggccggcugccugaucggcgccgagcacgugaacaacuccuacgagugcgacauccccaucggcgcuggcaucugcgccagcuaccagacccagaccaacagcccccggcgggcccggagcguggccagccagagcaucaucgccuacaccaugagcuuaggcgccgagaacagcguggccuacagcaacaacagcaucgcgaucccuaccaacuucaccaucagcgugaccaccgagauacugcccgugagcaugaccaagaccagcguggacuguaccauguacaucugcggcgacagcaccgagugcagcaaccugcugcugcaguacggcagcuucugcacccagcugaaccgggcccugaccggcaucgccguggagcaggacaagaacacccaagagguguucgcccaggugaagcagaucuacaagacucccccaaucaaggacuucggcggcuucaacuucagccagauccugcccgaccccagcaagcccagcaagcggagcuucaucgaggaccugcuguucaacaaggugacccuggccgacgccggcuucaucaagcaguacggcgacugccugggggauaucgccgcucgggaccugaucugcgcccagaaguucaacggccugaccgugcugcccccucugcugaccgacgagaugaucgcccaguacaccagcgcccugcuugccggcaccaucaccagcggcuggaccuucggcgccggcgcagcccugcagauccccuucgccaugcagauggccuaccgguucaacggcaucggcgugacccagaacgugcuguacgagaaccagaagcugaucgccaaccaguucaacagcgccaucggcaagauccaggacagccugagcagcaccgccagcgcccugggcaagcugcaggacguggugaaccagaacgcucaggcccugaacacccuggugaagcagcugagcagcaacuucggcgccaucagcucagugcugaacgacauccugagcaggcuggacaagguggaggccgaggugcagaucgaccggcugaucaccggccggcugcagagccugcagaccuacgugacccagcagcugauccgggccgccgagauccgggccagcgccaaucuggcagccaccaagaugagcgagugcgugcugggccagagcaagcggguggacuuuugcggcaagggcuaccaccugaugagcuucccccagagcgccccacacggcgugguguuccuccacgucacauacgugcccgcccaggagaagaacuucaccaccgcccccgccauuugccacgacggcaaggcucacuucccccgggagggaguguucgugagcaacggcacccacugguucgugacccagcggaacuucuacgagccccagaucaucaccaccgacaacaccuucgugagcggcaacugcgacguggugaucggcaucgugaacaacaccguguacgacccccugcagccugagcuggacagcuucaaggaggagcuggacaaguacuucaagaaccacaccagccccgacguggaucugggcgacaucagcggcaucaacgccagcguggugaacauccagaaggagaucgaccggcugaacgagguggccaagaaccugaacgagagccugaucgaccugcaggagcugggcaaguacgagcaguacaucaaguggcccugguacaucuggcugggcuucaucgccggccugaucgccaucgugauggugaccaucaugcugugcugcaugaccagcugcuguagcugccugaagggcugcugcagcugcggcagcugcugcaaguucgacgaggacgacagcgagccagugcugaagggcgugaagcugcacuacaccugaggacuaguuauaagacugacuagcccgaugggccucccaacgggcccuccuccccuccuugcaccgagauuaauaaaaaaaaaaaaaaaaaaaaaaaaaaaaaaaaaaaaaaaaaaaaaaaaaaaaaaaaaaaaaaaaugcaucccccccccccccccccccccccccccccccaaaggcucuuuucagagccaccagaauu

SEQ ID NO: 23249 - RNA, 4033 nt, Artificial Sequence
  SARS-CoV-2/Wuhan/WIV05/2019__EPI_ISL_402128 spike protein mRNA gc (1-1273)(H69del_V70del_D614G)
aggagaaagcuuaccauguucguguuccuggugcugcugccccuggugagcagccagugcgugaaccugaccacccggacccagcugcccccugccuacaccaacagcuucacccggggcguguacuaccccgacaagguguuccggagcagcgugcugcacagcacccaggaccuguuccugcccuucuucagcaacgugaccugguuccacgccaucagcggcaccaacggcaccaagcgguucgacaacccagugcugcccuucaacgacggcguguacuucgccagcaccgagaagucaaacaucauccggggcuggaucuucggcaccacccuggacagcaagacacagagccugcugaucgugaacaacgccaccaacguggugaucaaggugugcgaguuucaguucugcaacgaccccuuccugggcguguacuaccacaagaacaacaagagcuggauggagagcgaguuccggguguacagcagcgcuaacaauugcaccuucgaguacgucagccagcccuuccugauggaccucgagggcaagcagggcaacuucaagaaccugcgggaguucguguucaagaacaucgauggcuacuucaagaucuacagcaagcacacccccaucaaccuggugcgggaccugccccagggauucagcgcccuggagccucugguggaccugcccaucggcaucaacaucaccagguuccagacccugcuggcccugcaccggagcuaccugacccccggcgacagcagcagcggcuggaccgccggcgccgccgcauacuacgugggcuaccugcagccacggaccuuccugcugaaguacaacgagaacggcaccaucaccgacgccguggacugcgcccuggacccccugagcgagaccaagugcacccuaaagagcuucaccguggagaagggcaucuaccagaccagcaacuuccgggugcagcccacugagagcaucgugcgguuccccaacauuaccaaccugugucccuucggcgagguguucaacgccacccgguucgccagcguguacgccuggaaccggaagcggaucagcaacugcguggccgacuacagcgugcuguacaacagcgccagcuucagcaccuucaagugcuacggcgugagcccuaccaagcugaacgaccugugcuucaccaacguguacgcugacagcuucgugauccggggcgacgaggugcggcagaucgcccccggccagaccggcaagaucgccgacuacaacuacaagcugcccgacgacuucaccggcugcgugaucgccuggaacagcaacaaccuggacagcaaggugggcggcaacuacaacuaccuguaccggcuguuccguaagagcaaccugaagccauucgagcgggacaucagcaccgagaucuaccaggccggcagcacccccugcaacgguguggagggcuuuaacugcuacuucccccugcagagcuacggcuuccagcccaccaacggcgugggcuaccagcccuaccgggugguggugcugagcuucgagcugcugcacgcccccgccaccgugugcggcccuaaaaagagcaccaaccuggugaagaacaagugcgugaacuucaauuucaacggccugaccggcaccggcgugcugaccgagagcaacaagaaguuccugcccuuccagcaguucggccgggauaucgccgacaccaccgacgcagugcgggacccccagacccuggagauccuggacaucaccccaugcagcuucggcggcgugagcgugaucacccccggcacaaacaccagcaaccaggucgccgugcuguaccagggagugaacugcaccgaggugcccguggccauccacgccgaccagcugacccccaccuggcggguguacagcaccggcagcaacguguuccagacccgggccggcugccugaucggcgccgagcacgugaacaacuccuacgagugcgacauccccaucggcgcuggcaucugcgccagcuaccagacccagaccaacagcccccggcgggcccggagcguggccagccagagcaucaucgccuacaccaugagcuuaggcgccgagaacagcguggccuacagcaacaacagcaucgcgaucccuaccaacuucaccaucagcgugaccaccgagauacugcccgugagcaugaccaagaccagcguggacuguaccauguacaucugcggcgacagcaccgagugcagcaaccugcugcugcaguacggcagcuucugcacccagcugaaccgggcccugaccggcaucgccguggagcaggacaagaacacccaagagguguucgcccaggugaagcagaucuacaagacucccccaaucaaggacuucggcggcuucaacuucagccagauccugcccgaccccagcaagcccagcaagcggagcuucaucgaggaccugcuguucaacaaggugacccuggccgacgccggcuucaucaagcaguacggcgacugccugggggauaucgccgcucgggaccugaucugcgcccagaaguucaacggccugaccgugcugcccccucugcugaccgacgagaugaucgcccaguacaccagcgcccugcuugccggcaccaucaccagcggcuggaccuucggcgccggcgcagcccugcagauccccuucgccaugcagauggccuaccgguucaacggcaucggcgugacccagaacgugcuguacgagaaccagaagcugaucgccaaccaguucaacagcgccaucggcaagauccaggacagccugagcagcaccgccagcgcccugggcaagcugcaggacguggugaaccagaacgcucaggcccugaacacccuggugaagcagcugagcagcaacuucggcgccaucagcucagugcugaaugacauccugagcaggcuggacaagguggaggccgaggugcagaucgaccggcugaucaccggccggcugcagagccugcagaccuacgugacccagcagcugauccgggccgccgagauccgggccagcgccaaccuggcagccaccaagaugagcgagugcgugcugggccagagcaagcggguggacuuuugcggcaagggcuaccaccugaugagcuucccccagagcgccccacacggcgugguguuccuccacgugacauacguccccgcccaggagaagaacuucaccaccgcccccgccauuugccacgacggcaaggcucacuucccccgggagggaguguucgugagcaacggcacccacugguucgugacccagcggaacuucuacgagccccagaucaucaccaccgacaacaccuucgugagcggcaacugcgacguggugaucggcaucgugaacaacaccguguacgacccccugcagccugagcuggacagcuucaaggaggagcuggacaaguacuucaagaaccacaccagccccgacguggaucugggcgacaucagcggcaucaacgccagcguggugaacauccagaaggagaucgaccggcugaacgagguggccaagaaccugaacgagagccugaucgaccugcaggagcugggcaaguacgagcaguacaucaaguggcccugguacaucuggcugggcuucaucgccggccugaucgccaucgugauggugaccaucaugcugugcugcaugaccagcugcuguagcugccugaagggcugcugcagcugcggcagcugcugcaaguucgacgaggacgacagcgagccagugcugaagggcgugaagcugcacuacaccugaggacuaguuauaagacugacuagcccgaugggccucccaacgggcccuccuccccuccuugcaccgagauuaauaaaaaaaaaaaaaaaaaaaaaaaaaaaaaaaaaaaaaaaaaaaaaaaaaaaaaaaaaaaaaaaaugcaucccccccccccccccccccccccccccccccaaaggcucuuuucagagccaccagaauu

SEQ ID NO: 23250 - RNA, 4039 nt, Artificial Sequence
  SARS-CoV-2/Wuhan/WIV05/2019__EPI_ISL_402128 spike protein mRNA gc (1-1273)(Y453F_D614G)
aggagaaagcuuaccauguucguguuccuggugcugcugccccuggugagcagccagugcgugaaccugaccacccggacccagcugcccccugccuacaccaacagcuucacccggggcguguacuaccccgacaagguguuccggagcagcgugcugcacagcacccaggaccuguuccugcccuucuucagcaacgugaccugguuccacgccauccacgugagcggcaccaacggcaccaagcgguucgacaacccagugcugcccuucaacgacggcguguacuucgccagcaccgagaagucaaacaucauccggggcuggaucuucggcaccacccuggacagcaagacacagagccugcugaucgugaacaacgccaccaacguggugaucaaggugugcgaguuucaguucugcaacgaccccuuccugggcguguacuaccacaagaacaacaagagcuggauggagagcgaguuccgggucuacagcagcgcuaacaauugcaccuucgaguacgugagccagcccuuccugauggaccucgagggcaagcagggcaacuucaagaaccugcgggaguucguguucaagaacaucgauggcuacuucaagaucuacagcaagcacacccccaucaaccuggugcgggaccugccccagggauucagcgcccuggagccucugguggaccugcccaucggcaucaacaucaccagguuccagacccugcuggcccugcaccggagcuaccugacccccggcgacagcagcagcggcuggaccgccggcgccgccgcauacuacgugggcuaccugcagccacggaccuuccugcugaaguacaacgagaacggcaccaucaccgacgccguggacugcgcccuggacccccugagcgagaccaagugcacccuaaagagcuucaccguggagaagggcaucuaccagaccagcaacuuccgggugcagcccacugagagcaucgugcgguuccccaacauuaccaaccugugucccuucggcgagguguucaacgccacccgguucgccagcguguacgccuggaaccggaagcggaucagcaacugcguggccgacuacagcgugcuguacaacagcgccagcuucagcaccuucaagugcuacggcgugagcccuaccaagcugaacgaccugugcuucaccaacguguacgcugacagcuucgugauccggggcgacgaggugcggcagaucgcccccggccagaccggcaagaucgccgacuacaacuacaagcugcccgacgacuucaccggcugcgugaucgccuggaacagcaacaaccuggacagcaaggugggcggcaacuacaacuaccuguuccggcuguuccguaagagcaaccugaagccauuugagcgggacaucagcaccgagaucuaccaggccggcagcacccccugcaacgguguggagggcuucaacugcuacuucccccugcagagcuacggcuuccagcccaccaacggcgugggcuaccagcccuaccgggugguggugcugagcuucgagcugcugcacgcccccgccaccgugugcggcccuaaaaagagcaccaaccuggugaagaacaagugcgugaacuucaauuucaacggccugaccggcaccggcgugcugaccgagagcaacaagaaguuccugcccuuccagcaguucggccgggauaucgccgacaccaccgacgcagugcgggacccccagacccuggagauccuggacaucaccccaugcagcuucggcggcgugagcgucaucacccccggcacaaacaccagcaaccagguggccgugcuguaccagggagugaacugcaccgaggugcccguggccauccacgccgaccagcugacccccaccuggcggguguacagcaccggcagcaacguguuccagacccgggccggcugccugaucggcgccgagcacgugaacaacuccuacgagugcgacauccccaucggcgcuggcaucugcgccagcuaccagacccagaccaacagcccccggcgggcccggagcguggccagccagagcaucaucgccuacaccaugagcuuaggcgccgagaacagcguggccuacagcaacaacagcaucgcgaucccuaccaacuucaccaucagcgugaccaccgagauacugcccgugagcaugaccaagaccagcguggacuguaccauguacaucugcggcgacagcaccgagugcagcaaccugcugcugcaguacggcagcuucugcacccagcugaaccgggcccugaccggcaucgccguggagcaggacaagaacacccaagagguguucgcccaggugaagcagaucuacaagacucccccaaucaaggacuucggcggcuucaacuucagccagauccugcccgaccccagcaagcccagcaagcggagcuucaucgaggaccugcuguucaacaaggugacccuggccgacgccggcuucaucaagcaguacggcgacugccugggggauaucgccgcucgggaccugaucugcgcccagaaguucaacggccugaccgugcugcccccucugcugaccgacgagaugaucgcccaguacaccagcgcccugcuugccggcaccaucaccagcggcuggaccuucggcgccggcgcagcccugcagauccccuucgccaugcagauggccuaccgguucaacggcaucggcgugacccagaacgugcuguacgagaaccagaagcugaucgccaaccaguucaacagcgccaucggcaagauccaggacagccugagcagcaccgccagcgcccugggcaagcugcaggacguggugaaccagaacgcucaggcccugaacacccuggugaagcagcugagcagcaacuuuggcgccaucagcucagugcugaaugacauccugagcaggcuggacaagguggaggccgaggugcagaucgaccggcugaucaccggccggcugcagagccugcagaccuacgugacccagcagcugauccgggccgccgagauccgggccagcgccaaccuggcagccaccaagaugagcgagugcgugcugggccagagcaagcggguggacuucugcggcaagggcuaccaccugaugagcuucccccagagcgccccacacggcgugguguuccuccacgucacauacgugcccgcccaggagaagaacuucaccaccgcccccgccauuugccacgacggcaaggcucacuucccccgggagggaguguucgugagcaacggcacccacugguucgugacccagcggaacuucuacgagccccagaucaucaccaccgacaacaccuucgugagcggcaacugcgacguggugaucggcaucgugaacaacaccguguacgacccccugcagccugagcuggacagcuucaaggaggagcuggacaaguacuucaagaaccacaccagccccgacguggaucugggcgacaucagcggcaucaacgccagcguggugaacauccagaaggagaucgaccggcugaacgagguggccaagaaccugaacgagagccugaucgaccugcaggagcugggcaaguacgagcaguacaucaaguggcccugguacaucuggcugggcuucaucgccggccugaucgccaucgugauggugaccaucaugcugugcugcaugaccagcugcuguagcugccugaagggcugcugcagcugcggcagcugcugcaaguucgacgaggacgacagcgagccagugcugaagggcgugaagcugcacuacaccugaggacuaguuauaagacugacuagcccgaugggccucccaacgggcccuccuccccuccuugcaccgagauuaauaaaaaaaaaaaaaaaaaaaaaaaaaaaaaaaaaaaaaaaaaaaaaaaaaaaaaaaaaaaaaaaaugcaucccccccccccccccccccccccccccccccaaaggcucuuuucagagccaccagaauu

SEQ ID NO: 23251 - RNA, 4039 nt, Artificial Sequence
  SARS-CoV-2/Wuhan/WIV05/2019__EPI_ISL_402128 spike protein mRNA gc (1-1273)(D614G_I692V)
aggagaaagcuuaccauguucguguuccuggugcugcugccccuggugagcagccagugcgugaaccugaccacccggacccagcugcccccugccuacaccaacagcuucacccggggcguguacuaccccgacaagguguuccggagcagcgugcugcacagcacccaggaccuguuccugcccuucuucagcaacgugaccugguuccacgccauccacgugagcggcaccaacggcaccaagcgguucgacaacccagugcugcccuucaacgacggcguguacuucgccagcaccgagaagucaaacaucauccggggcuggaucuucggcaccacccuggacagcaagacacagagccugcugaucgugaacaacgccaccaacguggugaucaaggugugcgaguuucaguucugcaacgaccccuuccugggcguguacuaccacaagaacaacaagagcuggauggagagcgaguuccgggucuacagcagcgcuaacaauugcaccuucgaguacgugagccagcccuuccugauggaccucgagggcaagcagggcaacuucaagaaccugcgggaguucguguucaagaacaucgauggcuacuucaagaucuacagcaagcacacccccaucaaccuggugcgggaccugccccagggauucagcgcccuggagccucugguggaccugcccaucggcaucaacaucaccagguuccagacccugcuggcccugcaccggagcuaccugacccccggcgacagcagcagcggcuggaccgccggcgccgccgcauacuacgugggcuaccugcagccacggaccuuccugcugaaguacaacgagaacggcaccaucaccgacgccguggacugcgcccuggacccccugagcgagaccaagugcacccuaaagagcuucaccguggagaagggcaucuaccagaccagcaacuuccgggugcagcccacugagagcaucgugcgguuccccaacauuaccaaccugugucccuucggcgagguguucaacgccacccgguucgccagcguguacgccuggaaccggaagcggaucagcaacugcguggccgacuacagcgugcuguacaacagcgccagcuucagcaccuucaagugcuacggcgugagcccuaccaagcugaacgaccugugcuucaccaacguguacgcugacagcuucgugauccggggcgacgaggugcggcagaucgcccccggccagaccggcaagaucgccgacuacaacuacaagcugcccgacgacuucaccggcugcgugaucgccuggaacagcaacaaccuggacagcaaggugggcggcaacuacaacuaccuguaccggcuguuccguaagagcaaccugaagccauucgagcgggacaucagcaccgagaucuaccaggccggcagcacccccugcaacgguguggagggcuuuaacugcuacuucccccugcagagcuacggcuuccagcccaccaacggcgugggcuaccagcccuaccgggugguggugcugagcuucgagcugcugcacgcccccgccaccgugugcggcccuaaaaagagcaccaaccuggugaagaacaagugcgugaacuucaauuucaacggccugaccggcaccggcgugcugaccgagagcaacaagaaguuccugcccuuccagcaguucggccgggauaucgccgacaccaccgacgcagugcgggacccccagacccuggagauccuggacaucaccccaugcagcuucggcggcgugagcgucaucacccccggcacaaacaccagcaaccagguggccgugcuguaccagggagugaacugcaccgaggugcccguggccauccacgccgaccagcugacccccaccuggcggguguacagcaccggcagcaacguguuccagacccgggccggcugccugaucggcgccgagcacgugaacaacuccuacgagugcgacauccccaucggcgcuggcaucugcgccagcuaccagacccagaccaacagcccccggcgggcccggagcguggccagccagagcgugaucgccuacaccaugagcuuaggcgccgagaacagcguggccuacagcaacaacagcaucgcgaucccuaccaacuucaccaucagcgugaccaccgagauccugcccgugagcaugaccaagaccagcguggacuguaccauguacauaugcggcgacagcaccgagugcagcaaccugcugcugcaguacggcagcuucugcacccagcugaaccgggcccugaccggcaucgccguggagcaggacaagaacacccaagagguguucgcccaggugaagcagaucuacaagacucccccaaucaaggacuucggcggcuucaacuucagccagauccugcccgaccccagcaagcccagcaagcggagcuucaucgaggaccugcuguucaacaaggugacccuggccgacgccggcuucaucaagcaguacggcgacugccugggggauaucgccgcucgggaccugaucugcgcccagaaguucaacggccugaccgugcugcccccucugcugaccgacgagaugaucgcccaguacaccagcgcccugcuugccggcaccaucaccagcggcuggaccuucggcgccggcgcagcccugcagauccccuucgccaugcagauggccuaccgguucaacggcaucggcgugacccagaacgugcuguacgagaaccagaagcugaucgccaaccaguucaacagcgccaucggcaagauccaggacagccugagcagcaccgccagcgcccugggcaagcugcaggacguggugaaccagaacgcucaggcccugaacacccuggugaagcagcugagcagcaacuucggcgccaucagcucagugcugaaugacauccugagcaggcuggacaagguggaggccgaggugcagaucgaccggcugaucaccggccggcugcagagccugcagaccuacgugacccagcagcugauccgggccgccgagauccgggccagcgccaaccuggcagccaccaagaugagcgagugcgugcugggccagagcaagcggguggacuuuugcggcaagggcuaccaccugaugagcuucccccagagcgccccacacggcguggucuuccuccacgugacauacgugcccgcccaggagaagaacuucaccaccgcccccgccaucugccacgacggcaaggcucacuucccccgggagggaguguucgugagcaacggcacccacugguucgugacccagcggaacuucuacgagccccagauuaucaccaccgacaacaccuucgugagcggcaacugcgacguggugaucggcaucgugaacaacaccguguacgacccccugcagccugagcuggacagcuucaaggaggagcuggacaaguacuucaagaaccacaccagccccgacguggaucugggcgacaucagcggcaucaacgccagcguggugaacauccagaaggagaucgaccggcugaacgagguggccaagaaccugaacgagagccugaucgaccugcaggagcugggcaaguacgagcaguacaucaaguggcccugguacaucuggcugggcuucaucgccggccugaucgccaucgugauggugaccaucaugcugugcugcaugaccagcugcuguagcugccugaagggcugcugcagcugcggcagcugcugcaaguucgacgaggacgacagcgagccagugcugaagggcgugaagcugcacuacaccugaggacuaguuauaagacugacuagcccgaugggccucccaacgggcccuccuccccuccuugcaccgagauuaauaaaaaaaaaaaaaaaaaaaaaaaaaaaaaaaaaaaaaaaaaaaaaaaaaaaaaaaaaaaaaaaaugcaucccccccccccccccccccccccccccccccaaaggcucuuuucagagccaccagaauu

SEQ ID NO: 23252 - RNA, 4039 nt, Artificial Sequence
  SARS-CoV-2/Wuhan/WIV05/2019__EPI_ISL_402128 spike protein mRNA gc (1-1273)(D614G_M1229I)
aggagaaagcuuaccauguucguguuccuggugcugcugccccuggugagcagccagugcgugaaccugaccacccggacccagcugcccccugccuacaccaacagcuucacccggggcguguacuaccccgacaagguguuccggagcagcgugcugcacagcacccaggaccuguuccugcccuucuucagcaacgugaccugguuccacgccauccacgugagcggcaccaacggcaccaagcgguucgacaacccagugcugcccuucaacgacggcguguacuucgccagcaccgagaagucaaacaucauccggggcuggaucuucggcaccacccuggacagcaagacacagagccugcugaucgugaacaacgccaccaacguggugaucaaggugugcgaguuucaguucugcaacgaccccuuccugggcguguacuaccacaagaacaacaagagcuggauggagagcgaguuccgggucuacagcagcgcuaacaauugcaccuucgaguacgugagccagcccuuccugauggaccucgagggcaagcagggcaacuucaagaaccugcgggaguucguguucaagaacaucgauggcuacuucaagaucuacagcaagcacacccccaucaaccuggugcgggaccugccccagggauucagcgcccuggagccucugguggaccugcccaucggcaucaacaucaccagguuccagacccugcuggcccugcaccggagcuaccugacccccggcgacagcagcagcggcuggaccgccggcgccgccgcauacuacgugggcuaccugcagccacggaccuuccugcugaaguacaacgagaacggcaccaucaccgacgccguggacugcgcccuggacccccugagcgagaccaagugcacccuaaagagcuucaccguggagaagggcaucuaccagaccagcaacuuccgggugcagcccacugagagcaucgugcgguuccccaacauuaccaaccugugucccuucggcgagguguucaacgccacccgguucgccagcguguacgccuggaaccggaagcggaucagcaacugcguggccgacuacagcgugcuguacaacagcgccagcuucagcaccuucaagugcuacggcgugagcccuaccaagcugaacgaccugugcuucaccaacguguacgcugacagcuucgugauccggggcgacgaggugcggcagaucgcccccggccagaccggcaagaucgccgacuacaacuacaagcugcccgacgacuucaccggcugcgugaucgccuggaacagcaacaaccuggacagcaaggugggcggcaacuacaacuaccuguaccggcuguuccguaagagcaaccugaagccauucgagcgggacaucagcaccgagaucuaccaggccggcagcacccccugcaacgguguggagggcuuuaacugcuacuucccccugcagagcuacggcuuccagcccaccaacggcgugggcuaccagcccuaccgggugguggugcugagcuucgagcugcugcacgcccccgccaccgugugcggcccuaaaaagagcaccaaccuggugaagaacaagugcgugaacuucaauuucaacggccugaccggcaccggcgugcugaccgagagcaacaagaaguuccugcccuuccagcaguucggccgggauaucgccgacaccaccgacgcagugcgggacccccagacccuggagauccuggacaucaccccaugcagcuucggcggcgugagcgucaucacccccggcacaaacaccagcaaccagguggccgugcuguaccagggagugaacugcaccgaggugcccguggccauccacgccgaccagcugacccccaccuggcggguguacagcaccggcagcaacguguuccagacccgggccggcugccugaucggcgccgagcacgugaacaacuccuacgagugcgacauccccaucggcgcuggcaucugcgccagcuaccagacccagaccaacagcccccggcgggcccggagcguggccagccagagcaucaucgccuacaccaugagcuuaggcgccgagaacagcguggccuacagcaacaacagcaucgcgaucccuaccaacuucaccaucagcgugaccaccgagauacugcccgugagcaugaccaagaccagcguggacuguaccauguacaucugcggcgacagcaccgagugcagcaaccugcugcugcaguacggcagcuucugcacccagcugaaccgggcccugaccggcaucgccguggagcaggacaagaacacccaagagguguucgcccaggugaagcagaucuacaagacucccccaaucaaggacuucggcggcuucaacuucagccagauccugcccgaccccagcaagcccagcaagcggagcuucaucgaggaccugcuguucaacaaggugacccuggccgacgccggcuucaucaagcaguacggcgacugccugggggauaucgccgcucgggaccugaucugcgcccagaaguucaacggccugaccgugcugcccccucugcugaccgacgagaugaucgcccaguacaccagcgcccugcuugccggcaccaucaccagcggcuggaccuucggcgccggcgcagcccugcagauccccuucgccaugcagauggccuaccgguucaacggcaucggcgugacccagaacgugcuguacgagaaccagaagcugaucgccaaccaguucaacagcgccaucggcaagauccaggacagccugagcagcaccgccagcgcccugggcaagcugcaggacguggugaaccagaacgcucaggcccugaacacccuggugaagcagcugagcagcaacuucggcgccaucagcucagugcugaaugacauccugagcaggcuggacaagguggaggccgaggugcagaucgaccggcugaucaccggccggcugcagagccugcagaccuacgugacccagcagcugauccgggccgccgagauccgggccagcgccaaccuggcagccaccaagaugagcgagugcgugcugggccagagcaagcggguggacuuuugcggcaagggcuaccaccugaugagcuucccccagagcgccccacacggcgugguguuccuccacgucacauacgugcccgcccaggagaagaacuucaccaccgcccccgccauuugccacgacggcaaggcucacuucccccgggagggaguguucgugagcaacggcacccacugguucgugacccagcggaacuucuacgagccccagaucaucaccaccgacaacaccuucgugagcggcaacugcgacguggugaucggcaucgugaacaacaccguguacgacccccugcagccugagcuggacagcuucaaggaggagcuggacaaguacuucaagaaccacaccagccccgacguggaucugggcgacaucagcggcaucaacgccagcguggugaacauccagaaggagaucgaccggcugaacgagguggccaagaaccugaacgagagccugaucgaccugcaggagcugggcaaguacgagcaguacaucaaguggcccugguacaucuggcugggcuucaucgccggccugaucgccaucgugaucgugaccaucaugcugugcugcaugaccagcugcuguagcugccugaagggcugcugcagcugcggcagcugcugcaaguucgacgaggacgacagcgagccagugcugaagggcgugaagcugcacuacaccugaggacuaguuauaagacugacuagcccgaugggccucccaacgggcccuccuccccuccuugcaccgagauuaauaaaaaaaaaaaaaaaaaaaaaaaaaaaaaaaaaaaaaaaaaaaaaaaaaaaaaaaaaaaaaaaaugcaucccccccccccccccccccccccccccccccaaaggcucuuuucagagccaccagaauu

SEQ ID NO: 23253 - RNA, 4033 nt, Artificial Sequence
  SARS-CoV-2/Wuhan/WIV05/2019__EPI_ISL_402128 spike protein mRNA gc (1-1273)(H69del_V70del_A222V_Y453F_S477N_D614G_I692V)
aggagaaagcuuaccauguucguguuccuggugcugcugccccuggugagcagccagugcgugaaccugaccacccggacccagcugcccccugccuacaccaacagcuucacccggggcguguacuaccccgacaagguguuccggagcagcgugcugcacagcacccaggaccuguuccugcccuucuucagcaacgugaccugguuccacgccaucagcggcaccaacggcaccaagcgguucgacaacccagugcugcccuucaacgacggcguguacuucgccagcaccgagaagucaaacaucauccggggcuggaucuucggcaccacccuggacagcaagacacagagccugcugaucgugaacaacgccaccaacguggugaucaaggugugcgaguuucaguucugcaacgaccccuuccugggcguguacuaccacaagaacaacaagagcuggauggagagcgaguuccggguguacagcagcgcuaacaauugcaccuucgaguacgucagccagcccuuccugauggaccucgagggcaagcagggcaacuucaagaaccugcgggaguucguguucaagaacaucgauggcuacuucaagaucuacagcaagcacacccccaucaaccuggugcgggaccugccccagggauucagcgugcuggagccucugguggaccugcccaucggcaucaacaucaccagguuccagacccugcuggcccugcaccggagcuaccugacccccggcgacagcagcagcggcuggaccgccggcgccgccgccuacuacgugggcuaccugcagccacggaccuuccugcugaaguacaacgagaacggcaccaucaccgacgcaguggacugcgcccuggacccccugagcgagaccaagugcacccuaaagagcuucaccguggagaagggcaucuaccagaccagcaacuuccgggugcagcccacugagagcaucgugcgguuccccaacauuaccaaccugugucccuucggcgagguguucaacgccacccgguucgccagcguguacgccuggaaccggaagcggaucagcaacugcguggccgacuacagcgugcuguacaacagcgccagcuucagcaccuucaagugcuacggcgugagcccuaccaagcugaacgaccugugcuucaccaacguguacgccgacagcuucgugauccggggcgacgaggugcggcagaucgcucccggccagaccggcaagaucgccgacuacaacuacaagcugcccgacgacuucaccggcugcgugaucgccuggaacagcaacaaccuggacagcaaggugggcggcaacuacaacuaccuguuccggcuguuccguaagagcaaccugaagccauuugagcgggacaucagcaccgagaucuaccaggccggcaacacccccugcaacgguguggagggcuucaacugcuacuucccccugcagagcuacggcuuccagcccaccaacggcgugggcuaccagcccuaccgggugguggugcugagcuucgagcugcugcacgcccccgccaccgugugcggcccuaaaaagagcaccaaccuggugaagaacaagugcgugaauuucaacuucaacggccugaccggcaccggcgugcugaccgagagcaacaagaaguuccugcccuuccagcaguucggccgggauaucgccgacaccaccgacgccgugcgggacccccagacccuggagauccuggacaucaccccaugcagcuucggcggcgugagcgucaucacccccggcacaaacaccagcaaccagguggcagugcuguaccagggagugaacugcaccgaggugcccguggccauccacgccgaccagcugacccccaccuggcggguguacagcaccggcagcaacguguuccagacccgggccggcugccugaucggcgccgagcacgugaacaacagcuacgagugcgacauccccaucggcgccggcaucugcgcuuccuaccagacccagaccaacagcccccggcgggcccggagcguggccagccagagcgugaucgccuacaccaugagcuuaggcgccgagaacagcguggccuacagcaacaacagcaucgccaucccuaccaacuucaccaucagcgugaccaccgagauccugcccgugagcaugaccaagaccagcguggacuguaccauguacauaugcggcgacagcaccgagugcagcaaccugcugcugcaguacggcagcuucugcacccagcugaaccgggcgcugaccggcaucgccguggagcaggacaagaacacccaagagguguucgcccaggugaagcagaucuacaagacucccccaaucaaggacuucggcggcuucaacuucagccagauccugcccgaccccagcaagcccagcaagcggagcuucaucgaggaccugcuguucaacaaggugacccuggccgacgccggcuucaucaagcaguacggcgacugccugggggauaucgccgcccgggaccugaucugcgcucagaaguucaacggccugaccgugcugcccccucugcugaccgacgagaugaucgcccaguacaccagcgcccugcuugccggcaccaucaccagcggcuggaccuucggcgccggcgccgcacugcagauccccuucgccaugcagauggccuaccgguucaacggcaucggcgugacccagaacgugcuguacgagaaccagaagcugaucgccaaccaguucaacagcgccaucggcaagauccaggacagccugagcagcaccgccagcgcccugggcaagcugcaggacguggugaaccagaacgcccaggcucugaacacccuggugaagcagcugagcagcaauuuuggcgccaucagcagcgugcugaacgacauccugucaaggcuggacaagguggaggccgaggugcagaucgaccggcugaucaccggccggcugcagagccugcagaccuacgugacccagcagcugauccgggccgccgagauccgggccagcgccaaccuggccgcaaccaagaugagcgagugcgugcugggccagagcaagcggguggacuucugcggcaagggcuaccaccugaugagcuucccccagagcgccccacacggcguggucuuccuccacgugacauacgugcccgcccaggagaagaacuucaccaccgcccccgccaucugccacgacggcaaggcccacuucccccgggagggaguguucgugagcaacggcacccacugguucgugacccagcggaacuucuacgagccccagauuaucaccaccgacaacaccuucgugagcggcaacugcgacguggugaucggcaucgugaacaacaccguguacgacccccugcagccugagcuggacagcuucaaggaggagcuggacaaguacuucaagaaccacaccagccccgacguggaucugggcgacaucagcggcaucaacgcuagcguggugaacauccagaaggagaucgaccggcugaacgagguggccaagaaccugaacgagagccugaucgaccugcaggagcugggcaaguacgagcaguacaucaaguggcccugguacaucuggcugggcuucaucgccggccugaucgccaucgugauggugaccaucaugcugugcugcaugaccagcugcuguagcugccugaagggcugcugcagcugcggcagcugcugcaaguucgacgaggacgacagcgagccagugcugaagggcgugaagcugcacuacaccugaggacuaguuauaagacugacuagcccgaugggccucccaacgggcccuccuccccuccuugcaccgagauuaauaaaaaaaaaaaaaaaaaaaaaaaaaaaaaaaaaaaaaaaaaaaaaaaaaaaaaaaaaaaaaaaaugcaucccccccccccccccccccccccccccccccaaaggcucuuuucagagccaccagaauu

SEQ ID NO: 23254 - RNA, 4033 nt, Artificial Sequence
  SARS-CoV-2/Wuhan/WIV05/2019__EPI_ISL_402128 spike protein mRNA gc (1-1273)(H69del_V70del_Y453F_D614G_I692V_M1229I)
aggagaaagcuuaccauguucguguuccuggugcugcugccccuggugagcagccagugcgugaaccugaccacccggacccagcugcccccugccuacaccaacagcuucacccggggcguguacuaccccgacaagguguuccggagcagcgugcugcacagcacccaggaccuguuccugcccuucuucagcaacgugaccugguuccacgccaucagcggcaccaacggcaccaagcgguucgacaacccagugcugcccuucaacgacggcguguacuucgccagcaccgagaagucaaacaucauccggggcuggaucuucggcaccacccuggacagcaagacacagagccugcugaucgugaacaacgccaccaacguggugaucaaggugugcgaguuucaguucugcaacgaccccuuccugggcguguacuaccacaagaacaacaagagcuggauggagagcgaguuccggguguacagcagcgcuaacaauugcaccuucgaguacgucagccagcccuuccugauggaccucgagggcaagcagggcaacuucaagaaccugcgggaguucguguucaagaacaucgauggcuacuucaagaucuacagcaagcacacccccaucaaccuggugcgggaccugccccagggauucagcgcccuggagccucugguggaccugcccaucggcaucaacaucaccagguuccagacccugcuggcccugcaccggagcuaccugacccccggcgacagcagcagcggcuggaccgccggcgccgccgcauacuacgugggcuaccugcagccacggaccuuccugcugaaguacaacgagaacggcaccaucaccgacgccguggacugcgcccuggacccccugagcgagaccaagugcacccuaaagagcuucaccguggagaagggcaucuaccagaccagcaacuuccgggugcagcccacugagagcaucgugcgguuccccaacauuaccaaccugugucccuucggcgagguguucaacgccacccgguucgccagcguguacgccuggaaccggaagcggaucagcaacugcguggccgacuacagcgugcuguacaacagcgccagcuucagcaccuucaagugcuacggcgugagcccuaccaagcugaacgaccugugcuucaccaacguguacgcugacagcuucgugauccggggcgacgaggugcggcagaucgcccccggccagaccggcaagaucgccgacuacaacuacaagcugcccgacgacuucaccggcugcgugaucgccuggaacagcaacaaccuggacagcaaggugggcggcaacuacaacuaccuguuccggcuguuccguaagagcaaccugaagccauuugagcgggacaucagcaccgagaucuaccaggccggcagcacccccugcaacgguguggagggcuucaacugcuacuucccccugcagagcuacggcuuccagcccaccaacggcgugggcuaccagcccuaccgggugguggugcugagcuucgagcugcugcacgcccccgccaccgugugcggcccuaaaaagagcaccaaccuggugaagaacaagugcgugaacuucaauuucaacggccugaccggcaccggcgugcugaccgagagcaacaagaaguuccugcccuuccagcaguucggccgggauaucgccgacaccaccgacgcagugcgggacccccagacccuggagauccuggacaucaccccaugcagcuucggcggcgugagcgugaucacccccggcacaaacaccagcaaccaggucgccgugcuguaccagggagugaacugcaccgaggugcccguggccauccacgccgaccagcugacccccaccuggcggguguacagcaccggcagcaacguguuccagacccgggccggcugccugaucggcgccgagcacgugaacaacuccuacgagugcgacauccccaucggcgcuggcaucugcgccagcuaccagacccagaccaacagcccccggcgggcccggagcguggccagccagagcgugaucgccuacaccaugagcuuaggcgccgagaacagcguggccuacagcaacaacagcaucgcgaucccuaccaacuucaccaucagcgugaccaccgagauccugcccgugagcaugaccaagaccagcguggacuguaccauguacauaugcggcgacagcaccgagugcagcaaccugcugcugcaguacggcagcuucugcacccagcugaaccgggcccugaccggcaucgccguggagcaggacaagaacacccaagagguguucgcccaggugaagcagaucuacaagacucccccaaucaaggacuucggcggcuucaacuucagccagauccugcccgaccccagcaagcccagcaagcggagcuucaucgaggaccugcuguucaacaaggugacccuggccgacgccggcuucaucaagcaguacggcgacugccugggggauaucgccgcucgggaccugaucugcgcccagaaguucaacggccugaccgugcugcccccucugcugaccgacgagaugaucgcccaguacaccagcgcccugcuugccggcaccaucaccagcggcuggaccuucggcgccggcgcagcccugcagauccccuucgccaugcagauggccuaccgguucaacggcaucggcgugacccagaacgugcuguacgagaaccagaagcugaucgccaaccaguucaacagcgccaucggcaagauccaggacagccugagcagcaccgccagcgcccugggcaagcugcaggacguggugaaccagaacgcucaggcccugaacacccuggugaagcagcugagcagcaacuuuggcgccaucagcucagugcugaaugacauccugagcaggcuggacaagguggaggccgaggugcagaucgaccggcugaucaccggccggcugcagagccugcagaccuacgugacccagcagcugauccgggccgccgagauccgggccagcgccaaccuggcagccaccaagaugagcgagugcgugcugggccagagcaagcggguggacuucugcggcaagggcuaccaccugaugagcuucccccagagcgccccacacggcgugguguuccuccacgucacauacgugcccgcccaggagaagaacuucaccaccgcccccgccaucugccacgacggcaaggcucacuucccccgggagggaguguucgugagcaacggcacccacugguucgugacccagcggaacuucuacgagccccagauuaucaccaccgacaacaccuucgugagcggcaacugcgacguggugaucggcaucgugaacaacaccguguacgacccccugcagccugagcuggacagcuucaaggaggagcuggacaaguacuucaagaaccacaccagccccgacguggaucugggcgacaucagcggcaucaacgccagcguggugaacauccagaaggagaucgaccggcugaacgagguggccaagaaccugaacgagagccugaucgaccugcaggagcugggcaaguacgagcaguacaucaaguggcccugguacaucuggcugggcuucaucgccggccugaucgccaucgugaucgugaccaucaugcugugcugcaugaccagcugcuguagcugccugaagggcugcugcagcugcggcagcugcugcaaguucgacgaggacgacagcgagccagugcugaagggcgugaagcugcacuacaccugaggacuaguuauaagacugacuagcccgaugggccucccaacgggcccuccuccccuccuugcaccgagauuaauaaaaaaaaaaaaaaaaaaaaaaaaaaaaaaaaaaaaaaaaaaaaaaaaaaaaaaaaaaaaaaaaugcaucccccccccccccccccccccccccccccccaaaggcucuuuucagagccaccagaauu

SEQ ID NO: 23255 - RNA, 4030 nt, Artificial Sequence
  SARS-CoV-2/Wuhan/WIV05/2019__EPI_ISL_402128 spike protein mRNA gc (1-1273)(H69del_V70del_Y144del_N501Y_A570D_D614G_P681H_T716I_S982 A_D1118H)
aggagaaagcuuaccauguucguguuccuggugcugcugccccuggugagcagccagugcgugaaccugaccacccggacccagcugcccccugccuacaccaacagcuucacccggggcguguacuaccccgacaagguguuccggagcagcgugcugcacagcacccaggaccuguuccugcccuucuucagcaacgugaccugguuccacgccaucagcggcaccaacggcaccaagcgguucgacaacccagugcugcccuucaacgacggcguguacuucgccagcaccgagaagucaaacaucauccggggcuggaucuucggcaccacccuggacagcaagacacagagccugcugaucgugaacaacgccaccaacguggugaucaaggugugcgaguuucaguucugcaacgaccccuuccugggcguguaccacaagaacaacaagagcuggauggagagcgaguuccggguguacagcagcgcuaacaauugcaccuucgaguacgucagccagcccuuccugauggaccucgagggcaagcagggcaacuucaagaaccugcgggaguucguguucaagaacaucgauggcuacuucaagaucuacagcaagcacacccccaucaaccuggugcgggaccugccccagggauucagcgcccuggagccucugguggaccugcccaucggcaucaacaucaccagguuccagacccugcuggcccugcaccggagcuaccugacccccggcgacagcagcagcggcuggaccgccggcgccgccgcauacuacgugggcuaccugcagccacggaccuuccugcugaaguacaacgagaacggcaccaucaccgacgccguggacugcgcccuggacccccugagcgagaccaagugcacccuaaagagcuucaccguggagaagggcaucuaccagaccagcaacuuccgggugcagcccacugagagcaucgugcgguuccccaacauuaccaaccugugucccuucggcgagguguucaacgccacccgguucgccagcguguacgccuggaaccggaagcggaucagcaacugcguggccgacuacagcgugcuguacaacagcgccagcuucagcaccuucaagugcuacggcgugagcccuaccaagcugaacgaccugugcuucaccaacguguacgcugacagcuucgugauccggggcgacgaggugcggcagaucgcccccggccagaccggcaagaucgccgacuacaacuacaagcugcccgacgacuucaccggcugcgugaucgccuggaacagcaacaaccuggacagcaaggugggcggcaacuacaacuaccuguaccggcuguuccguaagagcaaccugaagccauucgagcgggacaucagcaccgagaucuaccaggccggcagcacccccugcaacgguguggagggcuuuaacugcuacuucccccugcagagcuacggcuuccagcccaccuacggcgugggcuaccagcccuaccgggugguggugcugagcuucgagcugcugcacgcccccgccaccgugugcggcccuaaaaagagcaccaaccuggugaagaacaagugcgugaacuucaacuucaauggccugaccggcaccggcgugcugaccgagagcaacaagaaguuccugcccuuccagcaguucggccgggauaucgacgacaccaccgacgccgugcgggacccccagacccuggagauccuggacaucaccccaugcagcuucggcggcgugagcgugaucacccccggcacaaacaccagcaaccaggucgcagugcuguaccagggagugaacugcaccgaggugcccguggccauccacgccgaccagcugacccccaccuggcggguguacagcaccggcagcaacguguuccagacccgggccggcugccugaucggcgccgagcacgugaacaacuccuacgagugcgacauccccaucggcgccggcaucugcgcuagcuaccagacccagaccaacagccaccggcgggcccggagcguggccagccagagcaucaucgccuacaccaugagcuuaggcgccgagaacagcguggccuacagcaacaacagcaucgccauccccaucaacuucaccauaagcgugaccaccgagauccugccugugagcaugaccaagaccagcguggacuguaccauguacaucugcggcgacagcaccgagugcagcaaccugcugcugcaguacggcagcuucugcacccagcugaaccgggcgcugaccggcaucgccguggagcaggacaagaacacccaagagguguucgcccaggugaagcagaucuacaagaccccacccaucaaggacuucggcggcuucaacuucagccagauccugcccgaccccagcaagcccagcaagcggagcuucaucgaggaccugcuguucaacaaggugacucuggccgacgccggcuucaucaagcaguacggcgauugccugggggacaucgccgcccgggaccugaucugcgcucagaaguucaacggccugaccgugcugccuccccugcugaccgacgagaugaucgcccaguacaccagcgcccugcuugccggcaccaucaccagcggcuggaccuucggcgccggcgccgcacugcagauccccuucgccaugcagauggccuaccgguucaacggcaucggcgugacccagaacgugcuguacgagaaccagaagcugaucgccaaccaguucaacagcgccaucggcaagauccaggacagccugagcagcaccgccagcgcccugggcaagcugcaggacguggugaaccagaacgcccaggcucugaacacccuggugaagcagcugagcagcaacuucggcgccaucagcucagugcugaacgacauccuggccaggcuggacaagguggaggccgaggugcagaucgaccggcugaucaccggccggcugcagagccugcagaccuacgugacccagcagcugauccgggccgccgagauucgggccagcgccaaucuggcagccaccaagaugagcgagugcgugcugggccagagcaagcggguggacuuuugcggcaagggcuaccaccugaugagcuucccccagagcgcuccccacggcgugguguuccuccacgugaccuacgucccagcccaggagaagaacuucacaaccgcccccgccaucugccacgacggcaaggcccacuucccccgggagggaguguucgugagcaacggcacccacugguucgugacccagcggaacuucuacgagccccagaucaucaccacccacaacaccuucgugagcggcaacugcgacguggugaucggcaucgugaacaacaccguguacgacccccugcagcccgagcuggacagcuucaaggaggagcuggacaaguacuucaagaaccacaccagcccugacguggaucugggcgacaucagcggcaucaacgccagcguggugaacauccagaaggagaucgaccggcugaacgagguggccaagaaccugaacgagagccugaucgaccugcaggagcugggcaaguacgagcaguacaucaaguggcccugguacaucuggcugggcuucaucgccggccugaucgccaucgugauggugaccaucaugcugugcugcaugaccagcugcuguagcugccugaagggcugcugcagcugcggcagcugcugcaaguucgacgaggacgacagcgagcccgugcugaagggcgugaagcugcacuacaccugaggacuaguuauaagacugacuagcccgaugggccucccaacgggcccuccuccccuccuugcaccgagauuaauaaaaaaaaaaaaaaaaaaaaaaaaaaaaaaaaaaaaaaaaaaaaaaaaaaaaaaaaaaaaaaaaugcaucccccccccccccccccccccccccccccccaaaggcucuuuucagagccaccagaauu

SEQ ID NO: 23256 - RNA, 4039 nt, Artificial Sequence
  SARS-CoV-2/Wuhan/WIV05/2019__EPI_ISL_402128 spike protein mRNA gc (1-1273)(K417N_E484K_N501Y_D614G)
aggagaaagcuuaccauguucguguuccuggugcugcugccccuggugagcagccagugcgugaaccugaccacccggacccagcugcccccugccuacaccaacagcuucacccggggcguguacuaccccgacaagguguuccggagcagcgugcugcacagcacccaggaccuguuccugcccuucuucagcaacgugaccugguuccacgccauccacgugagcggcaccaacggcaccaagcgguucgacaacccagugcugcccuucaacgacggcguguacuucgccagcaccgagaagucaaacaucauccggggcuggaucuucggcaccacccuggacagcaagacacagagccugcugaucgugaacaacgccaccaacguggugaucaaggugugcgaguuucaguucugcaacgaccccuuccugggcguguacuaccacaagaacaacaagagcuggauggagagcgaguuccgggucuacagcagcgcuaacaauugcaccuucgaguacgugagccagcccuuccugauggaccucgagggcaagcagggcaacuucaagaaccugcgggaguucguguucaagaacaucgauggcuacuucaagaucuacagcaagcacacccccaucaaccuggugcgggaccugccccagggauucagcgcccuggagccucugguggaccugcccaucggcaucaacaucaccagguuccagacccugcuggcccugcaccggagcuaccugacccccggcgacagcagcagcggcuggaccgccggcgccgccgcauacuacgugggcuaccugcagccacggaccuuccugcugaaguacaacgagaacggcaccaucaccgacgccguggacugcgcccuggacccccugagcgagaccaagugcacccuaaagagcuucaccguggagaagggcaucuaccagaccagcaacuuccgggugcagcccacugagagcaucgugcgguuccccaacauuaccaaccugugucccuucggcgagguguucaacgccacccgguucgccagcguguacgccuggaaccggaagcggaucagcaacugcguggccgacuacagcgugcuguacaacagcgccagcuucagcaccuucaagugcuacggcgugagcccuaccaagcugaacgaccugugcuucaccaacguguacgcugacagcuucgugauccggggcgacgaggugcggcagaucgcccccggccagaccggcaacaucgccgacuacaacuacaagcugcccgacgacuucaccggcugcgugaucgccuggaacagcaacaaccuggacagcaaggugggcggcaacuacaacuaccuguaccggcuguuccguaagagcaaccugaagccauucgagcgggacaucagcaccgagaucuaccaggccggcagcacccccugcaacggugugaagggcuuuaacugcuacuucccccugcagagcuacggcuuccagcccaccuacggcgugggcuaccagcccuaccgggugguggugcugagcuucgagcugcugcacgcccccgccaccgugugcggcccuaaaaagagcaccaaccuggugaagaacaagugcgugaacuucaauuucaacggccugaccggcaccggcgugcugaccgagagcaacaagaaguuccugcccuuccagcaguucggccgggauaucgccgacaccaccgacgcagugcgggacccccagacccuggagauccuggacaucaccccaugcagcuucggcggcgugagcgucaucacccccggcacaaacaccagcaaccagguggccgugcuguaccagggagugaacugcaccgaggugcccguggccauccacgccgaccagcugacccccaccuggcggguguacagcaccggcagcaacguguuccagacccgggccggcugccugaucggcgccgagcacgugaacaacuccuacgagugcgacauccccaucggcgcuggcaucugcgccagcuaccagacccagaccaacagcccccggcgggcccggagcguggccagccagagcaucaucgccuacaccaugagcuuaggcgccgagaacagcguggccuacagcaacaacagcaucgcgaucccuaccaacuucaccaucagcgugaccaccgagauacugcccgugagcaugaccaagaccagcguggacuguaccauguacaucugcggcgacagcaccgagugcagcaaccugcugcugcaguacggcagcuucugcacccagcugaaccgggcccugaccggcaucgccguggagcaggacaagaacacccaagagguguucgcccaggugaagcagaucuacaagacucccccaaucaaggacuucggcggcuucaacuucagccagauccugcccgaccccagcaagcccagcaagcggagcuucaucgaggaccugcuguucaacaaggugacccuggccgacgccggcuucaucaagcaguacggcgacugccugggggauaucgccgcucgggaccugaucugcgcccagaaguucaacggccugaccgugcugcccccucugcugaccgacgagaugaucgcccaguacaccagcgcccugcuugccggcaccaucaccagcggcuggaccuucggcgccggcgcagcccugcagauccccuucgccaugcagauggccuaccgguucaacggcaucggcgugacccagaacgugcuguacgagaaccagaagcugaucgccaaccaguucaacagcgccaucggcaagauccaggacagccugagcagcaccgccagcgcccugggcaagcugcaggacguggugaaccagaacgcucaggcccugaacacccuggugaagcagcugagcagcaacuucggcgccaucagcucagugcugaaugacauccugagcaggcuggacaagguggaggccgaggugcagaucgaccggcugaucaccggccggcugcagagccugcagaccuacgugacccagcagcugauccgggccgccgagauccgggccagcgccaaccuggcagccaccaagaugagcgagugcgugcugggccagagcaagcggguggacuuuugcggcaagggcuaccaccugaugagcuucccccagagcgccccacacggcgugguguuccuccacgucacauacgugcccgcccaggagaagaacuucaccaccgcccccgccauuugccacgacggcaaggcucacuucccccgggagggaguguucgugagcaacggcacccacugguucgugacccagcggaacuucuacgagccccagaucaucaccaccgacaacaccuucgugagcggcaacugcgacguggugaucggcaucgugaacaacaccguguacgacccccugcagccugagcuggacagcuucaaggaggagcuggacaaguacuucaagaaccacaccagccccgacguggaucugggcgacaucagcggcaucaacgccagcguggugaacauccagaaggagaucgaccggcugaacgagguggccaagaaccugaacgagagccugaucgaccugcaggagcugggcaaguacgagcaguacaucaaguggcccugguacaucuggcugggcuucaucgccggccugaucgccaucgugauggugaccaucaugcugugcugcaugaccagcugcuguagcugccugaagggcugcugcagcugcggcagcugcugcaaguucgacgaggacgacagcgagccagugcugaagggcgugaagcugcacuacaccugaggacuaguuauaagacugacuagcccgaugggccucccaacgggcccuccuccccuccuugcaccgagauuaauaaaaaaaaaaaaaaaaaaaaaaaaaaaaaaaaaaaaaaaaaaaaaaaaaaaaaaaaaaaaaaaaugcaucccccccccccccccccccccccccccccccaaaggcucuuuucagagccaccagaauu

SEQ ID NO: 23257 - RNA, 4030 nt, Artificial Sequence
  SARS-CoV-2/Wuhan/WIV05/2019__EPI_ISL_402128 spike protein mRNA gc (1-1273)(L18F_D80A_D215G_L242del_A243del_L244del_R246I_K417N_E484 K_N501Y_D614G_A701V)
aggagaaagcuuaccauguucguguuccuggugcugcugccccuggugagcagccagugcgugaacuucaccacccggacccagcugcccccugccuacaccaacagcuucacccggggcguguacuaccccgacaagguguuccggagcagcgugcugcacagcacccaggaccuguuccugcccuucuucagcaacgugaccugguuccacgccauccacgugagcggcaccaacggcaccaagcgguucgccaacccagugcugcccuucaacgacggcguguacuucgccagcaccgagaagucaaacaucauccggggcuggaucuuuggcaccacccuggacagcaagacacagagccugcugaucgugaacaacgcuaccaacguggugaucaaggugugcgaguuccaguucugcaacgaccccuuccugggcguguacuaccacaagaacaacaagagcuggauggagagcgaguuccgggucuacagcagcgccaacaauugcaccuucgaguacgugagccagcccuuccugauggaccuggagggcaagcagggcaacuucaagaaccuccgggaguucguguucaagaacaucgacggcuacuucaagaucuacagcaagcacacccccaucaaccuggugcggggacugccccagggcuucagcgcccuggagccucugguggaucugcccaucggcaucaacaucaccagguuccagacccugcacaucagcuaccugacccccggcgacagcagcagcggcuggaccgccggcgccgccgcauacuacgugggcuaccugcagccacggaccuuccugcugaaguacaacgagaacggcaccaucaccgacgccguggacugcgcccuggacccccugagcgagaccaagugcacccuuaagagcuucaccguggagaagggcaucuaccagaccagcaacuuccgggugcagcccacugagagcauugugcgguuccccaacaucaccaaccugugucccuucggcgagguguucaacgccacccgguucgccagcguguacgccuggaaccggaagcggaucagcaacugcguggccgacuacagcgugcuguacaacagcgccagcuucagcaccuucaagugcuacggcgugagcccuaccaagcugaacgaccugugcuucaccaacguguacgcugacagcuucgugauccggggcgacgaggugcggcagaucgcccccggccagaccggcaacaucgccgacuacaacuacaagcugcccgacgacuucaccggcugcgugaucgccuggaacagcaacaaccuggacagcaaggugggcggcaacuacaacuaccuguaccggcuauuccguaagagcaaccugaagccauuugagcgggacaucagcaccgagaucuaccaggccgguagcacccccugcaacggcgugaagggcuucaacugcuacuucccccugcagagcuacggcuuccagcccaccuacggcgugggcuaccagcccuaccgggugguggugcugagcuucgagcugcugcacgcccccgccaccgugugcggcccuaaaaagagcaccaaccuggugaagaacaagugcgugaacuucaauuucaacggccugaccggcaccggcgugcugaccgagagcaacaagaaguuccugcccuuccagcaguucggccgggacaucgccgacaccaccgaugcagugcgggacccccagacccuggagauccuggacaucaccccaugcagcuucggcggcgugagcgucaucacccccggaacaaacaccagcaaccagguggccgugcuguaccagggcgugaacugcaccgaggugcccguggccauccacgccgaccagcugacccccaccuggcggguguacagcaccggcagcaacguguuccagacccgggccggcugccugaucggcgccgagcacgugaacaacuccuacgagugcgacauccccaucggcgcuggcaucugcgccagcuaccagacccagaccaacagcccccggcgggcccggagcguggccagccagagcaucaucgccuacaccaugagccugggcguggagaacagcguggccuacagcaacaacagcaucgccaucccuaccaacuucaccauaagcgugaccaccgagauccugcccgugagcaugaccaagaccagcguggacuguaccauguacaucugcggcgacagcaccgagugcagcaaccuguuacugcaguacggcagcuucugcacccagcugaaccgggcgcugaccggcaucgccguggagcaggacaagaacacccaagagguguucgcccaggugaagcagaucuacaagacucccccaaucaaggacuucggcggcuucaacuucagccagauccugcccgaccccagcaagcccagcaagcggagcuucaucgaggaccugcuguucaacaaggugacccuggccgacgccggcuucaucaagcaguacggggacugccugggcgacaucgccgcccgggaccugaucugcgcucagaaguucaacggccugaccgugcugcccccucugcugaccgaugagaugaucgcccaguacaccagcgcccugcuggccggcaccaucaccagcggcuggaccuucggcgccggcgccgcacugcagauccccuucgccaugcagauggccuaccgguucaacggcaucggcgugacccagaacgugcuguacgagaaccagaagcugaucgccaaccaguucaacagcgccaucggcaagauccaggacagccugagcagcaccgccagcgcccugggcaagcugcaggacguggugaaccagaacgcccaggcucugaacacccuggugaagcagcugagcagcaacuuuggcgccaucagcucagugcugaaugacauccugagccggcuggacaagguggaggccgaggugcagaucgacaggcugaucaccggccggcugcagagccugcagaccuacgugacccagcagcugauccgggccgccgagauucgggccagcgccaaccuggccgcaaccaagaugagcgagugcgugcugggccagagcaagcggguggacuucugcggcaagggcuaccaccugaugagcuucccccagagcgccccacacggcguggucuuccugcacgugacauacgugcccgcccaggagaagaacuucaccaccgcccccgccaucugccacgacggaaaggcccacuucccccgggagggcguguucgugagcaacggcacccacugguucgugacccagcggaacuucuacgagccccagaucaucaccaccgacaacaccuucgugagcggcaacugcgacguggugaucggcaucgugaacaacaccguguacgacccccugcagccugagcuggacagcuucaaggaggagcucgacaaguacuucaagaaccacaccagccccgacguggaccugggcgacaucagcggcaucaacgcuagcguggugaacauccagaaggagaucgaucggcugaacgagguggccaagaaccugaacgagagccugaucgaccugcaggagcugggcaaguacgagcaguacaucaaguggcccugguacaucuggcugggcuucaucgccggccugaucgccaucgugauggugaccaucaugcugugcugcaugaccagcugcuguagcugccugaagggcugcugcagcugcggcagcugcugcaaguucgacgaggacgacagcgagccagugcugaagggcgugaagcugcacuacaccugaggacuaguuauaagacugacuagcccgaugggccucccaacgggcccuccuccccuccuugcaccgagauuaauaaaaaaaaaaaaaaaaaaaaaaaaaaaaaaaaaaaaaaaaaaaaaaaaaaaaaaaaaaaaaaaaugcaucccccccccccccccccccccccccccccccaaaggcucuuuucagagccaccagaauu

SEQ ID NO: 23258 - RNA, 4039 nt, Artificial Sequence
  SARS-CoV-2/Wuhan/WIV05/2019__EPI_ISL_402128 spike protein mRNA gc (1-1273)(E484K_D614G)
aggagaaagcuuaccauguucguguuccuggugcugcugccccuggugagcagccagugcgugaaccugaccacccggacccagcugcccccugccuacaccaacagcuucacccggggcguguacuaccccgacaagguguuccggagcagcgugcugcacagcacccaggaccuguuccugcccuucuucagcaacgugaccugguuccacgccauccacgugagcggcaccaacggcaccaagcgguucgacaacccagugcugcccuucaacgacggcguguacuucgccagcaccgagaagucaaacaucauccggggcuggaucuucggcaccacccuggacagcaagacacagagccugcugaucgugaacaacgccaccaacguggugaucaaggugugcgaguuucaguucugcaacgaccccuuccugggcguguacuaccacaagaacaacaagagcuggauggagagcgaguuccgggucuacagcagcgcuaacaauugcaccuucgaguacgugagccagcccuuccugauggaccucgagggcaagcagggcaacuucaagaaccugcgggaguucguguucaagaacaucgauggcuacuucaagaucuacagcaagcacacccccaucaaccuggugcgggaccugccccagggauucagcgcccuggagccucugguggaccugcccaucggcaucaacaucaccagguuccagacccugcuggcccugcaccggagcuaccugacccccggcgacagcagcagcggcuggaccgccggcgccgccgcauacuacgugggcuaccugcagccacggaccuuccugcugaaguacaacgagaacggcaccaucaccgacgccguggacugcgcccuggacccccugagcgagaccaagugcacccuaaagagcuucaccguggagaagggcaucuaccagaccagcaacuuccgggugcagcccacugagagcaucgugcgguuccccaacauuaccaaccugugucccuucggcgagguguucaacgccacccgguucgccagcguguacgccuggaaccggaagcggaucagcaacugcguggccgacuacagcgugcuguacaacagcgccagcuucagcaccuucaagugcuacggcgugagcccuaccaagcugaacgaccugugcuucaccaacguguacgcugacagcuucgugauccggggcgacgaggugcggcagaucgcccccggccagaccggcaagaucgccgacuacaacuacaagcugcccgacgacuucaccggcugcgugaucgccuggaacagcaacaaccuggacagcaaggugggcggcaacuacaacuaccuguaccggcuguuccguaagagcaaccugaagccauucgagcgggacaucagcaccgagaucuaccaggccggcagcacccccugcaacggugugaagggcuuuaacugcuacuucccccugcagagcuacggcuuccagcccaccaacggcgugggcuaccagcccuaccgggugguggugcugagcuucgagcugcugcacgcccccgccaccgugugcggcccuaaaaagagcaccaaccuggugaagaacaagugcgugaacuucaauuucaacggccugaccggcaccggcgugcugaccgagagcaacaagaaguuccugcccuuccagcaguucggccgggauaucgccgacaccaccgacgcagugcgggacccccagacccuggagauccuggacaucaccccaugcagcuucggcggcgugagcgucaucacccccggcacaaacaccagcaaccagguggccgugcuguaccagggagugaacugcaccgaggugcccguggccauccacgccgaccagcugacccccaccuggcggguguacagcaccggcagcaacguguuccagacccgggccggcugccugaucggcgccgagcacgugaacaacuccuacgagugcgacauccccaucggcgcuggcaucugcgccagcuaccagacccagaccaacagcccccggcgggcccggagcguggccagccagagcaucaucgccuacaccaugagcuuaggcgccgagaacagcguggccuacagcaacaacagcaucgcgaucccuaccaacuucaccaucagcgugaccaccgagauacugcccgugagcaugaccaagaccagcguggacuguaccauguacaucugcggcgacagcaccgagugcagcaaccugcugcugcaguacggcagcuucugcacccagcugaaccgggcccugaccggcaucgccguggagcaggacaagaacacccaagagguguucgcccaggugaagcagaucuacaagacucccccaaucaaggacuucggcggcuucaacuucagccagauccugcccgaccccagcaagcccagcaagcggagcuucaucgaggaccugcuguucaacaaggugacccuggccgacgccggcuucaucaagcaguacggcgacugccugggggauaucgccgcucgggaccugaucugcgcccagaaguucaacggccugaccgugcugcccccucugcugaccgacgagaugaucgcccaguacaccagcgcccugcuugccggcaccaucaccagcggcuggaccuucggcgccggcgcagcccugcagauccccuucgccaugcagauggccuaccgguucaacggcaucggcgugacccagaacgugcuguacgagaaccagaagcugaucgccaaccaguucaacagcgccaucggcaagauccaggacagccugagcagcaccgccagcgcccugggcaagcugcaggacguggugaaccagaacgcucaggcccugaacacccuggugaagcagcugagcagcaacuucggcgccaucagcucagugcugaaugacauccugagcaggcuggacaagguggaggccgaggugcagaucgaccggcugaucaccggccggcugcagagccugcagaccuacgugacccagcagcugauccgggccgccgagauccgggccagcgccaaccuggcagccaccaagaugagcgagugcgugcugggccagagcaagcggguggacuuuugcggcaagggcuaccaccugaugagcuucccccagagcgccccacacggcgugguguuccuccacgucacauacgugcccgcccaggagaagaacuucaccaccgcccccgccauuugccacgacggcaaggcucacuucccccgggagggaguguucgugagcaacggcacccacugguucgugacccagcggaacuucuacgagccccagaucaucaccaccgacaacaccuucgugagcggcaacugcgacguggugaucggcaucgugaacaacaccguguacgacccccugcagccugagcuggacagcuucaaggaggagcuggacaaguacuucaagaaccacaccagccccgacguggaucugggcgacaucagcggcaucaacgccagcguggugaacauccagaaggagaucgaccggcugaacgagguggccaagaaccugaacgagagccugaucgaccugcaggagcugggcaaguacgagcaguacaucaaguggcccugguacaucuggcugggcuucaucgccggccugaucgccaucgugauggugaccaucaugcugugcugcaugaccagcugcuguagcugccugaagggcugcugcagcugcggcagcugcugcaaguucgacgaggacgacagcgagccagugcugaagggcgugaagcugcacuacaccugaggacuaguuauaagacugacuagcccgaugggccucccaacgggcccuccuccccuccuugcaccgagauuaauaaaaaaaaaaaaaaaaaaaaaaaaaaaaaaaaaaaaaaaaaaaaaaaaaaaaaaaaaaaaaaaaugcaucccccccccccccccccccccccccccccccaaaggcucuuuucagagccaccagaauu

SEQ ID NO: 23259 - RNA, 4039 nt, Artificial Sequence
  SARS-CoV-2/Wuhan/WIV05/2019__EPI_ISL_402128 spike protein mRNA gc (1-1273)(L18F_T20N_P26S_D138Y_R190S_K417T_E484K_N501Y_D614G_H655Y _T1027I)
aggagaaagcuuaccauguucguguuccuggugcugcugccccuggugagcagccagugcgugaacuucaccaaccggacccagcugcccagcgccuacaccaacagcuucacccggggcguguacuacccugacaagguguuccggagcagcgugcugcacagcacccaggaccuguuccugcccuucuucagcaacgugaccugguuccacgccauccacgugagcggcaccaacggcaccaagcgguucgacaaccccgugcugccauucaacgacggcguguacuucgccagcaccgagaagucaaacaucauccggggcuggaucuuuggcaccacccuggacagcaagacccagagccugcugaucgugaacaacgccacaaacguggugaucaaggugugcgaguuccaguucugcaacuaccccuuccugggcguguacuaccacaagaacaacaagagcuggauggagagcgaguuccgggucuacagcagcgcuaauaacugcaccuucgaguacgugagccagcccuuccugauggaccuggagggcaagcagggcaacuucaagaaccucagcgaguucguguucaagaacaucgacggcuacuucaagaucuacagcaagcacacccccaucaaccuggugcgggaucugccccagggauucagcgcccuggagccccugguggaccugccuaucggcaucaacaucacccgguuccagacccugcuggcccugcacaggagcuaccugacccccggcgacagcagcagcggcuggaccgccggcgccgccgcauacuacgugggcuaccugcagccccggaccuuccugcugaaguacaacgagaacggcaccaucaccgacgccguggacugcgcccuggacccacugagcgagaccaagugcacccuaaagagcuucaccguggagaagggcaucuaccagaccagcaacuuccgggugcagcccaccgagagcaucgugcgguuccccaacauuacuaaccugugucccuucggcgagguguucaacgccacccgguucgccagcguguacgccuggaaccggaagcggaucagcaacugcguggccgacuacagcgugcuguacaacagcgccagcuucagcaccuucaagugcuacggcgugagccccaccaagcugaacgaccugugcuucaccaacguguacgcugacagcuucgugauccggggcgacgaggugcggcagaucgccccuggccagaccggcaccaucgccgacuacaacuacaagcugcccgacgacuucaccggcugcgugaucgccuggaacagcaacaaccuggacagcaaggugggcggcaacuacaacuaccuguaccggcuguuccguaagagcaaccugaagcccuuugagcgggacaucagcaccgagaucuaccaggccggcagcaccccaugcaacggugugaagggcuucaacugcuacuucccccugcagagcuacggcuuccagcccaccuacggcgugggcuaccagcccuaccgggugguggugcugagcuucgagcugcugcacgcccccgccaccgugugcggccccaaaaagagcaccaaccuggugaagaacaagugcgugaacuucaauuucaacggccugaccggcaccggcgugcugaccgagagcaacaagaaguuccugccuuuccagcaguucggccgggacaucgccgauaccaccgacgcagugcgggacccccagacccuggagauccuggacaucacccccugcagcuucggcggcgugagcgucaucaccccaggcacaaacaccagcaaccagguggccgugcuguaccagggagugaacugcaccgaggugcccguggccauccacgccgaccagcugacccccaccuggcggguguacuccaccggcagcaacguguuccagacccgggccggcugccugaucggcgccgaguacgugaacaacagcuacgagugcgacauccccaucggcgcuggcaucugcgccagcuaccagacccagaccaacagcccccggcgggcccggagcguggccagccagagcaucaucgccuacaccaugagccugggcgccgagaacagcguggccuacagcaacaacagcaucgcgauccccaccaacuucaccaucagcgugaccaccgagauauuaccugugagcaugaccaagaccagcguggacuguaccauguacaucugcggcgacagcaccgagugcagcaaccugcugcugcaguacggcagcuucugcacccagcugaaccgggcccugaccggcaucgccguggagcaggacaagaacacccaagagguguucgcccaggugaagcagaucuacaagacuccacccaucaaggacuucggcggcuucaacuucagccagauccugcccgaccccagcaagcccagcaagcggagcuucaucgaggaccugcuguucaacaaggugacccuggccgacgccggcuucaucaagcaguacggcgacugccugggggacaucgccgcucgggaucugaucugcgcccagaaguucaacggccugaccgugcugccuccccugcugaccgacgagaugaucgcccaguacaccagcgcccugcuggccggcaccaucaccagcggcuggaccuucggcgccggcgcagcccuucagauccccuucgccaugcagauggccuaccgguucaacggcaucggcgugacccagaacgugcuguacgagaaccagaagcugaucgccaaccaguucaacagcgccaucggcaagauccaggacagccugagcagcaccgccagcgcccugggcaagcugcaggacguggugaaccagaacgcucaggcccugaacacccuggugaagcagcugagcucaaacuuuggcgccaucagcagcgugcugaaugacauccugagccggcuggacaagguggaggccgaggugcagaucgacaggcugaucaccggccggcugcagagccugcagaccuacgugacccagcagcugauccgggccgccgagauccgggccagcgccaaccuggcagccauuaagaugagcgagugcgugcugggccagagcaagcggguggacuucugcggcaagggcuaccaccugaugagcuucccccagagcgcuccccacggcgugguguuccugcacgucaccuacgugccagcccaggagaagaacuucacaaccgcccccgccaucugccacgacggcaaggcccacuucccccgggagggaguguucgugagcaacggcacccacugguucgugacccagcggaacuucuacgagccccagaucaucaccaccgacaacaccuucgugagcggcaacugcgacguggugaucggcaucgugaacaacaccguguacgacccccuccagcccgagcuggacagcuucaaggaggagcuggacaaguacuucaagaaccacaccagcccugacguggaccugggcgauaucagcggcaucaacgccagcguggugaacauccagaaggagaucgaccggcugaacgagguggccaagaaccugaacgagagccugaucgaccugcaggagcugggcaaguacgagcaguacaucaaguggcccugguacaucuggcugggcuucaucgccggccugaucgccaucgugauggugaccaucaugcugugcugcaugaccagcugcuguagcugccugaagggcugcugcagcugcggcagcugcugcaaguucgacgaggacgacagcgagcccgugcugaagggcgugaagcugcacuacaccugaggacuaguuauaagacugacuagcccgaugggccucccaacgggcccuccuccccuccuugcaccgagauuaauaaaaaaaaaaaaaaaaaaaaaaaaaaaaaaaaaaaaaaaaaaaaaaaaaaaaaaaaaaaaaaaaugcaucccccccccccccccccccccccccccccccaaaggcucuuuucagagccaccagaauu

SEQ ID NO: 23260 - RNA, 4039 nt, Artificial Sequence
  SARS-CoV-2/Wuhan/WIV05/2019__EPI_ISL_402128 spike protein mRNA gc (1-1273)(S13I_W152C_L452R_D614G)
aggagaaagcuuaccauguucguguuccuggugcugcugccccuggugagcauccagugcgugaaccugaccacccggacccagcugcccccugccuacaccaacagcuucacccggggcguguacuaccccgacaagguguuccggagcagcgugcugcacagcacccaggaccuguuccugcccuucuucagcaacgugaccugguuccacgccauccacgugagcggcaccaacggcaccaagcgguucgacaacccagugcugcccuucaacgacggcguguacuucgccagcaccgagaagucaaacaucauccggggcuggaucuucggcaccacccuggacagcaagacacagagccugcugaucgugaacaacgccaccaacguggugaucaaggugugcgaguuucaguucugcaacgaccccuuccugggcguguacuaccacaagaacaacaagagcugcauggagagcgaguuccgggucuacagcagcgcuaacaauugcaccuucgaguacgugagccagcccuuccugauggaccucgagggcaagcagggcaacuucaagaaccugcgggaguucguguucaagaacaucgauggcuacuucaagaucuacagcaagcacacccccaucaaccuggugcgggaccugccccagggauucagcgcccuggagccucugguggaccugcccaucggcaucaacaucaccagguuccagacccugcuggcccugcaccggagcuaccugacccccggcgacagcagcagcggcuggaccgccggcgccgccgcauacuacgugggcuaccugcagccacggaccuuccugcugaaguacaacgagaacggcaccaucaccgacgccguggacugcgcccuggacccccugagcgagaccaaguguacccuaaagagcuucaccguggagaagggcaucuaccagaccagcaacuuccgggugcagcccacugagagcauugugcgguuccccaacaucaccaaccugugccccuucggcgagguguucaacgccacccgguucgccagcguguacgccuggaaccggaagcggaucagcaacugcguggccgacuacagcgugcuguacaacagcgccagcuucagcaccuucaagugcuacggcgugagcccuaccaagcugaacgaccugugcuucaccaacguguacgcugacagcuucgugauccggggcgacgaggugcggcagaucgcccccggccagaccggcaagaucgccgacuacaacuacaagcugcccgacgacuucaccggcugcgugaucgccuggaacagcaacaaccuggacagcaaggugggcggcaacuacaacuaccgguaccggcuguuccguaagagcaaccugaagccauucgagcgggacaucagcaccgagaucuaccaggccggcagcacccccugcaacgguguggagggcuuuaacugcuacuucccccugcagagcuacggcuuccagcccaccaacggcgugggcuaccagcccuaccgggugguggugcugagcuucgagcugcugcacgcccccgccaccgugugcggcccuaaaaagagcaccaaccuggugaagaacaagugcgugaacuucaauuucaacggccugaccggcaccggcgugcugaccgagagcaacaagaaguuccugcccuuccagcaguucggccgggauaucgccgacaccaccgacgcagugcgggacccccagacccuggagauccuggacaucaccccaugcagcuucggcggcgugagcgucaucacccccggcacaaacaccagcaaccagguggccgugcuguaccagggagugaacugcaccgaggugcccguggccauccacgccgaccagcugacccccaccuggcggguguacagcaccggcagcaacguguuccagacccgggccggcugccugaucggcgccgagcacgugaacaacagcuacgagugcgacauccccaucggcgcuggcaucugugccuccuaccagacccagaccaacagcccccggcgggcccggagcguggccagccagagcaucaucgccuacaccaugagccugggcgccgagaacagcguggccuacagcaacaacagcaucgcgaucccuaccaacuucaccauaagcgugaccaccgagaucuuacccgugagcaugaccaagaccagcguggacugcaccauguacaucugcggcgacagcaccgagugcagcaaccugcugcugcaguacggcagcuucugcacccagcugaaccgggcccugaccggcaucgccguggagcaggacaagaacacccaagagguguucgcccaggugaagcagaucuacaagacucccccaaucaaggacuucggcggcuucaacuucagccagauccugcccgaccccagcaagcccagcaagcggagcuucaucgaggaccugcuguucaacaaggugacccuggccgacgccggcuucaucaagcaguacggcgacugccugggggauaucgccgcucgggaccugaucugcgcccagaaguucaacggccugaccgugcugcccccucugcugaccgacgagaugaucgcccaguacaccagcgcccugcuggccggcaccaucaccagcggcuggaccuucggcgccggcgcagcccuucagauccccuucgccaugcagauggccuacagguucaacggcaucggcgugacccagaacgugcuguacgagaaccagaagcugaucgccaaccaguucaacagcgccaucggcaagauccaggacagccugagcagcaccgccagcgcccugggcaagcugcaggacguggugaaccagaacgcucaggcccugaacacccuggugaagcagcugagcagcaacuucggcgccaucagcagcgugcugaaugacauccugucacggcuggacaagguggaggccgaggugcagaucgaccggcugaucaccggccggcugcagagccugcagaccuacgugacccagcagcugauccgggccgccgagauucgggccagcgccaaccuggcagccaccaagaugagcgagugcgugcugggccagagcaagcggguggacuuuugcggcaagggcuaccaccugaugagcuucccccagagcgccccacacggcgugguguuccugcacgucacauacgugcccgcccaggagaagaacuucaccaccgcccccgccaucugccacgacggcaaggcucacuucccccgggagggaguguucgugagcaacggcacccacugguucgugacccagcggaacuucuacgagccccagaucaucaccaccgacaacaccuucgugagcggcaacugcgacguggugaucggcaucgugaacaacaccguguacgacccccuccagccugagcuggacagcuucaaggaggagcuggacaaguacuucaagaaccacaccagccccgacguggaucugggcgacaucagcggcaucaacgccagcguggugaacauccagaaggagaucgaccggcugaacgagguggccaagaaccugaacgagagccugaucgaccugcaggagcugggcaaguacgagcaguacaucaaguggcccugguacaucuggcugggcuucaucgccggccugaucgccaucgugauggugaccaucaugcugugcugcaugaccagcuguugcagcugccugaagggcugcugcagcugcggcagcugcugcaaguucgacgaggacgacagcgagccagugcugaagggcgugaagcugcacuacaccugaggacuaguuauaagacugacuagcccgaugggccucccaacgggcccuccuccccuccuugcaccgagauuaauaaaaaaaaaaaaaaaaaaaaaaaaaaaaaaaaaaaaaaaaaaaaaaaaaaaaaaaaaaaaaaaaugcaucccccccccccccccccccccccccccccccaaaggcucuuuucagagccaccagaauu

SEQ ID NO: 23261 - RNA, 4039 nt, Artificial Sequence; identical to SEQ ID NO: 13012
  SARS-CoV-2/Wuhan/WIV05/2019__EPI_ISL_402128 spike protein mRNA gc mod (1-1273)

SEQ ID NO: 23262 - RNA, 4039 nt, Artificial Sequence
  SARS-CoV-2/Wuhan/WIV05/2019__EPI_ISL_402128 spike protein mRNA gc mod (1-1273)(D614G)
aggagaaagcuuaccauguucguguuucuggugcugcugccccugguguccagccagugugugaaccugaccaccagaacacagcugccuccagccuacaccaacagcuucaccagaggcguguacuaccccgacaagguguucagauccagcgugcugcacucuacccaggaccuguuccugccuuucuucagcaacgugaccugguuccacgccauccacguguccggcaccaauggcaccaagagauucgacaaccccgugcugcccuucaacgacgggguguacuuugccagcaccgagaaguccaacaucaucagaggcuggaucuucggcaccacacuggacagcaagacccagagccugcugaucgugaacaacgccaccaacguggucaucaaagugugcgaguuccaguucugcaacgaccccuuccugggcgucuacuaccacaagaacaacaagagcuggauggaaagcgaguuccggguguacagcagcgccaacaacugcaccuucgaguacgugucccagccuuuccugauggaccuggaaggcaagcagggcaacuucaagaaccugcgcgaguucguguucaagaacaucgacggcuacuucaaaaucuacagcaagcacaccccuaucaaccucgugcgggaucugccucagggcuucucugcucuggaaccccugguggaucugcccaucggcaucaacaucacccgguuucagacacugcuggcccugcacagaagcuaccugacaccuggcgauagcagcagcggauggacagcuggugccgccgcuuacuaugugggcuaccugcagccuagaaccuuccugcugaaguacaacgagaacggcaccaucaccgacgccguggauugugcucuggauccucugagcgagacaaagugcacccugaaguccuucaccguggaaaagggcaucuaccagaccagcaacuuccgggugcagcccaccgaauccaucgugcgguuccccaauaucaccaaucugugccccuucggcgagguguucaaugccaccagauucgccucuguguacgccuggaaccggaagcggaucagcaauugcguggccgacuacuccgugcuguacaacuccgccagcuucagcaccuucaagugcuacggcguguccccuaccaagcugaacgaccugugcuucacaaacguguacgccgacagcuucgugauccggggagaugaagugcggcagauugccccuggacagacaggcaagaucgccgacuacaacuacaagcugcccgacgacuucaccggcugugugauugccuggaacagcaacaaccuggacuccaaagucggcggcaacuacaauuaccuguaccggcuguuccggaaguccaaucugaagcccuucgagcgggacaucagcaccgaaaucuaucaggccggcagcaccccuugcaacggcguggaaggcuucaacugcuacuucccacugcaguccuacggcuuucagcccacaaauggcgugggcuaucagcccuacagagugguggugcugagcuucgaacugcugcaugcuccugccacagugugcggcccuaagaaaagcaccaaucucgugaagaacaaaugcgugaacuucaacuucaacggccugaccggcaccggcgugcugacagagagcaacaagaaguuccugccauuccagcaguuuggccgggauaucgccgauaccacagacgccguuagagauccccagacacuggaaauccuggacaucaccccaugcagcuucggcggagugucugugaucaccccuggcaccaacaccagcaaucagguggcagugcuguaccagggcgugaacuguaccgaagugcccguggccauucacgccgaucagcugacaccuacauggcggguguacuccaccggcagcaauguguuucagaccagagccggcugucugaucggagccgagcacgugaacaauagcuacgagugcgacauccccaucggcgcuggcaucugugccagcuaccagacacagacaaacagccccagacgggcuagaagcguggccagccagagcaucauugccuacacaaugucucugggcgccgagaacagcguggccuacuccaacaacucuaucgcuauccccaccaacuucaccaucagcgugaccaccgagauccugccuguguccaugaccaagaccagcguggacugcaccauguacaucugcggcgauuccaccgagugcuccaaccugcugcugcaguacggcagcuucugcacccagcugaauagagcccugacagggaucgccguggaacaggacaagaacacccaagagguguucgcccaagugaagcaaaucuacaagaccccuccuaucaaggacuucggcggcuucaauuucagccagauucugcccgauccuagcaagcccagcaagcggagcuucaucgaggaccugcuguucaacaaagugacacuggccgacgccggcuucaucaagcaguauggcgauugucugggcgacauugccgccagggaucugauuugcgcccagaaguuuaacggacugacagugcugccuccucugcugaccgaugagaugaucgcccaguacacaucugcccugcuggccggcacaaucacaagcggcuggacauuuggagcuggcgccgcucugcagauccccuuugcuaugcagauggccuaccgguucaacggcaucggagugacccagaaugugcuguacgagaaccagaagcugaucgccaaccaguucaacagcgccaucggcaagauccaggacagccugagcagcacagcaagcgcccugggaaagcugcaggacguggucaaccagaaugcccaggcacugaacacccuggucaagcagcuguccuccaacuucggcgccaucagcucugugcugaacgauauccugagcagacuggacaaggucgaggccgaggugcagaucgacagacugaucacaggcagacugcagagccuccagacauacgugacccagcagcugaucagagccgccgagauuagagccucugccaaucuggccgccaccaagaugucugagugugugcugggccagagcaagagaguggacuuuugcggcaagggcuaccaccugaugagcuucccucagucugccccucacggcgugguguuucugcacgugacauaugugcccgcucaagagaagaauuucaccaccgcuccagccaucugccacgacggcaaagcccacuuuccuagagaaggcguguucguguccaacggcacccauugguucgugacacagcggaacuucuacgagccccagaucaucaccaccgacaacaccuucgugucuggcaacugcgacguugugaucggcauugugaacaauaccguguacgacccucugcagcccgagcuggacagcuucaaagaggaacuggacaaguacuuuaagaaccacacaagccccgacguggaccugggcgauaucagcggaaucaaugccagcgucgugaacauccagaaagagaucgaccggcugaacgagguggccaagaaucugaacgagagccugaucgaccugcaagaacuggggaaguacgagcaguacaucaaguggcccugguacaucuggcugggcuuuaucgccggacugauugccaucgugauggucacaaucaugcuguguugcaugaccagcugcuguagcugccugaagggcuguuguagcuguggcagcugcugcaaguucgacgaggacgauucugagcccgugcugaagggcgugaaacugcacuacaccugaggacuaguuauaagacugacuagcccgaugggccucccaacgggcccuccuccccuccuugcaccgagauuaauaaaaaaaaaaaaaaaaaaaaaaaaaaaaaaaaaaaaaaaaaaaaaaaaaaaaaaaaaaaaaaaaugcaucccccccccccccccccccccccccccccccaaaggcucuuuucagagccaccagaauu

SEQ ID NO: 23263 - RNA, 4039 nt, Artificial Sequence
  SARS-CoV-2/Wuhan/WIV05/2019__EPI_ISL_402128 spike protein mRNA gc mod (1-1273)(A222V_D614G)
aggagaaagcuuaccauguucguguuucuggugcugcugccccugguguccagccagugugugaaccugaccaccagaacacagcugccuccagccuacaccaacagcuucaccagaggcguguacuaccccgacaagguguucagauccagcgugcugcacucuacccaggaccuguuccugccuuucuucagcaacgugaccugguuccacgccauccacguguccggcaccaauggcaccaagagauucgacaaccccgugcugcccuucaacgacgggguguacuuugccagcaccgagaaguccaacaucaucagaggcuggaucuucggcaccacacuggacagcaagacccagagccugcugaucgugaacaacgccaccaacguggucaucaaagugugcgaguuccaguucugcaacgaccccuuccugggcgucuacuaccacaagaacaacaagagcuggauggaaagcgaguuccggguguacagcagcgccaacaacugcaccuucgaguacgugucccagccuuuccugauggaccuggaaggcaagcagggcaacuucaagaaccugcgcgaguucguguucaagaacaucgacggcuacuucaaaaucuacagcaagcacaccccuaucaaccucgugcgggaucugccucagggcuucucugugcuggaaccccugguggaucugcccaucggcaucaacaucacccgguuucagacacugcuggcccugcacagaagcuaccugacaccuggcgauagcagcagcggauggacagcuggugccgccgcuuacuaugugggcuaccugcagccuagaaccuuccugcugaaguacaacgagaacggcaccaucaccgacgccguggauugugcucuggauccucugagcgagacaaagugcacccugaaguccuucaccguggaaaagggcaucuaccagaccagcaacuuccgggugcagcccaccgaauccaucgugcgguuccccaauaucaccaaucugugccccuucggcgagguguucaaugccaccagauucgccucuguguacgccuggaaccggaagcggaucagcaauugcguggccgacuacuccgugcuguacaacuccgccagcuucagcaccuucaagugcuacggcguguccccuaccaagcugaacgaccugugcuucacaaacguguacgccgacagcuucgugauccggggagaugaagugcggcagauugccccuggacagacaggcaagaucgccgacuacaacuacaagcugcccgacgacuucaccggcugugugauugccuggaacagcaacaaccuggacuccaaagucggcggcaacuacaauuaccuguaccggcuguuccggaaguccaaucugaagcccuucgagcgggacaucagcaccgaaaucuaucaggccggcagcaccccuugcaacggcguggaaggcuucaacugcuacuucccacugcaguccuacggcuuucagcccacaaauggcgugggcuaucagcccuacagagugguggugcugagcuucgaacugcugcaugcuccugccacagugugcggcccuaagaaaagcaccaaucucgugaagaacaaaugcgugaacuucaacuucaacggccugaccggcaccggcgugcugacagagagcaacaagaaguuccugccauuccagcaguuuggccgggauaucgccgauaccacagacgccguuagagauccccagacacuggaaauccuggacaucaccccaugcagcuucggcggagugucugugaucaccccuggcaccaacaccagcaaucagguggcagugcuguaccagggcgugaacuguaccgaagugcccguggccauucacgccgaucagcugacaccuacauggcggguguacuccaccggcagcaauguguuucagaccagagccggcugucugaucggagccgagcacgugaacaauagcuacgagugcgacauccccaucggcgcuggcaucugugccagcuaccagacacagacaaacagccccagacgggcuagaagcguggccagccagagcaucauugccuacacaaugucucugggcgccgagaacagcguggccuacuccaacaacucuaucgcuauccccaccaacuucaccaucagcgugaccaccgagauccugccuguguccaugaccaagaccagcguggacugcaccauguacaucugcggcgauuccaccgagugcuccaaccugcugcugcaguacggcagcuucugcacccagcugaauagagcccugacagggaucgccguggaacaggacaagaacacccaagagguguucgcccaagugaagcaaaucuacaagaccccuccuaucaaggacuucggcggcuucaauuucagccagauucugcccgauccuagcaagcccagcaagcggagcuucaucgaggaccugcuguucaacaaagugacacuggccgacgccggcuucaucaagcaguauggcgauugucugggcgacauugccgccagggaucugauuugcgcccagaaguuuaacggacugacagugcugccuccucugcugaccgaugagaugaucgcccaguacacaucugcccugcuggccggcacaaucacaagcggcuggacauuuggagcuggcgccgcucugcagauccccuuugcuaugcagauggccuaccgguucaacggcaucggagugacccagaaugugcuguacgagaaccagaagcugaucgccaaccaguucaacagcgccaucggcaagauccaggacagccugagcagcacagcaagcgcccugggaaagcugcaggacguggucaaccagaaugcccaggcacugaacacccuggucaagcagcuguccuccaacuucggcgccaucagcucugugcugaacgauauccugagcagacuggacaaggucgaggccgaggugcagaucgacagacugaucacaggcagacugcagagccuccagacauacgugacccagcagcugaucagagccgccgagauuagagccucugccaaucuggccgccaccaagaugucugagugugugcugggccagagcaagagaguggacuuuugcggcaagggcuaccaccugaugagcuucccucagucugccccucacggcgugguguuucugcacgugacauaugugcccgcucaagagaagaauuucaccaccgcuccagccaucugccacgacggcaaagcccacuuuccuagagaaggcguguucguguccaacggcacccauugguucgugacacagcggaacuucuacgagccccagaucaucaccaccgacaacaccuucgugucuggcaacugcgacguugugaucggcauugugaacaauaccguguacgacccucugcagcccgagcuggacagcuucaaagaggaacuggacaaguacuuuaagaaccacacaagccccgacguggaccugggcgauaucagcggaaucaaugccagcgucgugaacauccagaaagagaucgaccggcugaacgagguggccaagaaucugaacgagagccugaucgaccugcaagaacuggggaaguacgagcaguacaucaaguggcccugguacaucuggcugggcuuuaucgccggacugauugccaucgugauggucacaaucaugcuguguugcaugaccagcugcuguagcugccugaagggcuguuguagcuguggcagcugcugcaaguucgacgaggacgauucugagcccgugcugaagggcgugaaacugcacuacaccugaggacuaguuauaagacugacuagcccgaugggccucccaacgggcccuccuccccuccuugcaccgagauuaauaaaaaaaaaaaaaaaaaaaaaaaaaaaaaaaaaaaaaaaaaaaaaaaaaaaaaaaaaaaaaaaaugcaucccccccccccccccccccccccccccccccaaaggcucuuuucagagccaccagaauu

SEQ ID NO: 23264 - RNA, 4039 nt, Artificial Sequence
  SARS-CoV-2/Wuhan/WIV05/2019__EPI_ISL_402128 spike protein mRNA gc mod (1-1273)(N439K_D614G)
aggagaaagcuuaccauguucguguuucuggugcugcugccccugguguccagccagugugugaaccugaccaccagaacacagcugccuccagccuacaccaacagcuucaccagaggcguguacuaccccgacaagguguucagauccagcgugcugcacucuacccaggaccuguuccugccuuucuucagcaacgugaccugguuccacgccauccacguguccggcaccaauggcaccaagagauucgacaaccccgugcugcccuucaacgacgggguguacuuugccagcaccgagaaguccaacaucaucagaggcuggaucuucggcaccacacuggacagcaagacccagagccugcugaucgugaacaacgccaccaacguggucaucaaagugugcgaguuccaguucugcaacgaccccuuccugggcgucuacuaccacaagaacaacaagagcuggauggaaagcgaguuccggguguacagcagcgccaacaacugcaccuucgaguacgugucccagccuuuccugauggaccuggaaggcaagcagggcaacuucaagaaccugcgcgaguucguguucaagaacaucgacggcuacuucaaaaucuacagcaagcacaccccuaucaaccucgugcgggaucugccucagggcuucucugcucuggaaccccugguggaucugcccaucggcaucaacaucacccgguuucagacacugcuggcccugcacagaagcuaccugacaccuggcgauagcagcagcggauggacagcuggugccgccgcuuacuaugugggcuaccugcagccuagaaccuuccugcugaaguacaacgagaacggcaccaucaccgacgccguggauugugcucuggauccucugagcgagacaaagugcacccugaaguccuucaccguggaaaagggcaucuaccagaccagcaacuuccgggugcagcccaccgaauccaucgugcgguuccccaauaucaccaaucugugccccuucggcgagguguucaaugccaccagauucgccucuguguacgccuggaaccggaagcggaucagcaauugcguggccgacuacuccgugcuguacaacuccgccagcuucagcaccuucaagugcuacggcguguccccuaccaagcugaacgaccugugcuucacaaacguguacgccgacagcuucgugauccggggagaugaagugcggcagauugccccuggacagacaggcaagaucgccgacuacaacuacaagcugcccgacgacuucaccggcugugugauugccuggaacagcaagaaccuggacuccaaagucggcggcaacuacaauuaccuguaccggcuguuccggaaguccaaucugaagcccuucgagcgggacaucagcaccgaaaucuaucaggccggcagcaccccuugcaacggcguggaaggcuucaacugcuacuucccacugcaguccuacggcuuucagcccacaaauggcgugggcuaucagcccuacagagugguggugcugagcuucgaacugcugcaugcuccugccacagugugcggcccuaagaaaagcaccaaucucgugaagaacaaaugcgugaacuucaacuucaacggccugaccggcaccggcgugcugacagagagcaacaagaaguuccugccauuccagcaguuuggccgggauaucgccgauaccacagacgccguuagagauccccagacacuggaaauccuggacaucaccccaugcagcuucggcggagugucugugaucaccccuggcaccaacaccagcaaucagguggcagugcuguaccagggcgugaacuguaccgaagugcccguggccauucacgccgaucagcugacaccuacauggcggguguacuccaccggcagcaauguguuucagaccagagccggcugucugaucggagccgagcacgugaacaauagcuacgagugcgacauccccaucggcgcuggcaucugugccagcuaccagacacagacaaacagccccagacgggcuagaagcguggccagccagagcaucauugccuacacaaugucucugggcgccgagaacagcguggccuacuccaacaacucuaucgcuauccccaccaacuucaccaucagcgugaccaccgagauccugccuguguccaugaccaagaccagcguggacugcaccauguacaucugcggcgauuccaccgagugcuccaaccugcugcugcaguacggcagcuucugcacccagcugaauagagcccugacagggaucgccguggaacaggacaagaacacccaagagguguucgcccaagugaagcaaaucuacaagaccccuccuaucaaggacuucggcggcuucaauuucagccagauucugcccgauccuagcaagcccagcaagcggagcuucaucgaggaccugcuguucaacaaagugacacuggccgacgccggcuucaucaagcaguauggcgauugucugggcgacauugccgccagggaucugauuugcgcccagaaguuuaacggacugacagugcugccuccucugcugaccgaugagaugaucgcccaguacacaucugcccugcuggccggcacaaucacaagcggcuggacauuuggagcuggcgccgcucugcagauccccuuugcuaugcagauggccuaccgguucaacggcaucggagugacccagaaugugcuguacgagaaccagaagcugaucgccaaccaguucaacagcgccaucggcaagauccaggacagccugagcagcacagcaagcgcccugggaaagcugcaggacguggucaaccagaaugcccaggcacugaacacccuggucaagcagcuguccuccaacuucggcgccaucagcucugugcugaacgauauccugagcagacuggacaaggucgaggccgaggugcagaucgacagacugaucacaggcagacugcagagccuccagacauacgugacccagcagcugaucagagccgccgagauuagagccucugccaaucuggccgccaccaagaugucugagugugugcugggccagagcaagagaguggacuuuugcggcaagggcuaccaccugaugagcuucccucagucugccccucacggcgugguguuucugcacgugacauaugugcccgcucaagagaagaauuucaccaccgcuccagccaucugccacgacggcaaagcccacuuuccuagagaaggcguguucguguccaacggcacccauugguucgugacacagcggaacuucuacgagccccagaucaucaccaccgacaacaccuucgugucuggcaacugcgacguugugaucggcauugugaacaauaccguguacgacccucugcagcccgagcuggacagcuucaaagaggaacuggacaaguacuuuaagaaccacacaagccccgacguggaccugggcgauaucagcggaaucaaugccagcgucgugaacauccagaaagagaucgaccggcugaacgagguggccaagaaucugaacgagagccugaucgaccugcaagaacuggggaaguacgagcaguacaucaaguggcccugguacaucuggcugggcuuuaucgccggacugauugccaucgugauggucacaaucaugcuguguugcaugaccagcugcuguagcugccugaagggcuguuguagcuguggcagcugcugcaaguucgacgaggacgauucugagcccgugcugaagggcgugaaacugcacuacaccugaggacuaguuauaagacugacuagcccgaugggccucccaacgggcccuccuccccuccuugcaccgagauuaauaaaaaaaaaaaaaaaaaaaaaaaaaaaaaaaaaaaaaaaaaaaaaaaaaaaaaaaaaaaaaaaaugcaucccccccccccccccccccccccccccccccaaaggcucuuuucagagccaccagaauu

SEQ ID NO: 23265 - RNA, 4039 nt, Artificial Sequence
  SARS-CoV-2/Wuhan/WIV05/2019__EPI_ISL_402128 spike protein mRNA gc mod (1-1273)(S477N_D614G)
aggagaaagcuuaccauguucguguuucuggugcugcugccccugguguccagccagugugugaaccugaccaccagaacacagcugccuccagccuacaccaacagcuucaccagaggcguguacuaccccgacaagguguucagauccagcgugcugcacucuacccaggaccuguuccugccuuucuucagcaacgugaccugguuccacgccauccacguguccggcaccaauggcaccaagagauucgacaaccccgugcugcccuucaacgacgggguguacuuugccagcaccgagaaguccaacaucaucagaggcuggaucuucggcaccacacuggacagcaagacccagagccugcugaucgugaacaacgccaccaacguggucaucaaagugugcgaguuccaguucugcaacgaccccuuccugggcgucuacuaccacaagaacaacaagagcuggauggaaagcgaguuccggguguacagcagcgccaacaacugcaccuucgaguacgugucccagccuuuccugauggaccuggaaggcaagcagggcaacuucaagaaccugcgcgaguucguguucaagaacaucgacggcuacuucaaaaucuacagcaagcacaccccuaucaaccucgugcgggaucugccucagggcuucucugcucuggaaccccugguggaucugcccaucggcaucaacaucacccgguuucagacacugcuggcccugcacagaagcuaccugacaccuggcgauagcagcagcggauggacagcuggugccgccgcuuacuaugugggcuaccugcagccuagaaccuuccugcugaaguacaacgagaacggcaccaucaccgacgccguggauugugcucuggauccucugagcgagacaaagugcacccugaaguccuucaccguggaaaagggcaucuaccagaccagcaacuuccgggugcagcccaccgaauccaucgugcgguuccccaauaucaccaaucugugccccuucggcgagguguucaaugccaccagauucgccucuguguacgccuggaaccggaagcggaucagcaauugcguggccgacuacuccgugcuguacaacuccgccagcuucagcaccuucaagugcuacggcguguccccuaccaagcugaacgaccugugcuucacaaacguguacgccgacagcuucgugauccggggagaugaagugcggcagauugccccuggacagacaggcaagaucgccgacuacaacuacaagcugcccgacgacuucaccggcugugugauugccuggaacagcaacaaccuggacuccaaagucggcggcaacuacaauuaccuguaccggcuguuccggaaguccaaucugaagcccuucgagcgggacaucagcaccgaaaucuaucaggccggcaacaccccuugcaacggcguggaaggcuucaacugcuacuucccacugcaguccuacggcuuucagcccacaaauggcgugggcuaucagcccuacagagugguggugcugagcuucgaacugcugcaugcuccugccacagugugcggcccuaagaaaagcaccaaucucgugaagaacaaaugcgugaacuucaacuucaacggccugaccggcaccggcgugcugacagagagcaacaagaaguuccugccauuccagcaguuuggccgggauaucgccgauaccacagacgccguuagagauccccagacacuggaaauccuggacaucaccccaugcagcuucggcggagugucugugaucaccccuggcaccaacaccagcaaucagguggcagugcuguaccagggcgugaacuguaccgaagugcccguggccauucacgccgaucagcugacaccuacauggcggguguacuccaccggcagcaauguguuucagaccagagccggcugucugaucggagccgagcacgugaacaauagcuacgagugcgacauccccaucggcgcuggcaucugugccagcuaccagacacagacaaacagccccagacgggcuagaagcguggccagccagagcaucauugccuacacaaugucucugggcgccgagaacagcguggccuacuccaacaacucuaucgcuauccccaccaacuucaccaucagcgugaccaccgagauccugccuguguccaugaccaagaccagcguggacugcaccauguacaucugcggcgauuccaccgagugcuccaaccugcugcugcaguacggcagcuucugcacccagcugaauagagcccugacagggaucgccguggaacaggacaagaacacccaagagguguucgcccaagugaagcaaaucuacaagaccccuccuaucaaggacuucggcggcuucaauuucagccagauucugcccgauccuagcaagcccagcaagcggagcuucaucgaggaccugcuguucaacaaagugacacuggccgacgccggcuucaucaagcaguauggcgauugucugggcgacauugccgccagggaucugauuugcgcccagaaguuuaacggacugacagugcugccuccucugcugaccgaugagaugaucgcccaguacacaucugcccugcuggccggcacaaucacaagcggcuggacauuuggagcuggcgccgcucugcagauccccuuugcuaugcagauggccuaccgguucaacggcaucggagugacccagaaugugcuguacgagaaccagaagcugaucgccaaccaguucaacagcgccaucggcaagauccaggacagccugagcagcacagcaagcgcccugggaaagcugcaggacguggucaaccagaaugcccaggcacugaacacccuggucaagcagcuguccuccaacuucggcgccaucagcucugugcugaacgauauccugagcagacuggacaaggucgaggccgaggugcagaucgacagacugaucacaggcagacugcagagccuccagacauacgugacccagcagcugaucagagccgccgagauuagagccucugccaaucuggccgccaccaagaugucugagugugugcugggccagagcaagagaguggacuuuugcggcaagggcuaccaccugaugagcuucccucagucugccccucacggcgugguguuucugcacgugacauaugugcccgcucaagagaagaauuucaccaccgcuccagccaucugccacgacggcaaagcccacuuuccuagagaaggcguguucguguccaacggcacccauugguucgugacacagcggaacuucuacgagccccagaucaucaccaccgacaacaccuucgugucuggcaacugcgacguugugaucggcauugugaacaauaccguguacgacccucugcagcccgagcuggacagcuucaaagaggaacuggacaaguacuuuaagaaccacacaagccccgacguggaccugggcgauaucagcggaaucaaugccagcgucgugaacauccagaaagagaucgaccggcugaacgagguggccaagaaucugaacgagagccugaucgaccugcaagaacuggggaaguacgagcaguacaucaaguggcccugguacaucuggcugggcuuuaucgccggacugauugccaucgugauggucacaaucaugcuguguugcaugaccagcugcuguagcugccugaagggcuguuguagcuguggcagcugcugcaaguucgacgaggacgauucugagcccgugcugaagggcgugaaacugcacuacaccugaggacuaguuauaagacugacuagcccgaugggccucccaacgggcccuccuccccuccuugcaccgagauuaauaaaaaaaaaaaaaaaaaaaaaaaaaaaaaaaaaaaaaaaaaaaaaaaaaaaaaaaaaaaaaaaaugcaucccccccccccccccccccccccccccccccaaaggcucuuuucagagccaccagaauu

SEQ ID NO: 23266 - RNA, 4039 nt, Artificial Sequence
  SARS-CoV-2/Wuhan/WIV05/2019__EPI_ISL_402128 spike protein mRNA gc mod (1-1273)(N501Y_D614G)
aggagaaagcuuaccauguucguguuucuggugcugcugccccugguguccagccagugugugaaccugaccaccagaacacagcugccuccagccuacaccaacagcuucaccagaggcguguacuaccccgacaagguguucagauccagcgugcugcacucuacccaggaccuguuccugccuuucuucagcaacgugaccugguuccacgccauccacguguccggcaccaauggcaccaagagauucgacaaccccgugcugcccuucaacgacgggguguacuuugccagcaccgagaaguccaacaucaucagaggcuggaucuucggcaccacacuggacagcaagacccagagccugcugaucgugaacaacgccaccaacguggucaucaaagugugcgaguuccaguucugcaacgaccccuuccugggcgucuacuaccacaagaacaacaagagcuggauggaaagcgaguuccggguguacagcagcgccaacaacugcaccuucgaguacgugucccagccuuuccugauggaccuggaaggcaagcagggcaacuucaagaaccugcgcgaguucguguucaagaacaucgacggcuacuucaaaaucuacagcaagcacaccccuaucaaccucgugcgggaucugccucagggcuucucugcucuggaaccccugguggaucugcccaucggcaucaacaucacccgguuucagacacugcuggcccugcacagaagcuaccugacaccuggcgauagcagcagcggauggacagcuggugccgccgcuuacuaugugggcuaccugcagccuagaaccuuccugcugaaguacaacgagaacggcaccaucaccgacgccguggauugugcucuggauccucugagcgagacaaagugcacccugaaguccuucaccguggaaaagggcaucuaccagaccagcaacuuccgggugcagcccaccgaauccaucgugcgguuccccaauaucaccaaucugugccccuucggcgagguguucaaugccaccagauucgccucuguguacgccuggaaccggaagcggaucagcaauugcguggccgacuacuccgugcuguacaacuccgccagcuucagcaccuucaagugcuacggcguguccccuaccaagcugaacgaccugugcuucacaaacguguacgccgacagcuucgugauccggggagaugaagugcggcagauugccccuggacagacaggcaagaucgccgacuacaacuacaagcugcccgacgacuucaccggcugugugauugccuggaacagcaacaaccuggacuccaaagucggcggcaacuacaauuaccuguaccggcuguuccggaaguccaaucugaagcccuucgagcgggacaucagcaccgaaaucuaucaggccggcagcaccccuugcaacggcguggaaggcuucaacugcuacuucccacugcaguccuacggcuuucagcccacauacggcgugggcuaucagcccuacagagugguggugcugagcuucgaacugcugcaugcuccugccacagugugcggcccuaagaaaagcaccaaucucgugaagaacaaaugcgugaacuucaacuucaacggccugaccggcaccggcgugcugacagagagcaacaagaaguuccugccauuccagcaguuuggccgggauaucgccgauaccacagacgccguuagagauccccagacacuggaaauccuggacaucaccccaugcagcuucggcggagugucugugaucaccccuggcaccaacaccagcaaucagguggcagugcuguaccagggcgugaacuguaccgaagugcccguggccauucacgccgaucagcugacaccuacauggcggguguacuccaccggcagcaauguguuucagaccagagccggcugucugaucggagccgagcacgugaacaauagcuacgagugcgacauccccaucggcgcuggcaucugugccagcuaccagacacagacaaacagccccagacgggcuagaagcguggccagccagagcaucauugccuacacaaugucucugggcgccgagaacagcguggccuacuccaacaacucuaucgcuauccccaccaacuucaccaucagcgugaccaccgagauccugccuguguccaugaccaagaccagcguggacugcaccauguacaucugcggcgauuccaccgagugcuccaaccugcugcugcaguacggcagcuucugcacccagcugaauagagcccugacagggaucgccguggaacaggacaagaacacccaagagguguucgcccaagugaagcaaaucuacaagaccccuccuaucaaggacuucggcggcuucaauuucagccagauucugcccgauccuagcaagcccagcaagcggagcuucaucgaggaccugcuguucaacaaagugacacuggccgacgccggcuucaucaagcaguauggcgauugucugggcgacauugccgccagggaucugauuugcgcccagaaguuuaacggacugacagugcugccuccucugcugaccgaugagaugaucgcccaguacacaucugcccugcuggccggcacaaucacaagcggcuggacauuuggagcuggcgccgcucugcagauccccuuugcuaugcagauggccuaccgguucaacggcaucggagugacccagaaugugcuguacgagaaccagaagcugaucgccaaccaguucaacagcgccaucggcaagauccaggacagccugagcagcacagcaagcgcccugggaaagcugcaggacguggucaaccagaaugcccaggcacugaacacccuggucaagcagcuguccuccaacuucggcgccaucagcucugugcugaacgauauccugagcagacuggacaaggucgaggccgaggugcagaucgacagacugaucacaggcagacugcagagccuccagacauacgugacccagcagcugaucagagccgccgagauuagagccucugccaaucuggccgccaccaagaugucugagugugugcugggccagagcaagagaguggacuuuugcggcaagggcuaccaccugaugagcuucccucagucugccccucacggcgugguguuucugcacgugacauaugugcccgcucaagagaagaauuucaccaccgcuccagccaucugccacgacggcaaagcccacuuuccuagagaaggcguguucguguccaacggcacccauugguucgugacacagcggaacuucuacgagccccagaucaucaccaccgacaacaccuucgugucuggcaacugcgacguugugaucggcauugugaacaauaccguguacgacccucugcagcccgagcuggacagcuucaaagaggaacuggacaaguacuuuaagaaccacacaagccccgacguggaccugggcgauaucagcggaaucaaugccagcgucgugaacauccagaaagagaucgaccggcugaacgagguggccaagaaucugaacgagagccugaucgaccugcaagaacuggggaaguacgagcaguacaucaaguggcccugguacaucuggcugggcuuuaucgccggacugauugccaucgugauggucacaaucaugcuguguugcaugaccagcugcuguagcugccugaagggcuguuguagcuguggcagcugcugcaaguucgacgaggacgauucugagcccgugcugaagggcgugaaacugcacuacaccugaggacuaguuauaagacugacuagcccgaugggccucccaacgggcccuccuccccuccuugcaccgagauuaauaaaaaaaaaaaaaaaaaaaaaaaaaaaaaaaaaaaaaaaaaaaaaaaaaaaaaaaaaaaaaaaaugcaucccccccccccccccccccccccccccccccaaaggcucuuuucagagccaccagaauu

SEQ ID NO: 23267 - RNA, 4033 nt, Artificial Sequence
  SARS-CoV-2/Wuhan/WIV05/2019__EPI_ISL_402128 spike protein mRNA gc mod (1-1273)(H69del_V70del_D614G)
aggagaaagcuuaccauguucguguuucuggugcugcugccccugguguccagccagugugugaaccugaccaccagaacacagcugccuccagccuacaccaacagcuucaccagaggcguguacuaccccgacaagguguucagauccagcgugcugcacucuacccaggaccuguuccugccuuucuucagcaacgugaccugguuccacgccaucuccggcaccaauggcaccaagagauucgacaaccccgugcugcccuucaacgacgggguguacuuugccagcaccgagaaguccaacaucaucagaggcuggaucuucggcaccacacuggacagcaagacccagagccugcugaucgugaacaacgccaccaacguggucaucaaagugugcgaguuccaguucugcaacgaccccuuccugggcgucuacuaccacaagaacaacaagagcuggauggaaagcgaguuccggguguacagcagcgccaacaacugcaccuucgaguacgugucccagccuuuccugauggaccuggaaggcaagcagggcaacuucaagaaccugcgcgaguucguguucaagaacaucgacggcuacuucaaaaucuacagcaagcacaccccuaucaaccucgugcgggaucugccucagggcuucucugcucuggaaccccugguggaucugcccaucggcaucaacaucacccgguuucagacacugcuggcccugcacagaagcuaccugacaccuggcgauagcagcagcggauggacagcuggugccgccgcuuacuaugugggcuaccugcagccuagaaccuuccugcugaaguacaacgagaacggcaccaucaccgacgccguggauugugcucuggauccucugagcgagacaaagugcacccugaaguccuucaccguggaaaagggcaucuaccagaccagcaacuuccgggugcagcccaccgaauccaucgugcgguuccccaauaucaccaaucugugccccuucggcgagguguucaaugccaccagauucgccucuguguacgccuggaaccggaagcggaucagcaauugcguggccgacuacuccgugcuguacaacuccgccagcuucagcaccuucaagugcuacggcguguccccuaccaagcugaacgaccugugcuucacaaacguguacgccgacagcuucgugauccggggagaugaagugcggcagauugccccuggacagacaggcaagaucgccgacuacaacuacaagcugcccgacgacuucaccggcugugugauugccuggaacagcaacaaccuggacuccaaagucggcggcaacuacaauuaccuguaccggcuguuccggaaguccaaucugaagcccuucgagcgggacaucagcaccgaaaucuaucaggccggcagcaccccuugcaacggcguggaaggcuucaacugcuacuucccacugcaguccuacggcuuucagcccacaaauggcgugggcuaucagcccuacagagugguggugcugagcuucgaacugcugcaugcuccugccacagugugcggcccuaagaaaagcaccaaucucgugaagaacaaaugcgugaacuucaacuucaacggccugaccggcaccggcgugcugacagagagcaacaagaaguuccugccauuccagcaguuuggccgggauaucgccgauaccacagacgccguuagagauccccagacacuggaaauccuggacaucaccccaugcagcuucggcggagugucugugaucaccccuggcaccaacaccagcaaucagguggcagugcuguaccagggcgugaacuguaccgaagugcccguggccauucacgccgaucagcugacaccuacauggcggguguacuccaccggcagcaauguguuucagaccagagccggcugucugaucggagccgagcacgugaacaauagcuacgagugcgacauccccaucggcgcuggcaucugugccagcuaccagacacagacaaacagccccagacgggcuagaagcguggccagccagagcaucauugccuacacaaugucucugggcgccgagaacagcguggccuacuccaacaacucuaucgcuauccccaccaacuucaccaucagcgugaccaccgagauccugccuguguccaugaccaagaccagcguggacugcaccauguacaucugcggcgauuccaccgagugcuccaaccugcugcugcaguacggcagcuucugcacccagcugaauagagcccugacagggaucgccguggaacaggacaagaacacccaagagguguucgcccaagugaagcaaaucuacaagaccccuccuaucaaggacuucggcggcuucaauuucagccagauucugcccgauccuagcaagcccagcaagcggagcuucaucgaggaccugcuguucaacaaagugacacuggccgacgccggcuucaucaagcaguauggcgauugucugggcgacauugccgccagggaucugauuugcgcccagaaguuuaacggacugacagugcugccuccucugcugaccgaugagaugaucgcccaguacacaucugcccugcuggccggcacaaucacaagcggcuggacauuuggagcuggcgccgcucugcagauccccuuugcuaugcagauggccuaccgguucaacggcaucggagugacccagaaugugcuguacgagaaccagaagcugaucgccaaccaguucaacagcgccaucggcaagauccaggacagccugagcagcacagcaagcgcccugggaaagcugcaggacguggucaaccagaaugcccaggcacugaacacccuggucaagcagcuguccuccaacuucggcgccaucagcucugugcugaacgauauccugagcagacuggacaaggucgaggccgaggugcagaucgacagacugaucacaggcagacugcagagccuccagacauacgugacccagcagcugaucagagccgccgagauuagagccucugccaaucuggccgccaccaagaugucugagugugugcugggccagagcaagagaguggacuuuugcggcaagggcuaccaccugaugagcuucccucagucugccccucacggcgugguguuucugcacgugacauaugugcccgcucaagagaagaauuucaccaccgcuccagccaucugccacgacggcaaagcccacuuuccuagagaaggcguguucguguccaacggcacccauugguucgugacacagcggaacuucuacgagccccagaucaucaccaccgacaacaccuucgugucuggcaacugcgacguugugaucggcauugugaacaauaccguguacgacccucugcagcccgagcuggacagcuucaaagaggaacuggacaaguacuuuaagaaccacacaagccccgacguggaccugggcgauaucagcggaaucaaugccagcgucgugaacauccagaaagagaucgaccggcugaacgagguggccaagaaucugaacgagagccugaucgaccugcaagaacuggggaaguacgagcaguacaucaaguggcccugguacaucuggcugggcuuuaucgccggacugauugccaucgugauggucacaaucaugcuguguugcaugaccagcugcuguagcugccugaagggcuguuguagcuguggcagcugcugcaaguucgacgaggacgauucugagcccgugcugaagggcgugaaacugcacuacaccugaggacuaguuauaagacugacuagcccgaugggccucccaacgggcccuccuccccuccuugcaccgagauuaauaaaaaaaaaaaaaaaaaaaaaaaaaaaaaaaaaaaaaaaaaaaaaaaaaaaaaaaaaaaaaaaaugcaucccccccccccccccccccccccccccccccaaaggcucuuuucagagccaccagaauu

SEQ ID NO: 23268 - RNA, 4039 nt, Artificial Sequence
  SARS-CoV-2/Wuhan/WIV05/2019__EPI_ISL_402128 spike protein mRNA gc mod (1-1273)(Y453F_D614G)
aggagaaagcuuaccauguucguguuucuggugcugcugccccugguguccagccagugugugaaccugaccaccagaacacagcugccuccagccuacaccaacagcuucaccagaggcguguacuaccccgacaagguguucagauccagcgugcugcacucuacccaggaccuguuccugccuuucuucagcaacgugaccugguuccacgccauccacguguccggcaccaauggcaccaagagauucgacaaccccgugcugcccuucaacgacgggguguacuuugccagcaccgagaaguccaacaucaucagaggcuggaucuucggcaccacacuggacagcaagacccagagccugcugaucgugaacaacgccaccaacguggucaucaaagugugcgaguuccaguucugcaacgaccccuuccugggcgucuacuaccacaagaacaacaagagcuggauggaaagcgaguuccggguguacagcagcgccaacaacugcaccuucgaguacgugucccagccuuuccugauggaccuggaaggcaagcagggcaacuucaagaaccugcgcgaguucguguucaagaacaucgacggcuacuucaaaaucuacagcaagcacaccccuaucaaccucgugcgggaucugccucagggcuucucugcucuggaaccccugguggaucugcccaucggcaucaacaucacccgguuucagacacugcuggcccugcacagaagcuaccugacaccuggcgauagcagcagcggauggacagcuggugccgccgcuuacuaugugggcuaccugcagccuagaaccuuccugcugaaguacaacgagaacggcaccaucaccgacgccguggauugugcucuggauccucugagcgagacaaagugcacccugaaguccuucaccguggaaaagggcaucuaccagaccagcaacuuccgggugcagcccaccgaauccaucgugcgguuccccaauaucaccaaucugugccccuucggcgagguguucaaugccaccagauucgccucuguguacgccuggaaccggaagcggaucagcaauugcguggccgacuacuccgugcuguacaacuccgccagcuucagcaccuucaagugcuacggcguguccccuaccaagcugaacgaccugugcuucacaaacguguacgccgacagcuucgugauccggggagaugaagugcggcagauugccccuggacagacaggcaagaucgccgacuacaacuacaagcugcccgacgacuucaccggcugugugauugccuggaacagcaacaaccuggacuccaaagucggcggcaacuacaauuaccuguuccggcuguuccggaaguccaaucugaagcccuucgagcgggacaucagcaccgaaaucuaucaggccggcagcaccccuugcaacggcguggaaggcuucaacugcuacuucccacugcaguccuacggcuuucagcccacaaauggcgugggcuaucagcccuacagagugguggugcugagcuucgaacugcugcaugcuccugccacagugugcggcccuaagaaaagcaccaaucucgugaagaacaaaugcgugaacuucaacuucaacggccugaccggcaccggcgugcugacagagagcaacaagaaguuccugccauuccagcaguuuggccgggauaucgccgauaccacagacgccguuagagauccccagacacuggaaauccuggacaucaccccaugcagcuucggcggagugucugugaucaccccuggcaccaacaccagcaaucagguggcagugcuguaccagggcgugaacuguaccgaagugcccguggccauucacgccgaucagcugacaccuacauggcggguguacuccaccggcagcaauguguuucagaccagagccggcugucugaucggagccgagcacgugaacaauagcuacgagugcgacauccccaucggcgcuggcaucugugccagcuaccagacacagacaaacagccccagacgggcuagaagcguggccagccagagcaucauugccuacacaaugucucugggcgccgagaacagcguggccuacuccaacaacucuaucgcuauccccaccaacuucaccaucagcgugaccaccgagauccugccuguguccaugaccaagaccagcguggacugcaccauguacaucugcggcgauuccaccgagugcuccaaccugcugcugcaguacggcagcuucugcacccagcugaauagagcccugacagggaucgccguggaacaggacaagaacacccaagagguguucgcccaagugaagcaaaucuacaagaccccuccuaucaaggacuucggcggcuucaauuucagccagauucugcccgauccuagcaagcccagcaagcggagcuucaucgaggaccugcuguucaacaaagugacacuggccgacgccggcuucaucaagcaguauggcgauugucugggcgacauugccgccagggaucugauuugcgcccagaaguuuaacggacugacagugcugccuccucugcugaccgaugagaugaucgcccaguacacaucugcccugcuggccggcacaaucacaagcggcuggacauuuggagcuggcgccgcucugcagauccccuuugcuaugcagauggccuaccgguucaacggcaucggagugacccagaaugugcuguacgagaaccagaagcugaucgccaaccaguucaacagcgccaucggcaagauccaggacagccugagcagcacagcaagcgcccugggaaagcugcaggacguggucaaccagaaugcccaggcacugaacacccuggucaagcagcuguccuccaacuucggcgccaucagcucugugcugaacgauauccugagcagacuggacaaggucgaggccgaggugcagaucgacagacugaucacaggcagacugcagagccuccagacauacgugacccagcagcugaucagagccgccgagauuagagccucugccaaucuggccgccaccaagaugucugagugugugcugggccagagcaagagaguggacuuuugcggcaagggcuaccaccugaugagcuucccucagucugccccucacggcgugguguuucugcacgugacauaugugcccgcucaagagaagaauuucaccaccgcuccagccaucugccacgacggcaaagcccacuuuccuagagaaggcguguucguguccaacggcacccauugguucgugacacagcggaacuucuacgagccccagaucaucaccaccgacaacaccuucgugucuggcaacugcgacguugugaucggcauugugaacaauaccguguacgacccucugcagcccgagcuggacagcuucaaagaggaacuggacaaguacuuuaagaaccacacaagccccgacguggaccugggcgauaucagcggaaucaaugccagcgucgugaacauccagaaagagaucgaccggcugaacgagguggccaagaaucugaacgagagccugaucgaccugcaagaacuggggaaguacgagcaguacaucaaguggcccugguacaucuggcugggcuuuaucgccggacugauugccaucgugauggucacaaucaugcuguguugcaugaccagcugcuguagcugccugaagggcuguuguagcuguggcagcugcugcaaguucgacgaggacgauucugagcccgugcugaagggcgugaaacugcacuacaccugaggacuaguuauaagacugacuagcccgaugggccucccaacgggcccuccuccccuccuugcaccgagauuaauaaaaaaaaaaaaaaaaaaaaaaaaaaaaaaaaaaaaaaaaaaaaaaaaaaaaaaaaaaaaaaaaugcaucccccccccccccccccccccccccccccccaaaggcucuuuucagagccaccagaauu

SEQ ID NO: 23269 - RNA, 4039 nt, Artificial Sequence
  SARS-CoV-2/Wuhan/WIV05/2019__EPI_ISL_402128 spike protein mRNA gc mod (1-1273)(D614G_I692V)
aggagaaagcuuaccauguucguguuucuggugcugcugccccugguguccagccagugugugaaccugaccaccagaacacagcugccuccagccuacaccaacagcuucaccagaggcguguacuaccccgacaagguguucagauccagcgugcugcacucuacccaggaccuguuccugccuuucuucagcaacgugaccugguuccacgccauccacguguccggcaccaauggcaccaagagauucgacaaccccgugcugcccuucaacgacgggguguacuuugccagcaccgagaaguccaacaucaucagaggcuggaucuucggcaccacacuggacagcaagacccagagccugcugaucgugaacaacgccaccaacguggucaucaaagugugcgaguuccaguucugcaacgaccccuuccugggcgucuacuaccacaagaacaacaagagcuggauggaaagcgaguuccggguguacagcagcgccaacaacugcaccuucgaguacgugucccagccuuuccugauggaccuggaaggcaagcagggcaacuucaagaaccugcgcgaguucguguucaagaacaucgacggcuacuucaaaaucuacagcaagcacaccccuaucaaccucgugcgggaucugccucagggcuucucugcucuggaaccccugguggaucugcccaucggcaucaacaucacccgguuucagacacugcuggcccugcacagaagcuaccugacaccuggcgauagcagcagcggauggacagcuggugccgccgcuuacuaugugggcuaccugcagccuagaaccuuccugcugaaguacaacgagaacggcaccaucaccgacgccguggauugugcucuggauccucugagcgagacaaagugcacccugaaguccuucaccguggaaaagggcaucuaccagaccagcaacuuccgggugcagcccaccgaauccaucgugcgguuccccaauaucaccaaucugugccccuucggcgagguguucaaugccaccagauucgccucuguguacgccuggaaccggaagcggaucagcaauugcguggccgacuacuccgugcuguacaacuccgccagcuucagcaccuucaagugcuacggcguguccccuaccaagcugaacgaccugugcuucacaaacguguacgccgacagcuucgugauccggggagaugaagugcggcagauugccccuggacagacaggcaagaucgccgacuacaacuacaagcugcccgacgacuucaccggcugugugauugccuggaacagcaacaaccuggacuccaaagucggcggcaacuacaauuaccuguaccggcuguuccggaaguccaaucugaagcccuucgagcgggacaucagcaccgaaaucuaucaggccggcagcaccccuugcaacggcguggaaggcuucaacugcuacuucccacugcaguccuacggcuuucagcccacaaauggcgugggcuaucagcccuacagagugguggugcugagcuucgaacugcugcaugcuccugccacagugugcggcccuaagaaaagcaccaaucucgugaagaacaaaugcgugaacuucaacuucaacggccugaccggcaccggcgugcugacagagagcaacaagaaguuccugccauuccagcaguuuggccgggauaucgccgauaccacagacgccguuagagauccccagacacuggaaauccuggacaucaccccaugcagcuucggcggagugucugugaucaccccuggcaccaacaccagcaaucagguggcagugcuguaccagggcgugaacuguaccgaagugcccguggccauucacgccgaucagcugacaccuacauggcggguguacuccaccggcagcaauguguuucagaccagagccggcugucugaucggagccgagcacgugaacaauagcuacgagugcgacauccccaucggcgcuggcaucugugccagcuaccagacacagacaaacagccccagacgggcuagaagcguggccagccagagcgugauugccuacacaaugucucugggcgccgagaacagcguggccuacuccaacaacucuaucgcuauccccaccaacuucaccaucagcgugaccaccgagauccugccuguguccaugaccaagaccagcguggacugcaccauguacaucugcggcgauuccaccgagugcuccaaccugcugcugcaguacggcagcuucugcacccagcugaauagagcccugacagggaucgccguggaacaggacaagaacacccaagagguguucgcccaagugaagcaaaucuacaagaccccuccuaucaaggacuucggcggcuucaauuucagccagauucugcccgauccuagcaagcccagcaagcggagcuucaucgaggaccugcuguucaacaaagugacacuggccgacgccggcuucaucaagcaguauggcgauugucugggcgacauugccgccagggaucugauuugcgcccagaaguuuaacggacugacagugcugccuccucugcugaccgaugagaugaucgcccaguacacaucugcccugcuggccggcacaaucacaagcggcuggacauuuggagcuggcgccgcucugcagauccccuuugcuaugcagauggccuaccgguucaacggcaucggagugacccagaaugugcuguacgagaaccagaagcugaucgccaaccaguucaacagcgccaucggcaagauccaggacagccugagcagcacagcaagcgcccugggaaagcugcaggacguggucaaccagaaugcccaggcacugaacacccuggucaagcagcuguccuccaacuucggcgccaucagcucugugcugaacgauauccugagcagacuggacaaggucgaggccgaggugcagaucgacagacugaucacaggcagacugcagagccuccagacauacgugacccagcagcugaucagagccgccgagauuagagccucugccaaucuggccgccaccaagaugucugagugugugcugggccagagcaagagaguggacuuuugcggcaagggcuaccaccugaugagcuucccucagucugccccucacggcgugguguuucugcacgugacauaugugcccgcucaagagaagaauuucaccaccgcuccagccaucugccacgacggcaaagcccacuuuccuagagaaggcguguucguguccaacggcacccauugguucgugacacagcggaacuucuacgagccccagaucaucaccaccgacaacaccuucgugucuggcaacugcgacguugugaucggcauugugaacaauaccguguacgacccucugcagcccgagcuggacagcuucaaagaggaacuggacaaguacuuuaagaaccacacaagccccgacguggaccugggcgauaucagcggaaucaaugccagcgucgugaacauccagaaagagaucgaccggcugaacgagguggccaagaaucugaacgagagccugaucgaccugcaagaacuggggaaguacgagcaguacaucaaguggcccugguacaucuggcugggcuuuaucgccggacugauugccaucgugauggucacaaucaugcuguguugcaugaccagcugcuguagcugccugaagggcuguuguagcuguggcagcugcugcaaguucgacgaggacgauucugagcccgugcugaagggcgugaaacugcacuacaccugaggacuaguuauaagacugacuagcccgaugggccucccaacgggcccuccuccccuccuugcaccgagauuaauaaaaaaaaaaaaaaaaaaaaaaaaaaaaaaaaaaaaaaaaaaaaaaaaaaaaaaaaaaaaaaaaugcaucccccccccccccccccccccccccccccccaaaggcucuuuucagagccaccagaauu

SEQ ID NO: 23270 - RNA, 4039 nt, Artificial Sequence
  SARS-CoV-2/Wuhan/WIV05/2019__EPI_ISL_402128 spike protein mRNA gc mod (1-1273)(D614G_M1229I)
aggagaaagcuuaccauguucguguuucuggugcugcugccccugguguccagccagugugugaaccugaccaccagaacacagcugccuccagccuacaccaacagcuucaccagaggcguguacuaccccgacaagguguucagauccagcgugcugcacucuacccaggaccuguuccugccuuucuucagcaacgugaccugguuccacgccauccacguguccggcaccaauggcaccaagagauucgacaaccccgugcugcccuucaacgacgggguguacuuugccagcaccgagaaguccaacaucaucagaggcuggaucuucggcaccacacuggacagcaagacccagagccugcugaucgugaacaacgccaccaacguggucaucaaagugugcgaguuccaguucugcaacgaccccuuccugggcgucuacuaccacaagaacaacaagagcuggauggaaagcgaguuccggguguacagcagcgccaacaacugcaccuucgaguacgugucccagccuuuccugauggaccuggaaggcaagcagggcaacuucaagaaccugcgcgaguucguguucaagaacaucgacggcuacuucaaaaucuacagcaagcacaccccuaucaaccucgugcgggaucugccucagggcuucucugcucuggaaccccugguggaucugcccaucggcaucaacaucacccgguuucagacacugcuggcccugcacagaagcuaccugacaccuggcgauagcagcagcggauggacagcuggugccgccgcuuacuaugugggcuaccugcagccuagaaccuuccugcugaaguacaacgagaacggcaccaucaccgacgccguggauugugcucuggauccucugagcgagacaaagugcacccugaaguccuucaccguggaaaagggcaucuaccagaccagcaacuuccgggugcagcccaccgaauccaucgugcgguuccccaauaucaccaaucugugccccuucggcgagguguucaaugccaccagauucgccucuguguacgccuggaaccggaagcggaucagcaauugcguggccgacuacuccgugcuguacaacuccgccagcuucagcaccuucaagugcuacggcguguccccuaccaagcugaacgaccugugcuucacaaacguguacgccgacagcuucgugauccggggagaugaagugcggcagauugccccuggacagacaggcaagaucgccgacuacaacuacaagcugcccgacgacuucaccggcugugugauugccuggaacagcaacaaccuggacuccaaagucggcggcaacuacaauuaccuguaccggcuguuccggaaguccaaucugaagcccuucgagcgggacaucagcaccgaaaucuaucaggccggcagcaccccuugcaacggcguggaaggcuucaacugcuacuucccacugcaguccuacggcuuucagcccacaaauggcgugggcuaucagcccuacagagugguggugcugagcuucgaacugcugcaugcuccugccacagugugcggcccuaagaaaagcaccaaucucgugaagaacaaaugcgugaacuucaacuucaacggccugaccggcaccggcgugcugacagagagcaacaagaaguuccugccauuccagcaguuuggccgggauaucgccgauaccacagacgccguuagagauccccagacacuggaaauccuggacaucaccccaugcagcuucggcggagugucugugaucaccccuggcaccaacaccagcaaucagguggcagugcuguaccagggcgugaacuguaccgaagugcccguggccauucacgccgaucagcugacaccuacauggcggguguacuccaccggcagcaauguguuucagaccagagccggcugucugaucggagccgagcacgugaacaauagcuacgagugcgacauccccaucggcgcuggcaucugugccagcuaccagacacagacaaacagccccagacgggcuagaagcguggccagccagagcaucauugccuacacaaugucucugggcgccgagaacagcguggccuacuccaacaacucuaucgcuauccccaccaacuucaccaucagcgugaccaccgagauccugccuguguccaugaccaagaccagcguggacugcaccauguacaucugcggcgauuccaccgagugcuccaaccugcugcugcaguacggcagcuucugcacccagcugaauagagcccugacagggaucgccguggaacaggacaagaacacccaagagguguucgcccaagugaagcaaaucuacaagaccccuccuaucaaggacuucggcggcuucaauuucagccagauucugcccgauccuagcaagcccagcaagcggagcuucaucgaggaccugcuguucaacaaagugacacuggccgacgccggcuucaucaagcaguauggcgauugucugggcgacauugccgccagggaucugauuugcgcccagaaguuuaacggacugacagugcugccuccucugcugaccgaugagaugaucgcccaguacacaucugcccugcuggccggcacaaucacaagcggcuggacauuuggagcuggcgccgcucugcagauccccuuugcuaugcagauggccuaccgguucaacggcaucggagugacccagaaugugcuguacgagaaccagaagcugaucgccaaccaguucaacagcgccaucggcaagauccaggacagccugagcagcacagcaagcgcccugggaaagcugcaggacguggucaaccagaaugcccaggcacugaacacccuggucaagcagcuguccuccaacuucggcgccaucagcucugugcugaacgauauccugagcagacuggacaaggucgaggccgaggugcagaucgacagacugaucacaggcagacugcagagccuccagacauacgugacccagcagcugaucagagccgccgagauuagagccucugccaaucuggccgccaccaagaugucugagugugugcugggccagagcaagagaguggacuuuugcggcaagggcuaccaccugaugagcuucccucagucugccccucacggcgugguguuucugcacgugacauaugugcccgcucaagagaagaauuucaccaccgcuccagccaucugccacgacggcaaagcccacuuuccuagagaaggcguguucguguccaacggcacccauugguucgugacacagcggaacuucuacgagccccagaucaucaccaccgacaacaccuucgugucuggcaacugcgacguugugaucggcauugugaacaauaccguguacgacccucugcagcccgagcuggacagcuucaaagaggaacuggacaaguacuuuaagaaccacacaagccccgacguggaccugggcgauaucagcggaaucaaugccagcgucgugaacauccagaaagagaucgaccggcugaacgagguggccaagaaucugaacgagagccugaucgaccugcaagaacuggggaaguacgagcaguacaucaaguggcccugguacaucuggcugggcuuuaucgccggacugauugccaucgugaucgucacaaucaugcuguguugcaugaccagcugcuguagcugccugaagggcuguuguagcuguggcagcugcugcaaguucgacgaggacgauucugagcccgugcugaagggcgugaaacugcacuacaccugaggacuaguuauaagacugacuagcccgaugggccucccaacgggcccuccuccccuccuugcaccgagauuaauaaaaaaaaaaaaaaaaaaaaaaaaaaaaaaaaaaaaaaaaaaaaaaaaaaaaaaaaaaaaaaaaugcaucccccccccccccccccccccccccccccccaaaggcucuuuucagagccaccagaauu

SEQ ID NO: 23271 - RNA, 4033 nt, Artificial Sequence
  SARS-CoV-2/Wuhan/WIV05/2019__EPI_ISL_402128 spike protein mRNA gc mod (1-1273)(H69del_V70del_A222V_Y453F_S477N_D614G_I692V)
aggagaaagcuuaccauguucguguuucuggugcugcugccccugguguccagccagugugugaaccugaccaccagaacacagcugccuccagccuacaccaacagcuucaccagaggcguguacuaccccgacaagguguucagauccagcgugcugcacucuacccaggaccuguuccugccuuucuucagcaacgugaccugguuccacgccaucuccggcaccaauggcaccaagagauucgacaaccccgugcugcccuucaacgacgggguguacuuugccagcaccgagaaguccaacaucaucagaggcuggaucuucggcaccacacuggacagcaagacccagagccugcugaucgugaacaacgccaccaacguggucaucaaagugugcgaguuccaguucugcaacgaccccuuccugggcgucuacuaccacaagaacaacaagagcuggauggaaagcgaguuccggguguacagcagcgccaacaacugcaccuucgaguacgugucccagccuuuccugauggaccuggaaggcaagcagggcaacuucaagaaccugcgcgaguucguguucaagaacaucgacggcuacuucaaaaucuacagcaagcacaccccuaucaaccucgugcgggaucugccucagggcuucucugugcuggaaccccugguggaucugcccaucggcaucaacaucacccgguuucagacacugcuggcccugcacagaagcuaccugacaccuggcgauagcagcagcggauggacagcuggugccgccgcuuacuaugugggcuaccugcagccuagaaccuuccugcugaaguacaacgagaacggcaccaucaccgacgccguggauugugcucuggauccucugagcgagacaaagugcacccugaaguccuucaccguggaaaagggcaucuaccagaccagcaacuuccgggugcagcccaccgaauccaucgugcgguuccccaauaucaccaaucugugccccuucggcgagguguucaaugccaccagauucgccucuguguacgccuggaaccggaagcggaucagcaauugcguggccgacuacuccgugcuguacaacuccgccagcuucagcaccuucaagugcuacggcguguccccuaccaagcugaacgaccugugcuucacaaacguguacgccgacagcuucgugauccggggagaugaagugcggcagauugccccuggacagacaggcaagaucgccgacuacaacuacaagcugcccgacgacuucaccggcugugugauugccuggaacagcaacaaccuggacuccaaagucggcggcaacuacaauuaccuguuccggcuguuccggaaguccaaucugaagcccuucgagcgggacaucagcaccgaaaucuaucaggccggcaacaccccuugcaacggcguggaaggcuucaacugcuacuucccacugcaguccuacggcuuucagcccacaaauggcgugggcuaucagcccuacagagugguggugcugagcuucgaacugcugcaugcuccugccacagugugcggcccuaagaaaagcaccaaucucgugaagaacaaaugcgugaacuucaacuucaacggccugaccggcaccggcgugcugacagagagcaacaagaaguuccugccauuccagcaguuuggccgggauaucgccgauaccacagacgccguuagagauccccagacacuggaaauccuggacaucaccccaugcagcuucggcggagugucugugaucaccccuggcaccaacaccagcaaucagguggcagugcuguaccagggcgugaacuguaccgaagugcccguggccauucacgccgaucagcugacaccuacauggcggguguacuccaccggcagcaauguguuucagaccagagccggcugucugaucggagccgagcacgugaacaauagcuacgagugcgacauccccaucggcgcuggcaucugugccagcuaccagacacagacaaacagccccagacgggcuagaagcguggccagccagagcgugauugccuacacaaugucucugggcgccgagaacagcguggccuacuccaacaacucuaucgcuauccccaccaacuucaccaucagcgugaccaccgagauccugccuguguccaugaccaagaccagcguggacugcaccauguacaucugcggcgauuccaccgagugcuccaaccugcugcugcaguacggcagcuucugcacccagcugaauagagcccugacagggaucgccguggaacaggacaagaacacccaagagguguucgcccaagugaagcaaaucuacaagaccccuccuaucaaggacuucggcggcuucaauuucagccagauucugcccgauccuagcaagcccagcaagcggagcuucaucgaggaccugcuguucaacaaagugacacuggccgacgccggcuucaucaagcaguauggcgauugucugggcgacauugccgccagggaucugauuugcgcccagaaguuuaacggacugacagugcugccuccucugcugaccgaugagaugaucgcccaguacacaucugcccugcuggccggcacaaucacaagcggcuggacauuuggagcuggcgccgcucugcagauccccuuugcuaugcagauggccuaccgguucaacggcaucggagugacccagaaugugcuguacgagaaccagaagcugaucgccaaccaguucaacagcgccaucggcaagauccaggacagccugagcagcacagcaagcgcccugggaaagcugcaggacguggucaaccagaaugcccaggcacugaacacccuggucaagcagcuguccuccaacuucggcgccaucagcucugugcugaacgauauccugagcagacuggacaaggucgaggccgaggugcagaucgacagacugaucacaggcagacugcagagccuccagacauacgugacccagcagcugaucagagccgccgagauuagagccucugccaaucuggccgccaccaagaugucugagugugugcugggccagagcaagagaguggacuuuugcggcaagggcuaccaccugaugagcuucccucagucugccccucacggcgugguguuucugcacgugacauaugugcccgcucaagagaagaauuucaccaccgcuccagccaucugccacgacggcaaagcccacuuuccuagagaaggcguguucguguccaacggcacccauugguucgugacacagcggaacuucuacgagccccagaucaucaccaccgacaacaccuucgugucuggcaacugcgacguugugaucggcauugugaacaauaccguguacgacccucugcagcccgagcuggacagcuucaaagaggaacuggacaaguacuuuaagaaccacacaagccccgacguggaccugggcgauaucagcggaaucaaugccagcgucgugaacauccagaaagagaucgaccggcugaacgagguggccaagaaucugaacgagagccugaucgaccugcaagaacuggggaaguacgagcaguacaucaaguggcccugguacaucuggcugggcuuuaucgccggacugauugccaucgugauggucacaaucaugcuguguugcaugaccagcugcuguagcugccugaagggcuguuguagcuguggcagcugcugcaaguucgacgaggacgauucugagcccgugcugaagggcgugaaacugcacuacaccugaggacuaguuauaagacugacuagcccgaugggccucccaacgggcccuccuccccuccuugcaccgagauuaauaaaaaaaaaaaaaaaaaaaaaaaaaaaaaaaaaaaaaaaaaaaaaaaaaaaaaaaaaaaaaaaaugcaucccccccccccccccccccccccccccccccaaaggcucuuuucagagccaccagaauu

SEQ ID NO: 23272 - RNA, 4033 nt, Artificial Sequence
  SARS-CoV-2/Wuhan/WIV05/2019__EPI_ISL_402128 spike protein mRNA gc mod (1-1273)(H69del_V70del_Y453F_D614G_I692V_M1229I)
aggagaaagcuuaccauguucguguuucuggugcugcugccccugguguccagccagugugugaaccugaccaccagaacacagcugccuccagccuacaccaacagcuucaccagaggcguguacuaccccgacaagguguucagauccagcgugcugcacucuacccaggaccuguuccugccuuucuucagcaacgugaccugguuccacgccaucuccggcaccaauggcaccaagagauucgacaaccccgugcugcccuucaacgacgggguguacuuugccagcaccgagaaguccaacaucaucagaggcuggaucuucggcaccacacuggacagcaagacccagagccugcugaucgugaacaacgccaccaacguggucaucaaagugugcgaguuccaguucugcaacgaccccuuccugggcgucuacuaccacaagaacaacaagagcuggauggaaagcgaguuccggguguacagcagcgccaacaacugcaccuucgaguacgugucccagccuuuccugauggaccuggaaggcaagcagggcaacuucaagaaccugcgcgaguucguguucaagaacaucgacggcuacuucaaaaucuacagcaagcacaccccuaucaaccucgugcgggaucugccucagggcuucucugcucuggaaccccugguggaucugcccaucggcaucaacaucacccgguuucagacacugcuggcccugcacagaagcuaccugacaccuggcgauagcagcagcggauggacagcuggugccgccgcuuacuaugugggcuaccugcagccuagaaccuuccugcugaaguacaacgagaacggcaccaucaccgacgccguggauugugcucuggauccucugagcgagacaaagugcacccugaaguccuucaccguggaaaagggcaucuaccagaccagcaacuuccgggugcagcccaccgaauccaucgugcgguuccccaauaucaccaaucugugccccuucggcgagguguucaaugccaccagauucgccucuguguacgccuggaaccggaagcggaucagcaauugcguggccgacuacuccgugcuguacaacuccgccagcuucagcaccuucaagugcuacggcguguccccuaccaagcugaacgaccugugcuucacaaacguguacgccgacagcuucgugauccggggagaugaagugcggcagauugccccuggacagacaggcaagaucgccgacuacaacuacaagcugcccgacgacuucaccggcugugugauugccuggaacagcaacaaccuggacuccaaagucggcggcaacuacaauuaccuguuccggcuguuccggaaguccaaucugaagcccuucgagcgggacaucagcaccgaaaucuaucaggccggcagcaccccuugcaacggcguggaaggcuucaacugcuacuucccacugcaguccuacggcuuucagcccacaaauggcgugggcuaucagcccuacagagugguggugcugagcuucgaacugcugcaugcuccugccacagugugcggcccuaagaaaagcaccaaucucgugaagaacaaaugcgugaacuucaacuucaacggccugaccggcaccggcgugcugacagagagcaacaagaaguuccugccauuccagcaguuuggccgggauaucgccgauaccacagacgccguuagagauccccagacacuggaaauccuggacaucaccccaugcagcuucggcggagugucugugaucaccccuggcaccaacaccagcaaucagguggcagugcuguaccagggcgugaacuguaccgaagugcccguggccauucacgccgaucagcugacaccuacauggcggguguacuccaccggcagcaauguguuucagaccagagccggcugucugaucggagccgagcacgugaacaauagcuacgagugcgacauccccaucggcgcuggcaucugugccagcuaccagacacagacaaacagccccagacgggcuagaagcguggccagccagagcgugauugccuacacaaugucucugggcgccgagaacagcguggccuacuccaacaacucuaucgcuauccccaccaacuucaccaucagcgugaccaccgagauccugccuguguccaugaccaagaccagcguggacugcaccauguacaucugcggcgauuccaccgagugcuccaaccugcugcugcaguacggcagcuucugcacccagcugaauagagcccugacagggaucgccguggaacaggacaagaacacccaagagguguucgcccaagugaagcaaaucuacaagaccccuccuaucaaggacuucggcggcuucaauuucagccagauucugcccgauccuagcaagcccagcaagcggagcuucaucgaggaccugcuguucaacaaagugacacuggccgacgccggcuucaucaagcaguauggcgauugucugggcgacauugccgccagggaucugauuugcgcccagaaguuuaacggacugacagugcugccuccucugcugaccgaugagaugaucgcccaguacacaucugcccugcuggccggcacaaucacaagcggcuggacauuuggagcuggcgccgcucugcagauccccuuugcuaugcagauggccuaccgguucaacggcaucggagugacccagaaugugcuguacgagaaccagaagcugaucgccaaccaguucaacagcgccaucggcaagauccaggacagccugagcagcacagcaagcgcccugggaaagcugcaggacguggucaaccagaaugcccaggcacugaacacccuggucaagcagcuguccuccaacuucggcgccaucagcucugugcugaacgauauccugagcagacuggacaaggucgaggccgaggugcagaucgacagacugaucacaggcagacugcagagccuccagacauacgugacccagcagcugaucagagccgccgagauuagagccucugccaaucuggccgccaccaagaugucugagugugugcugggccagagcaagagaguggacuuuugcggcaagggcuaccaccugaugagcuucccucagucugccccucacggcgugguguuucugcacgugacauaugugcccgcucaagagaagaauuucaccaccgcuccagccaucugccacgacggcaaagcccacuuuccuagagaaggcguguucguguccaacggcacccauugguucgugacacagcggaacuucuacgagccccagaucaucaccaccgacaacaccuucgugucuggcaacugcgacguugugaucggcauugugaacaauaccguguacgacccucugcagcccgagcuggacagcuucaaagaggaacuggacaaguacuuuaagaaccacacaagccccgacguggaccugggcgauaucagcggaaucaaugccagcgucgugaacauccagaaagagaucgaccggcugaacgagguggccaagaaucugaacgagagccugaucgaccugcaagaacuggggaaguacgagcaguacaucaaguggcccugguacaucuggcugggcuuuaucgccggacugauugccaucgugaucgucacaaucaugcuguguugcaugaccagcugcuguagcugccugaagggcuguuguagcuguggcagcugcugcaaguucgacgaggacgauucugagcccgugcugaagggcgugaaacugcacuacaccugaggacuaguuauaagacugacuagcccgaugggccucccaacgggcccuccuccccuccuugcaccgagauuaauaaaaaaaaaaaaaaaaaaaaaaaaaaaaaaaaaaaaaaaaaaaaaaaaaaaaaaaaaaaaaaaaugcaucccccccccccccccccccccccccccccccaaaggcucuuuucagagccaccagaauu

SEQ ID NO: 23273 - RNA, 4030 nt, Artificial Sequence
  SARS-CoV-2/Wuhan/WIV05/2019__EPI_ISL_402128 spike protein mRNA gc mod (1-1273)(H69del_V70del_Y144del_N501Y_A570D_D614G_P681H_T716I_S982 A_D1118H)
aggagaaagcuuaccauguucguguuucuggugcugcugccccugguguccagccagugugugaaccugaccaccagaacacagcugccuccagccuacaccaacagcuucaccagaggcguguacuaccccgacaagguguucagauccagcgugcugcacucuacccaggaccuguuccugccuuucuucagcaacgugaccugguuccacgccaucuccggcaccaauggcaccaagagauucgacaaccccgugcugcccuucaacgacgggguguacuuugccagcaccgagaaguccaacaucaucagaggcuggaucuucggcaccacacuggacagcaagacccagagccugcugaucgugaacaacgccaccaacguggucaucaaagugugcgaguuccaguucugcaacgaccccuuccugggcgucuaccacaagaacaacaagagcuggauggaaagcgaguuccggguguacagcagcgccaacaacugcaccuucgaguacgugucccagccuuuccugauggaccuggaaggcaagcagggcaacuucaagaaccugcgcgaguucguguucaagaacaucgacggcuacuucaaaaucuacagcaagcacaccccuaucaaccucgugcgggaucugccucagggcuucucugcucuggaaccccugguggaucugcccaucggcaucaacaucacccgguuucagacacugcuggcccugcacagaagcuaccugacaccuggcgauagcagcagcggauggacagcuggugccgccgcuuacuaugugggcuaccugcagccuagaaccuuccugcugaaguacaacgagaacggcaccaucaccgacgccguggauugugcucuggauccucugagcgagacaaagugcacccugaaguccuucaccguggaaaagggcaucuaccagaccagcaacuuccgggugcagcccaccgaauccaucgugcgguuccccaauaucaccaaucugugccccuucggcgagguguucaaugccaccagauucgccucuguguacgccuggaaccggaagcggaucagcaauugcguggccgacuacuccgugcuguacaacuccgccagcuucagcaccuucaagugcuacggcguguccccuaccaagcugaacgaccugugcuucacaaacguguacgccgacagcuucgugauccggggagaugaagugcggcagauugccccuggacagacaggcaagaucgccgacuacaacuacaagcugcccgacgacuucaccggcugugugauugccuggaacagcaacaaccuggacuccaaagucggcggcaacuacaauuaccuguaccggcuguuccggaaguccaaucugaagcccuucgagcgggacaucagcaccgaaaucuaucaggccggcagcaccccuugcaacggcguggaaggcuucaacugcuacuucccacugcaguccuacggcuuucagcccacauacggcgugggcuaucagcccuacagagugguggugcugagcuucgaacugcugcaugcuccugccacagugugcggcccuaagaaaagcaccaaucucgugaagaacaaaugcgugaacuucaacuucaacggccugaccggcaccggcgugcugacagagagcaacaagaaguuccugccauuccagcaguuuggccgggauaucgacgauaccacagacgccguuagagauccccagacacuggaaauccuggacaucaccccaugcagcuucggcggagugucugugaucaccccuggcaccaacaccagcaaucagguggcagugcuguaccagggcgugaacuguaccgaagugcccguggccauucacgccgaucagcugacaccuacauggcggguguacuccaccggcagcaauguguuucagaccagagccggcugucugaucggagccgagcacgugaacaauagcuacgagugcgacauccccaucggcgcuggcaucugugccagcuaccagacacagacaaacagccacagacgggcuagaagcguggccagccagagcaucauugccuacacaaugucucugggcgccgagaacagcguggccuacuccaacaacucuaucgcuauccccaucaacuucaccaucagcgugaccaccgagauccugccuguguccaugaccaagaccagcguggacugcaccauguacaucugcggcgauuccaccgagugcuccaaccugcugcugcaguacggcagcuucugcacccagcugaauagagcccugacagggaucgccguggaacaggacaagaacacccaagagguguucgcccaagugaagcaaaucuacaagaccccuccuaucaaggacuucggcggcuucaauuucagccagauucugcccgauccuagcaagcccagcaagcggagcuucaucgaggaccugcuguucaacaaagugacacuggccgacgccggcuucaucaagcaguauggcgauugucugggcgacauugccgccagggaucugauuugcgcccagaaguuuaacggacugacagugcugccuccucugcugaccgaugagaugaucgcccaguacacaucugcccugcuggccggcacaaucacaagcggcuggacauuuggagcuggcgccgcucugcagauccccuuugcuaugcagauggccuaccgguucaacggcaucggagugacccagaaugugcuguacgagaaccagaagcugaucgccaaccaguucaacagcgccaucggcaagauccaggacagccugagcagcacagcaagcgcccugggaaagcugcaggacguggucaaccagaaugcccaggcacugaacacccuggucaagcagcuguccuccaacuucggcgccaucagcucugugcugaacgauauccuggccagacuggacaaggucgaggccgaggugcagaucgacagacugaucacaggcagacugcagagccuccagacauacgugacccagcagcugaucagagccgccgagauuagagccucugccaaucuggccgccaccaagaugucugagugugugcugggccagagcaagagaguggacuuuugcggcaagggcuaccaccugaugagcuucccucagucugccccucacggcgugguguuucugcacgugacauaugugcccgcucaagagaagaauuucaccaccgcuccagccaucugccacgacggcaaagcccacuuuccuagagaaggcguguucguguccaacggcacccauugguucgugacacagcggaacuucuacgagccccagaucaucaccacccacaacaccuucgugucuggcaacugcgacguugugaucggcauugugaacaauaccguguacgacccucugcagcccgagcuggacagcuucaaagaggaacuggacaaguacuuuaagaaccacacaagccccgacguggaccugggcgauaucagcggaaucaaugccagcgucgugaacauccagaaagagaucgaccggcugaacgagguggccaagaaucugaacgagagccugaucgaccugcaagaacuggggaaguacgagcaguacaucaaguggcccugguacaucuggcugggcuuuaucgccggacugauugccaucgugauggucacaaucaugcuguguugcaugaccagcugcuguagcugccugaagggcuguuguagcuguggcagcugcugcaaguucgacgaggacgauucugagcccgugcugaagggcgugaaacugcacuacaccugaggacuaguuauaagacugacuagcccgaugggccucccaacgggcccuccuccccuccuugcaccgagauuaauaaaaaaaaaaaaaaaaaaaaaaaaaaaaaaaaaaaaaaaaaaaaaaaaaaaaaaaaaaaaaaaaugcaucccccccccccccccccccccccccccccccaaaggcucuuuucagagccaccagaauu

SEQ ID NO: 23274 - RNA, 4039 nt, Artificial Sequence
  SARS-CoV-2/Wuhan/WIV05/2019__EPI_ISL_402128 spike protein mRNA gc mod (1-1273)(K417N_E484K_N501Y_D614G)
aggagaaagcuuaccauguucguguuucuggugcugcugccccugguguccagccagugugugaaccugaccaccagaacacagcugccuccagccuacaccaacagcuucaccagaggcguguacuaccccgacaagguguucagauccagcgugcugcacucuacccaggaccuguuccugccuuucuucagcaacgugaccugguuccacgccauccacguguccggcaccaauggcaccaagagauucgacaaccccgugcugcccuucaacgacgggguguacuuugccagcaccgagaaguccaacaucaucagaggcuggaucuucggcaccacacuggacagcaagacccagagccugcugaucgugaacaacgccaccaacguggucaucaaagugugcgaguuccaguucugcaacgaccccuuccugggcgucuacuaccacaagaacaacaagagcuggauggaaagcgaguuccggguguacagcagcgccaacaacugcaccuucgaguacgugucccagccuuuccugauggaccuggaaggcaagcagggcaacuucaagaaccugcgcgaguucguguucaagaacaucgacggcuacuucaaaaucuacagcaagcacaccccuaucaaccucgugcgggaucugccucagggcuucucugcucuggaaccccugguggaucugcccaucggcaucaacaucacccgguuucagacacugcuggcccugcacagaagcuaccugacaccuggcgauagcagcagcggauggacagcuggugccgccgcuuacuaugugggcuaccugcagccuagaaccuuccugcugaaguacaacgagaacggcaccaucaccgacgccguggauugugcucuggauccucugagcgagacaaagugcacccugaaguccuucaccguggaaaagggcaucuaccagaccagcaacuuccgggugcagcccaccgaauccaucgugcgguuccccaauaucaccaaucugugccccuucggcgagguguucaaugccaccagauucgccucuguguacgccuggaaccggaagcggaucagcaauugcguggccgacuacuccgugcuguacaacuccgccagcuucagcaccuucaagugcuacggcguguccccuaccaagcugaacgaccugugcuucacaaacguguacgccgacagcuucgugauccggggagaugaagugcggcagauugccccuggacagacaggcaacaucgccgacuacaacuacaagcugcccgacgacuucaccggcugugugauugccuggaacagcaacaaccuggacuccaaagucggcggcaacuacaauuaccuguaccggcuguuccggaaguccaaucugaagcccuucgagcgggacaucagcaccgaaaucuaucaggccggcagcaccccuugcaacggcgugaagggcuucaacugcuacuucccacugcaguccuacggcuuucagcccacauacggcgugggcuaucagcccuacagagugguggugcugagcuucgaacugcugcaugcuccugccacagugugcggcccuaagaaaagcaccaaucucgugaagaacaaaugcgugaacuucaacuucaacggccugaccggcaccggcgugcugacagagagcaacaagaaguuccugccauuccagcaguuuggccgggauaucgccgauaccacagacgccguuagagauccccagacacuggaaauccuggacaucaccccaugcagcuucggcggagugucugugaucaccccuggcaccaacaccagcaaucagguggcagugcuguaccagggcgugaacuguaccgaagugcccguggccauucacgccgaucagcugacaccuacauggcggguguacuccaccggcagcaauguguuucagaccagagccggcugucugaucggagccgagcacgugaacaauagcuacgagugcgacauccccaucggcgcuggcaucugugccagcuaccagacacagacaaacagccccagacgggcuagaagcguggccagccagagcaucauugccuacacaaugucucugggcgccgagaacagcguggccuacuccaacaacucuaucgcuauccccaccaacuucaccaucagcgugaccaccgagauccugccuguguccaugaccaagaccagcguggacugcaccauguacaucugcggcgauuccaccgagugcuccaaccugcugcugcaguacggcagcuucugcacccagcugaauagagcccugacagggaucgccguggaacaggacaagaacacccaagagguguucgcccaagugaagcaaaucuacaagaccccuccuaucaaggacuucggcggcuucaauuucagccagauucugcccgauccuagcaagcccagcaagcggagcuucaucgaggaccugcuguucaacaaagugacacuggccgacgccggcuucaucaagcaguauggcgauugucugggcgacauugccgccagggaucugauuugcgcccagaaguuuaacggacugacagugcugccuccucugcugaccgaugagaugaucgcccaguacacaucugcccugcuggccggcacaaucacaagcggcuggacauuuggagcuggcgccgcucugcagauccccuuugcuaugcagauggccuaccgguucaacggcaucggagugacccagaaugugcuguacgagaaccagaagcugaucgccaaccaguucaacagcgccaucggcaagauccaggacagccugagcagcacagcaagcgcccugggaaagcugcaggacguggucaaccagaaugcccaggcacugaacacccuggucaagcagcuguccuccaacuucggcgccaucagcucugugcugaacgauauccugagcagacuggacaaggucgaggccgaggugcagaucgacagacugaucacaggcagacugcagagccuccagacauacgugacccagcagcugaucagagccgccgagauuagagccucugccaaucuggccgccaccaagaugucugagugugugcugggccagagcaagagaguggacuuuugcggcaagggcuaccaccugaugagcuucccucagucugccccucacggcgugguguuucugcacgugacauaugugcccgcucaagagaagaauuucaccaccgcuccagccaucugccacgacggcaaagcccacuuuccuagagaaggcguguucguguccaacggcacccauugguucgugacacagcggaacuucuacgagccccagaucaucaccaccgacaacaccuucgugucuggcaacugcgacguugugaucggcauugugaacaauaccguguacgacccucugcagcccgagcuggacagcuucaaagaggaacuggacaaguacuuuaagaaccacacaagccccgacguggaccugggcgauaucagcggaaucaaugccagcgucgugaacauccagaaagagaucgaccggcugaacgagguggccaagaaucugaacgagagccugaucgaccugcaagaacuggggaaguacgagcaguacaucaaguggcccugguacaucuggcugggcuuuaucgccggacugauugccaucgugauggucacaaucaugcuguguugcaugaccagcugcuguagcugccugaagggcuguuguagcuguggcagcugcugcaaguucgacgaggacgauucugagcccgugcugaagggcgugaaacugcacuacaccugaggacuaguuauaagacugacuagcccgaugggccucccaacgggcccuccuccccuccuugcaccgagauuaauaaaaaaaaaaaaaaaaaaaaaaaaaaaaaaaaaaaaaaaaaaaaaaaaaaaaaaaaaaaaaaaaugcaucccccccccccccccccccccccccccccccaaaggcucuuuucagagccaccagaauu

SEQ ID NO: 23275 - RNA, 4030 nt, Artificial Sequence
  SARS-CoV-2/Wuhan/WIV05/2019__EPI_ISL_402128 spike protein mRNA gc mod (1-1273)(L18F_D80A_D215G_L242del_A243del_L244del_R246I_K417N_E484 K_N501Y_D614G_A701V)
aggagaaagcuuaccauguucguguuucuggugcugcugccccugguguccagccagugugugaacuucaccaccagaacacagcugccuccagccuacaccaacagcuucaccagaggcguguacuaccccgacaagguguucagauccagcgugcugcacucuacccaggaccuguuccugccuuucuucagcaacgugaccugguuccacgccauccacguguccggcaccaauggcaccaagagauucgccaaccccgugcugcccuucaacgacgggguguacuuugccagcaccgagaaguccaacaucaucagaggcuggaucuucggcaccacacuggacagcaagacccagagccugcugaucgugaacaacgccaccaacguggucaucaaagugugcgaguuccaguucugcaacgaccccuuccugggcgucuacuaccacaagaacaacaagagcuggauggaaagcgaguuccggguguacagcagcgccaacaacugcaccuucgaguacgugucccagccuuuccugauggaccuggaaggcaagcagggcaacuucaagaaccugcgcgaguucguguucaagaacaucgacggcuacuucaaaaucuacagcaagcacaccccuaucaaccucgugcggggccugccucagggcuucucugcucuggaaccccugguggaucugcccaucggcaucaacaucacccgguuucagacacugcacaucagcuaccugacaccuggcgauagcagcagcggauggacagcuggugccgccgcuuacuaugugggcuaccugcagccuagaaccuuccugcugaaguacaacgagaacggcaccaucaccgacgccguggauugugcucuggauccucugagcgagacaaagugcacccugaaguccuucaccguggaaaagggcaucuaccagaccagcaacuuccgggugcagcccaccgaauccaucgugcgguuccccaauaucaccaaucugugccccuucggcgagguguucaaugccaccagauucgccucuguguacgccuggaaccggaagcggaucagcaauugcguggccgacuacuccgugcuguacaacuccgccagcuucagcaccuucaagugcuacggcguguccccuaccaagcugaacgaccugugcuucacaaacguguacgccgacagcuucgugauccggggagaugaagugcggcagauugccccuggacagacaggcaacaucgccgacuacaacuacaagcugcccgacgacuucaccggcugugugauugccuggaacagcaacaaccuggacuccaaagucggcggcaacuacaauuaccuguaccggcuguuccggaaguccaaucugaagcccuucgagcgggacaucagcaccgaaaucuaucaggccggcagcaccccuugcaacggcgugaagggcuucaacugcuacuucccacugcaguccuacggcuuucagcccacauacggcgugggcuaucagcccuacagagugguggugcugagcuucgaacugcugcaugcuccugccacagugugcggcccuaagaaaagcaccaaucucgugaagaacaaaugcgugaacuucaacuucaacggccugaccggcaccggcgugcugacagagagcaacaagaaguuccugccauuccagcaguuuggccgggauaucgccgauaccacagacgccguuagagauccccagacacuggaaauccuggacaucaccccaugcagcuucggcggagugucugugaucaccccuggcaccaacaccagcaaucagguggcagugcuguaccagggcgugaacuguaccgaagugcccguggccauucacgccgaucagcugacaccuacauggcggguguacuccaccggcagcaauguguuucagaccagagccggcugucugaucggagccgagcacgugaacaauagcuacgagugcgacauccccaucggcgcuggcaucugugccagcuaccagacacagacaaacagccccagacgggcuagaagcguggccagccagagcaucauugccuacacaaugucucugggcguggagaacagcguggccuacuccaacaacucuaucgcuauccccaccaacuucaccaucagcgugaccaccgagauccugccuguguccaugaccaagaccagcguggacugcaccauguacaucugcggcgauuccaccgagugcuccaaccugcugcugcaguacggcagcuucugcacccagcugaauagagcccugacagggaucgccguggaacaggacaagaacacccaagagguguucgcccaagugaagcaaaucuacaagaccccuccuaucaaggacuucggcggcuucaauuucagccagauucugcccgauccuagcaagcccagcaagcggagcuucaucgaggaccugcuguucaacaaagugacacuggccgacgccggcuucaucaagcaguauggcgauugucugggcgacauugccgccagggaucugauuugcgcccagaaguuuaacggacugacagugcugccuccucugcugaccgaugagaugaucgcccaguacacaucugcccugcuggccggcacaaucacaagcggcuggacauuuggagcuggcgccgcucugcagauccccuuugcuaugcagauggccuaccgguucaacggcaucggagugacccagaaugugcuguacgagaaccagaagcugaucgccaaccaguucaacagcgccaucggcaagauccaggacagccugagcagcacagcaagcgcccugggaaagcugcaggacguggucaaccagaaugcccaggcacugaacacccuggucaagcagcuguccuccaacuucggcgccaucagcucugugcugaacgauauccugagcagacuggacaaggucgaggccgaggugcagaucgacagacugaucacaggcagacugcagagccuccagacauacgugacccagcagcugaucagagccgccgagauuagagccucugccaaucuggccgccaccaagaugucugagugugugcugggccagagcaagagaguggacuuuugcggcaagggcuaccaccugaugagcuucccucagucugccccucacggcgugguguuucugcacgugacauaugugcccgcucaagagaagaauuucaccaccgcuccagccaucugccacgacggcaaagcccacuuuccuagagaaggcguguucguguccaacggcacccauugguucgugacacagcggaacuucuacgagccccagaucaucaccaccgacaacaccuucgugucuggcaacugcgacguugugaucggcauugugaacaauaccguguacgacccucugcagcccgagcuggacagcuucaaagaggaacuggacaaguacuuuaagaaccacacaagccccgacguggaccugggcgauaucagcggaaucaaugccagcgucgugaacauccagaaagagaucgaccggcugaacgagguggccaagaaucugaacgagagccugaucgaccugcaagaacuggggaaguacgagcaguacaucaaguggcccugguacaucuggcugggcuuuaucgccggacugauugccaucgugauggucacaaucaugcuguguugcaugaccagcugcuguagcugccugaagggcuguuguagcuguggcagcugcugcaaguucgacgaggacgauucugagcccgugcugaagggcgugaaacugcacuacaccugaggacuaguuauaagacugacuagcccgaugggccucccaacgggcccuccuccccuccuugcaccgagauuaauaaaaaaaaaaaaaaaaaaaaaaaaaaaaaaaaaaaaaaaaaaaaaaaaaaaaaaaaaaaaaaaaugcaucccccccccccccccccccccccccccccccaaaggcucuuuucagagccaccagaauu

SEQ ID NO: 23276 - RNA, 4039 nt, Artificial Sequence
  SARS-CoV-2/Wuhan/WIV05/2019__EPI_ISL_402128 spike protein mRNA gc mod (1-1273)(E484K_D614G)
aggagaaagcuuaccauguucguguuucuggugcugcugccccugguguccagccagugugugaaccugaccaccagaacacagcugccuccagccuacaccaacagcuucaccagaggcguguacuaccccgacaagguguucagauccagcgugcugcacucuacccaggaccuguuccugccuuucuucagcaacgugaccugguuccacgccauccacguguccggcaccaauggcaccaagagauucgacaaccccgugcugcccuucaacgacgggguguacuuugccagcaccgagaaguccaacaucaucagaggcuggaucuucggcaccacacuggacagcaagacccagagccugcugaucgugaacaacgccaccaacguggucaucaaagugugcgaguuccaguucugcaacgaccccuuccugggcgucuacuaccacaagaacaacaagagcuggauggaaagcgaguuccggguguacagcagcgccaacaacugcaccuucgaguacgugucccagccuuuccugauggaccuggaaggcaagcagggcaacuucaagaaccugcgcgaguucguguucaagaacaucgacggcuacuucaaaaucuacagcaagcacaccccuaucaaccucgugcgggaucugccucagggcuucucugcucuggaaccccugguggaucugcccaucggcaucaacaucacccgguuucagacacugcuggcccugcacagaagcuaccugacaccuggcgauagcagcagcggauggacagcuggugccgccgcuuacuaugugggcuaccugcagccuagaaccuuccugcugaaguacaacgagaacggcaccaucaccgacgccguggauugugcucuggauccucugagcgagacaaagugcacccugaaguccuucaccguggaaaagggcaucuaccagaccagcaacuuccgggugcagcccaccgaauccaucgugcgguuccccaauaucaccaaucugugccccuucggcgagguguucaaugccaccagauucgccucuguguacgccuggaaccggaagcggaucagcaauugcguggccgacuacuccgugcuguacaacuccgccagcuucagcaccuucaagugcuacggcguguccccuaccaagcugaacgaccugugcuucacaaacguguacgccgacagcuucgugauccggggagaugaagugcggcagauugccccuggacagacaggcaagaucgccgacuacaacuacaagcugcccgacgacuucaccggcugugugauugccuggaacagcaacaaccuggacuccaaagucggcggcaacuacaauuaccuguaccggcuguuccggaaguccaaucugaagcccuucgagcgggacaucagcaccgaaaucuaucaggccggcagcaccccuugcaacggcgugaagggcuucaacugcuacuucccacugcaguccuacggcuuucagcccacaaauggcgugggcuaucagcccuacagagugguggugcugagcuucgaacugcugcaugcuccugccacagugugcggcccuaagaaaagcaccaaucucgugaagaacaaaugcgugaacuucaacuucaacggccugaccggcaccggcgugcugacagagagcaacaagaaguuccugccauuccagcaguuuggccgggauaucgccgauaccacagacgccguuagagauccccagacacuggaaauccuggacaucaccccaugcagcuucggcggagugucugugaucaccccuggcaccaacaccagcaaucagguggcagugcuguaccagggcgugaacuguaccgaagugcccguggccauucacgccgaucagcugacaccuacauggcggguguacuccaccggcagcaauguguuucagaccagagccggcugucugaucggagccgagcacgugaacaauagcuacgagugcgacauccccaucggcgcuggcaucugugccagcuaccagacacagacaaacagccccagacgggcuagaagcguggccagccagagcaucauugccuacacaaugucucugggcgccgagaacagcguggccuacuccaacaacucuaucgcuauccccaccaacuucaccaucagcgugaccaccgagauccugccuguguccaugaccaagaccagcguggacugcaccauguacaucugcggcgauuccaccgagugcuccaaccugcugcugcaguacggcagcuucugcacccagcugaauagagcccugacagggaucgccguggaacaggacaagaacacccaagagguguucgcccaagugaagcaaaucuacaagaccccuccuaucaaggacuucggcggcuucaauuucagccagauucugcccgauccuagcaagcccagcaagcggagcuucaucgaggaccugcuguucaacaaagugacacuggccgacgccggcuucaucaagcaguauggcgauugucugggcgacauugccgccagggaucugauuugcgcccagaaguuuaacggacugacagugcugccuccucugcugaccgaugagaugaucgcccaguacacaucugcccugcuggccggcacaaucacaagcggcuggacauuuggagcuggcgccgcucugcagauccccuuugcuaugcagauggccuaccgguucaacggcaucggagugacccagaaugugcuguacgagaaccagaagcugaucgccaaccaguucaacagcgccaucggcaagauccaggacagccugagcagcacagcaagcgcccugggaaagcugcaggacguggucaaccagaaugcccaggcacugaacacccuggucaagcagcuguccuccaacuucggcgccaucagcucugugcugaacgauauccugagcagacuggacaaggucgaggccgaggugcagaucgacagacugaucacaggcagacugcagagccuccagacauacgugacccagcagcugaucagagccgccgagauuagagccucugccaaucuggccgccaccaagaugucugagugugugcugggccagagcaagagaguggacuuuugcggcaagggcuaccaccugaugagcuucccucagucugccccucacggcgugguguuucugcacgugacauaugugcccgcucaagagaagaauuucaccaccgcuccagccaucugccacgacggcaaagcccacuuuccuagagaaggcguguucguguccaacggcacccauugguucgugacacagcggaacuucuacgagccccagaucaucaccaccgacaacaccuucgugucuggcaacugcgacguugugaucggcauugugaacaauaccguguacgacccucugcagcccgagcuggacagcuucaaagaggaacuggacaaguacuuuaagaaccacacaagccccgacguggaccugggcgauaucagcggaaucaaugccagcgucgugaacauccagaaagagaucgaccggcugaacgagguggccaagaaucugaacgagagccugaucgaccugcaagaacuggggaaguacgagcaguacaucaaguggcccugguacaucuggcugggcuuuaucgccggacugauugccaucgugauggucacaaucaugcuguguugcaugaccagcugcuguagcugccugaagggcuguuguagcuguggcagcugcugcaaguucgacgaggacgauucugagcccgugcugaagggcgugaaacugcacuacaccugaggacuaguuauaagacugacuagcccgaugggccucccaacgggcccuccuccccuccuugcaccgagauuaauaaaaaaaaaaaaaaaaaaaaaaaaaaaaaaaaaaaaaaaaaaaaaaaaaaaaaaaaaaaaaaaaugcaucccccccccccccccccccccccccccccccaaaggcucuuuucagagccaccagaauu

SEQ ID NO: 23277 - RNA, 4039 nt, Artificial Sequence
  SARS-CoV-2/Wuhan/WIV05/2019__EPI_ISL_402128 spike protein mRNA gc mod (1-1273)(L18F_T20N_P26S_D138Y_R190S_K417T_E484K_N501Y_D614G_H655Y _T1027I)
aggagaaagcuuaccauguucguguuucuggugcugcugccccugguguccagccagugugugaacuucaccaacagaacacagcugccuagcgccuacaccaacagcuucaccagaggcguguacuaccccgacaagguguucagauccagcgugcugcacucuacccaggaccuguuccugccuuucuucagcaacgugaccugguuccacgccauccacguguccggcaccaauggcaccaagagauucgacaaccccgugcugcccuucaacgacgggguguacuuugccagcaccgagaaguccaacaucaucagaggcuggaucuucggcaccacacuggacagcaagacccagagccugcugaucgugaacaacgccaccaacguggucaucaaagugugcgaguuccaguucugcaacuaccccuuccugggcgucuacuaccacaagaacaacaagagcuggauggaaagcgaguuccggguguacagcagcgccaacaacugcaccuucgaguacgugucccagccuuuccugauggaccuggaaggcaagcagggcaacuucaagaaccugagcgaguucguguucaagaacaucgacggcuacuucaaaaucuacagcaagcacaccccuaucaaccucgugcgggaucugccucagggcuucucugcucuggaaccccugguggaucugcccaucggcaucaacaucacccgguuucagacacugcuggcccugcacagaagcuaccugacaccuggcgauagcagcagcggauggacagcuggugccgccgcuuacuaugugggcuaccugcagccuagaaccuuccugcugaaguacaacgagaacggcaccaucaccgacgccguggauugugcucuggauccucugagcgagacaaagugcacccugaaguccuucaccguggaaaagggcaucuaccagaccagcaacuuccgggugcagcccaccgaauccaucgugcgguuccccaauaucaccaaucugugccccuucggcgagguguucaaugccaccagauucgccucuguguacgccuggaaccggaagcggaucagcaauugcguggccgacuacuccgugcuguacaacuccgccagcuucagcaccuucaagugcuacggcguguccccuaccaagcugaacgaccugugcuucacaaacguguacgccgacagcuucgugauccggggagaugaagugcggcagauugccccuggacagacaggcaccaucgccgacuacaacuacaagcugcccgacgacuucaccggcugugugauugccuggaacagcaacaaccuggacuccaaagucggcggcaacuacaauuaccuguaccggcuguuccggaaguccaaucugaagcccuucgagcgggacaucagcaccgaaaucuaucaggccggcagcaccccuugcaacggcgugaagggcuucaacugcuacuucccacugcaguccuacggcuuucagcccacauacggcgugggcuaucagcccuacagagugguggugcugagcuucgaacugcugcaugcuccugccacagugugcggcccuaagaaaagcaccaaucucgugaagaacaaaugcgugaacuucaacuucaacggccugaccggcaccggcgugcugacagagagcaacaagaaguuccugccauuccagcaguuuggccgggauaucgccgauaccacagacgccguuagagauccccagacacuggaaauccuggacaucaccccaugcagcuucggcggagugucugugaucaccccuggcaccaacaccagcaaucagguggcagugcuguaccagggcgugaacuguaccgaagugcccguggccauucacgccgaucagcugacaccuacauggcggguguacuccaccggcagcaauguguuucagaccagagccggcugucugaucggagccgaguacgugaacaauagcuacgagugcgacauccccaucggcgcuggcaucugugccagcuaccagacacagacaaacagccccagacgggcuagaagcguggccagccagagcaucauugccuacacaaugucucugggcgccgagaacagcguggccuacuccaacaacucuaucgcuauccccaccaacuucaccaucagcgugaccaccgagauccugccuguguccaugaccaagaccagcguggacugcaccauguacaucugcggcgauuccaccgagugcuccaaccugcugcugcaguacggcagcuucugcacccagcugaauagagcccugacagggaucgccguggaacaggacaagaacacccaagagguguucgcccaagugaagcaaaucuacaagaccccuccuaucaaggacuucggcggcuucaauuucagccagauucugcccgauccuagcaagcccagcaagcggagcuucaucgaggaccugcuguucaacaaagugacacuggccgacgccggcuucaucaagcaguauggcgauugucugggcgacauugccgccagggaucugauuugcgcccagaaguuuaacggacugacagugcugccuccucugcugaccgaugagaugaucgcccaguacacaucugcccugcuggccggcacaaucacaagcggcuggacauuuggagcuggcgccgcucugcagauccccuuugcuaugcagauggccuaccgguucaacggcaucggagugacccagaaugugcuguacgagaaccagaagcugaucgccaaccaguucaacagcgccaucggcaagauccaggacagccugagcagcacagcaagcgcccugggaaagcugcaggacguggucaaccagaaugcccaggcacugaacacccuggucaagcagcuguccuccaacuucggcgccaucagcucugugcugaacgauauccugagcagacuggacaaggucgaggccgaggugcagaucgacagacugaucacaggcagacugcagagccuccagacauacgugacccagcagcugaucagagccgccgagauuagagccucugccaaucuggccgccaucaagaugucugagugugugcugggccagagcaagagaguggacuuuugcggcaagggcuaccaccugaugagcuucccucagucugccccucacggcgugguguuucugcacgugacauaugugcccgcucaagagaagaauuucaccaccgcuccagccaucugccacgacggcaaagcccacuuuccuagagaaggcguguucguguccaacggcacccauugguucgugacacagcggaacuucuacgagccccagaucaucaccaccgacaacaccuucgugucuggcaacugcgacguugugaucggcauugugaacaauaccguguacgacccucugcagcccgagcuggacagcuucaaagaggaacuggacaaguacuuuaagaaccacacaagccccgacguggaccugggcgauaucagcggaaucaaugccagcgucgugaacauccagaaagagaucgaccggcugaacgagguggccaagaaucugaacgagagccugaucgaccugcaagaacuggggaaguacgagcaguacaucaaguggcccugguacaucuggcugggcuuuaucgccggacugauugccaucgugauggucacaaucaugcuguguugcaugaccagcugcuguagcugccugaagggcuguuguagcuguggcagcugcugcaaguucgacgaggacgauucugagcccgugcugaagggcgugaaacugcacuacaccugaggacuaguuauaagacugacuagcccgaugggccucccaacgggcccuccuccccuccuugcaccgagauuaauaaaaaaaaaaaaaaaaaaaaaaaaaaaaaaaaaaaaaaaaaaaaaaaaaaaaaaaaaaaaaaaaugcaucccccccccccccccccccccccccccccccaaaggcucuuuucagagccaccagaauu

SEQ ID NO: 23278 - RNA, 4039 nt, Artificial Sequence
  SARS-CoV-2/Wuhan/WIV05/2019__EPI_ISL_402128 spike protein mRNA gc mod (1-1273)(S13I_W152C_L452R_D614G)
aggagaaagcuuaccauguucguguuucuggugcugcugccccugguguccauccagugugugaaccugaccaccagaacacagcugccuccagccuacaccaacagcuucaccagaggcguguacuaccccgacaagguguucagauccagcgugcugcacucuacccaggaccuguuccugccuuucuucagcaacgugaccugguuccacgccauccacguguccggcaccaauggcaccaagagauucgacaaccccgugcugcccuucaacgacgggguguacuuugccagcaccgagaaguccaacaucaucagaggcuggaucuucggcaccacacuggacagcaagacccagagccugcugaucgugaacaacgccaccaacguggucaucaaagugugcgaguuccaguucugcaacgaccccuuccugggcgucuacuaccacaagaacaacaagagcugcauggaaagcgaguuccggguguacagcagcgccaacaacugcaccuucgaguacgugucccagccuuuccugauggaccuggaaggcaagcagggcaacuucaagaaccugcgcgaguucguguucaagaacaucgacggcuacuucaaaaucuacagcaagcacaccccuaucaaccucgugcgggaucugccucagggcuucucugcucuggaaccccugguggaucugcccaucggcaucaacaucacccgguuucagacacugcuggcccugcacagaagcuaccugacaccuggcgauagcagcagcggauggacagcuggugccgccgcuuacuaugugggcuaccugcagccuagaaccuuccugcugaaguacaacgagaacggcaccaucaccgacgccguggauugugcucuggauccucugagcgagacaaagugcacccugaaguccuucaccguggaaaagggcaucuaccagaccagcaacuuccgggugcagcccaccgaauccaucgugcgguuccccaauaucaccaaucugugccccuucggcgagguguucaaugccaccagauucgccucuguguacgccuggaaccggaagcggaucagcaauugcguggccgacuacuccgugcuguacaacuccgccagcuucagcaccuucaagugcuacggcguguccccuaccaagcugaacgaccugugcuucacaaacguguacgccgacagcuucgugauccggggagaugaagugcggcagauugccccuggacagacaggcaagaucgccgacuacaacuacaagcugcccgacgacuucaccggcugugugauugccuggaacagcaacaaccuggacuccaaagucggcggcaacuacaauuaccgcuaccggcuguuccggaaguccaaucugaagcccuucgagcgggacaucagcaccgaaaucuaucaggccggcagcaccccuugcaacggcguggaaggcuucaacugcuacuucccacugcaguccuacggcuuucagcccacaaauggcgugggcuaucagcccuacagagugguggugcugagcuucgaacugcugcaugcuccugccacagugugcggcccuaagaaaagcaccaaucucgugaagaacaaaugcgugaacuucaacuucaacggccugaccggcaccggcgugcugacagagagcaacaagaaguuccugccauuccagcaguuuggccgggauaucgccgauaccacagacgccguuagagauccccagacacuggaaauccuggacaucaccccaugcagcuucggcggagugucugugaucaccccuggcaccaacaccagcaaucagguggcagugcuguaccagggcgugaacuguaccgaagugcccguggccauucacgccgaucagcugacaccuacauggcggguguacuccaccggcagcaauguguuucagaccagagccggcugucugaucggagccgagcacgugaacaauagcuacgagugcgacauccccaucggcgcuggcaucugugccagcuaccagacacagacaaacagccccagacgggcuagaagcguggccagccagagcaucauugccuacacaaugucucugggcgccgagaacagcguggccuacuccaacaacucuaucgcuauccccaccaacuucaccaucagcgugaccaccgagauccugccuguguccaugaccaagaccagcguggacugcaccauguacaucugcggcgauuccaccgagugcuccaaccugcugcugcaguacggcagcuucugcacccagcugaauagagcccugacagggaucgccguggaacaggacaagaacacccaagagguguucgcccaagugaagcaaaucuacaagaccccuccuaucaaggacuucggcggcuucaauuucagccagauucugcccgauccuagcaagcccagcaagcggagcuucaucgaggaccugcuguucaacaaagugacacuggccgacgccggcuucaucaagcaguauggcgauugucugggcgacauugccgccagggaucugauuugcgcccagaaguuuaacggacugacagugcugccuccucugcugaccgaugagaugaucgcccaguacacaucugcccugcuggccggcacaaucacaagcggcuggacauuuggagcuggcgccgcucugcagauccccuuugcuaugcagauggccuaccgguucaacggcaucggagugacccagaaugugcuguacgagaaccagaagcugaucgccaaccaguucaacagcgccaucggcaagauccaggacagccugagcagcacagcaagcgcccugggaaagcugcaggacguggucaaccagaaugcccaggcacugaacacccuggucaagcagcuguccuccaacuucggcgccaucagcucugugcugaacgauauccugagcagacuggacaaggucgaggccgaggugcagaucgacagacugaucacaggcagacugcagagccuccagacauacgugacccagcagcugaucagagccgccgagauuagagccucugccaaucuggccgccaccaagaugucugagugugugcugggccagagcaagagaguggacuuuugcggcaagggcuaccaccugaugagcuucccucagucugccccucacggcgugguguuucugcacgugacauaugugcccgcucaagagaagaauuucaccaccgcuccagccaucugccacgacggcaaagcccacuuuccuagagaaggcguguucguguccaacggcacccauugguucgugacacagcggaacuucuacgagccccagaucaucaccaccgacaacaccuucgugucuggcaacugcgacguugugaucggcauugugaacaauaccguguacgacccucugcagcccgagcuggacagcuucaaagaggaacuggacaaguacuuuaagaaccacacaagccccgacguggaccugggcgauaucagcggaaucaaugccagcgucgugaacauccagaaagagaucgaccggcugaacgagguggccaagaaucugaacgagagccugaucgaccugcaagaacuggggaaguacgagcaguacaucaaguggcccugguacaucuggcugggcuuuaucgccggacugauugccaucgugauggucacaaucaugcuguguugcaugaccagcugcuguagcugccugaagggcuguuguagcuguggcagcugcugcaaguucgacgaggacgauucugagcccgugcugaagggcgugaaacugcacuacaccugaggacuaguuauaagacugacuagcccgaugggccucccaacgggcccuccuccccuccuugcaccgagauuaauaaaaaaaaaaaaaaaaaaaaaaaaaaaaaaaaaaaaaaaaaaaaaaaaaaaaaaaaaaaaaaaaugcaucccccccccccccccccccccccccccccccaaaggcucuuuucagagccaccagaauu

SEQ ID NO: 23279 - RNA, 4039 nt, Artificial Sequence
  SARS-CoV-2/Wuhan/WIV05/2019__EPI_ISL_402128 spike protein mRNA gc mod (1-1273)
aggagaaagcuuaccauguucguguuccuggugcugcugccucugguguccagccagugugugaaccugaccaccagaacacagcugccuccagccuacaccaacagcuuuaccagaggcguguacuaccccgacaagguguucagauccagcgugcugcacucuacccaggaccuguuccugccuuucuucagcaacgugaccugguuccacgccauccacguguccggcaccaauggcaccaagagauucgacaaccccgugcugcccuucaacgacgggguguacuuugccagcaccgagaaguccaacaucaucagaggcuggaucuucggcaccacacuggacagcaagacccagagccugcugaucgugaacaacgccaccaacguggucaucaaagugugcgaguuccaguucugcaacgaccccuuccugggcgucuacuaccacaagaacaacaagagcuggauggaaagcgaguuccggguguacagcagcgccaacaacugcaccuucgaguacgugucccagccuuuccugauggaccuggaaggcaagcagggcaacuucaagaaccugcgcgaguucguguuuaagaacaucgacggcuacuucaagaucuacagcaagcacaccccuaucaaccucgugcgggaucugccucagggcuucucugcucuggaaccccugguggaucugcccaucggcaucaacaucacccgguuucagacacugcuggcccugcacagaagcuaccugacaccuggcgauagcagcagcggauggacagcuggugccgccgcuuacuaugugggcuaccugcagccuagaaccuuccugcugaaguacaacgagaacggcaccaucaccgacgccguggauugugcucuggauccucugagcgagacaaagugcacccugaaguccuucaccguggaaaagggcaucuaccagaccagcaacuuccgggugcagcccaccgaauccaucgugcgguuccccaauaucaccaaucugugccccuucggcgagguguucaaugccaccagauucgccucuguguacgccuggaaccggaagcggaucagcaauugcguggccgacuacuccgugcuguacaacuccgccagcuucagcaccuucaagugcuacggcguguccccuaccaagcugaacgaccugugcuucacaaacguguacgccgacagcuucgugauccggggagaugaagugcggcagauugccccuggacagacaggcaagaucgccgacuacaacuacaagcugcccgacgacuucaccggcugugugauugccuggaacagcaacaaccuggacuccaaagucggcggcaacuacaauuaccuguaccggcuguuccggaaguccaaucugaagcccuucgagcgggacaucuccaccgagaucuaucaggccggcagcaccccuuguaacggcguggaaggcuucaacugcuacuucccacugcaguccuacggcuuucagcccacaaauggcgugggcuaucagcccuacagagugguggugcugagcuucgaacugcugcaugccccugccacagugugcggcccuaagaaaagcaccaaucucgugaagaacaaaugcgugaacuucaacuucaacggccugaccggcaccggcgugcugacagagagcaacaagaaguuccugccauuccagcaguuuggccgggauaucgccgauaccacagacgccguuagagauccccagacacuggaaauccuggacaucaccccuugcagcuucggcggagugucugugaucaccccuggcaccaacaccagcaaucagguggcagugcuguaccaggacgugaacuguaccgaagugcccguggccauucacgccgaucagcugacaccuacauggcggguguacuccaccggcagcaauguguuucagaccagagccggcugucugaucggagccgagcacgugaacaauagcuacgagugcgacauccccaucggcgcuggaaucugcgccagcuaccagacacagacaaacagcccucggagagccagaagcguggccagccagagcaucauugccuacacaaugucucugggcgccgagaacagcguggccuacuccaacaacucuaucgcuauccccaccaacuucaccaucagcgugaccacagagauccugccuguguccaugaccaagaccagcguggacugcaccauguacaucugcggcgauuccaccgagugcuccaaccugcugcugcaguacggcagcuucugcacccagcugaauagagcccugacagggaucgccguggaacaggacaagaacacccaagagguguucgcccaagugaagcagaucuacaagaccccuccuaucaaggacuucggcggcuucaauuucagccagauucugcccgauccuagcaagcccagcaagcggagcuucaucgaggaccugcuguucaacaaagugacacuggccgacgccggcuucaucaagcaguauggcgauugucugggcgacauugccgccagggaucugauuugcgcccagaaguuuaacggacugacagugcugccuccucugcugaccgaugagaugaucgcccaguacacaucugcccugcuggccggcacaaucacaagcggcuggacauuuggagcaggcgccgcucugcagauccccuuugcuaugcagauggccuaccgguucaacggcaucggagugacccagaaugugcuguacgagaaccagaagcugaucgccaaccaguucaacagcgccaucggcaagauccaggacagccugagcagcacagcaagcgcccugggaaagcugcaggacguggucaaccagaaugcccaggcacugaacacccuggucaagcagcuguccuccaacuucggcgccaucagcucugugcugaacgauauccugagcagacuggacaaggucgaggccgaggugcagaucgacagacugaucacaggcagacugcagagccuccagacauacgugacccagcagcugaucagagccgccgagauuagagccucugccaaucuggccgccaccaagaugucugagugugugcugggccagagcaagagaguggacuuuugcggcaagggcuaccaccugaugagcuucccucagucugccccucacggcgugguguuucugcacgugacauaugugcccgcucaagagaagaauuucaccaccgcuccagccaucugccacgacggcaaagcccacuuuccuagagaaggcguguucguguccaacggcacccauugguucgugacacagcggaacuucuacgagccccagaucaucaccaccgacaacaccuucgugucuggcaacugcgacgucgugaucggcauugugaacaauaccguguacgacccucugcagcccgagcuggacagcuucaaagaggaacuggacaaguacuuuaagaaccacacaagccccgacguggaccugggcgauaucagcggaaucaaugccagcgucgugaacauccagaaagagaucgaccggcugaacgagguggccaagaaucugaacgagagccugaucgaccugcaagaacuggggaaguacgagcaguacaucaaguggcccugguacaucuggcugggcuuuaucgccggacugauugccaucgugauggucacaaucaugcuguguugcaugaccagcugcuguagcugccugaagggcuguuguagcuguggcagcugcugcaaguucgacgaggacgauucugagcccgugcugaagggcgugaaacugcacuacacaugaggacuaguuauaagacugacuagcccgaugggccucccaacgggcccuccuccccuccuugcaccgagauuaauaaaaaaaaaaaaaaaaaaaaaaaaaaaaaaaaaaaaaaaaaaaaaaaaaaaaaaaaaaaaaaaaugcaucccccccccccccccccccccccccccccccaaaggcucuuuucagagccaccagaauu

SEQ ID NO: 23280 - RNA, 4039 nt, Artificial Sequence
  SARS-CoV-2/Wuhan/WIV05/2019__EPI_ISL_402128 spike protein mRNA gc mod (1-1273)(D614G)
aggagaaagcuuaccauguucguguuccuggugcugcugccucugguguccagccagugugugaaccugaccaccagaacacagcugccuccagccuacaccaacagcuuuaccagaggcguguacuaccccgacaagguguucagauccagcgugcugcacucuacccaggaccuguuccugccuuucuucagcaacgugaccugguuccacgccauccacguguccggcaccaauggcaccaagagauucgacaaccccgugcugcccuucaacgacgggguguacuuugccagcaccgagaaguccaacaucaucagaggcuggaucuucggcaccacacuggacagcaagacccagagccugcugaucgugaacaacgccaccaacguggucaucaaagugugcgaguuccaguucugcaacgaccccuuccugggcgucuacuaccacaagaacaacaagagcuggauggaaagcgaguuccggguguacagcagcgccaacaacugcaccuucgaguacgugucccagccuuuccugauggaccuggaaggcaagcagggcaacuucaagaaccugcgcgaguucguguuuaagaacaucgacggcuacuucaagaucuacagcaagcacaccccuaucaaccucgugcgggaucugccucagggcuucucugcucuggaaccccugguggaucugcccaucggcaucaacaucacccgguuucagacacugcuggcccugcacagaagcuaccugacaccuggcgauagcagcagcggauggacagcuggugccgccgcuuacuaugugggcuaccugcagccuagaaccuuccugcugaaguacaacgagaacggcaccaucaccgacgccguggauugugcucuggauccucugagcgagacaaagugcacccugaaguccuucaccguggaaaagggcaucuaccagaccagcaacuuccgggugcagcccaccgaauccaucgugcgguuccccaauaucaccaaucugugccccuucggcgagguguucaaugccaccagauucgccucuguguacgccuggaaccggaagcggaucagcaauugcguggccgacuacuccgugcuguacaacuccgccagcuucagcaccuucaagugcuacggcguguccccuaccaagcugaacgaccugugcuucacaaacguguacgccgacagcuucgugauccggggagaugaagugcggcagauugccccuggacagacaggcaagaucgccgacuacaacuacaagcugcccgacgacuucaccggcugugugauugccuggaacagcaacaaccuggacuccaaagucggcggcaacuacaauuaccuguaccggcuguuccggaaguccaaucugaagcccuucgagcgggacaucuccaccgagaucuaucaggccggcagcaccccuuguaacggcguggaaggcuucaacugcuacuucccacugcaguccuacggcuuucagcccacaaauggcgugggcuaucagcccuacagagugguggugcugagcuucgaacugcugcaugccccugccacagugugcggcccuaagaaaagcaccaaucucgugaagaacaaaugcgugaacuucaacuucaacggccugaccggcaccggcgugcugacagagagcaacaagaaguuccugccauuccagcaguuuggccgggauaucgccgauaccacagacgccguuagagauccccagacacuggaaauccuggacaucaccccuugcagcuucggcggagugucugugaucaccccuggcaccaacaccagcaaucagguggcagugcuguaccagggcgugaacuguaccgaagugcccguggccauucacgccgaucagcugacaccuacauggcggguguacuccaccggcagcaauguguuucagaccagagccggcugucugaucggagccgagcacgugaacaauagcuacgagugcgacauccccaucggcgcuggaaucugcgccagcuaccagacacagacaaacagcccucggagagccagaagcguggccagccagagcaucauugccuacacaaugucucugggcgccgagaacagcguggccuacuccaacaacucuaucgcuauccccaccaacuucaccaucagcgugaccacagagauccugccuguguccaugaccaagaccagcguggacugcaccauguacaucugcggcgauuccaccgagugcuccaaccugcugcugcaguacggcagcuucugcacccagcugaauagagcccugacagggaucgccguggaacaggacaagaacacccaagagguguucgcccaagugaagcagaucuacaagaccccuccuaucaaggacuucggcggcuucaauuucagccagauucugcccgauccuagcaagcccagcaagcggagcuucaucgaggaccugcuguucaacaaagugacacuggccgacgccggcuucaucaagcaguauggcgauugucugggcgacauugccgccagggaucugauuugcgcccagaaguuuaacggacugacagugcugccuccucugcugaccgaugagaugaucgcccaguacacaucugcccugcuggccggcacaaucacaagcggcuggacauuuggagcaggcgccgcucugcagauccccuuugcuaugcagauggccuaccgguucaacggcaucggagugacccagaaugugcuguacgagaaccagaagcugaucgccaaccaguucaacagcgccaucggcaagauccaggacagccugagcagcacagcaagcgcccugggaaagcugcaggacguggucaaccagaaugcccaggcacugaacacccuggucaagcagcuguccuccaacuucggcgccaucagcucugugcugaacgauauccugagcagacuggacaaggucgaggccgaggugcagaucgacagacugaucacaggcagacugcagagccuccagacauacgugacccagcagcugaucagagccgccgagauuagagccucugccaaucuggccgccaccaagaugucugagugugugcugggccagagcaagagaguggacuuuugcggcaagggcuaccaccugaugagcuucccucagucugccccucacggcgugguguuucugcacgugacauaugugcccgcucaagagaagaauuucaccaccgcuccagccaucugccacgacggcaaagcccacuuuccuagagaaggcguguucguguccaacggcacccauugguucgugacacagcggaacuucuacgagccccagaucaucaccaccgacaacaccuucgugucuggcaacugcgacgucgugaucggcauugugaacaauaccguguacgacccucugcagcccgagcuggacagcuucaaagaggaacuggacaaguacuuuaagaaccacacaagccccgacguggaccugggcgauaucagcggaaucaaugccagcgucgugaacauccagaaagagaucgaccggcugaacgagguggccaagaaucugaacgagagccugaucgaccugcaagaacuggggaaguacgagcaguacaucaaguggcccugguacaucuggcugggcuuuaucgccggacugauugccaucgugauggucacaaucaugcuguguugcaugaccagcugcuguagcugccugaagggcuguuguagcuguggcagcugcugcaaguucgacgaggacgauucugagcccgugcugaagggcgugaaacugcacuacacaugaggacuaguuauaagacugacuagcccgaugggccucccaacgggcccuccuccccuccuugcaccgagauuaauaaaaaaaaaaaaaaaaaaaaaaaaaaaaaaaaaaaaaaaaaaaaaaaaaaaaaaaaaaaaaaaaugcaucccccccccccccccccccccccccccccccaaaggcucuuuucagagccaccagaauu

SEQ ID NO: 23281 - RNA, 4039 nt, Artificial Sequence
  SARS-CoV-2/Wuhan/WIV05/2019__EPI_ISL_402128 spike protein mRNA gc mod (1-1273)(A222V_D614G)
aggagaaagcuuaccauguucguguuccuggugcugcugccucugguguccagccagugugugaaccugaccaccagaacacagcugccuccagccuacaccaacagcuuuaccagaggcguguacuaccccgacaagguguucagauccagcgugcugcacucuacccaggaccuguuccugccuuucuucagcaacgugaccugguuccacgccauccacguguccggcaccaauggcaccaagagauucgacaaccccgugcugcccuucaacgacgggguguacuuugccagcaccgagaaguccaacaucaucagaggcuggaucuucggcaccacacuggacagcaagacccagagccugcugaucgugaacaacgccaccaacguggucaucaaagugugcgaguuccaguucugcaacgaccccuuccugggcgucuacuaccacaagaacaacaagagcuggauggaaagcgaguuccggguguacagcagcgccaacaacugcaccuucgaguacgugucccagccuuuccugauggaccuggaaggcaagcagggcaacuucaagaaccugcgcgaguucguguuuaagaacaucgacggcuacuucaagaucuacagcaagcacaccccuaucaaccucgugcgggaucugccucagggcuucucugugcuggaaccccugguggaucugcccaucggcaucaacaucacccgguuucagacacugcuggcccugcacagaagcuaccugacaccuggcgauagcagcagcggauggacagcuggugccgccgcuuacuaugugggcuaccugcagccuagaaccuuccugcugaaguacaacgagaacggcaccaucaccgacgccguggauugugcucuggauccucugagcgagacaaagugcacccugaaguccuucaccguggaaaagggcaucuaccagaccagcaacuuccgggugcagcccaccgaauccaucgugcgguuccccaauaucaccaaucugugccccuucggcgagguguucaaugccaccagauucgccucuguguacgccuggaaccggaagcggaucagcaauugcguggccgacuacuccgugcuguacaacuccgccagcuucagcaccuucaagugcuacggcguguccccuaccaagcugaacgaccugugcuucacaaacguguacgccgacagcuucgugauccggggagaugaagugcggcagauugccccuggacagacaggcaagaucgccgacuacaacuacaagcugcccgacgacuucaccggcugugugauugccuggaacagcaacaaccuggacuccaaagucggcggcaacuacaauuaccuguaccggcuguuccggaaguccaaucugaagcccuucgagcgggacaucuccaccgagaucuaucaggccggcagcaccccuuguaacggcguggaaggcuucaacugcuacuucccacugcaguccuacggcuuucagcccacaaauggcgugggcuaucagcccuacagagugguggugcugagcuucgaacugcugcaugccccugccacagugugcggcccuaagaaaagcaccaaucucgugaagaacaaaugcgugaacuucaacuucaacggccugaccggcaccggcgugcugacagagagcaacaagaaguuccugccauuccagcaguuuggccgggauaucgccgauaccacagacgccguuagagauccccagacacuggaaauccuggacaucaccccuugcagcuucggcggagugucugugaucaccccuggcaccaacaccagcaaucagguggcagugcuguaccagggcgugaacuguaccgaagugcccguggccauucacgccgaucagcugacaccuacauggcggguguacuccaccggcagcaauguguuucagaccagagccggcugucugaucggagccgagcacgugaacaauagcuacgagugcgacauccccaucggcgcuggaaucugcgccagcuaccagacacagacaaacagcccucggagagccagaagcguggccagccagagcaucauugccuacacaaugucucugggcgccgagaacagcguggccuacuccaacaacucuaucgcuauccccaccaacuucaccaucagcgugaccacagagauccugccuguguccaugaccaagaccagcguggacugcaccauguacaucugcggcgauuccaccgagugcuccaaccugcugcugcaguacggcagcuucugcacccagcugaauagagcccugacagggaucgccguggaacaggacaagaacacccaagagguguucgcccaagugaagcagaucuacaagaccccuccuaucaaggacuucggcggcuucaauuucagccagauucugcccgauccuagcaagcccagcaagcggagcuucaucgaggaccugcuguucaacaaagugacacuggccgacgccggcuucaucaagcaguauggcgauugucugggcgacauugccgccagggaucugauuugcgcccagaaguuuaacggacugacagugcugccuccucugcugaccgaugagaugaucgcccaguacacaucugcccugcuggccggcacaaucacaagcggcuggacauuuggagcaggcgccgcucugcagauccccuuugcuaugcagauggccuaccgguucaacggcaucggagugacccagaaugugcuguacgagaaccagaagcugaucgccaaccaguucaacagcgccaucggcaagauccaggacagccugagcagcacagcaagcgcccugggaaagcugcaggacguggucaaccagaaugcccaggcacugaacacccuggucaagcagcuguccuccaacuucggcgccaucagcucugugcugaacgauauccugagcagacuggacaaggucgaggccgaggugcagaucgacagacugaucacaggcagacugcagagccuccagacauacgugacccagcagcugaucagagccgccgagauuagagccucugccaaucuggccgccaccaagaugucugagugugugcugggccagagcaagagaguggacuuuugcggcaagggcuaccaccugaugagcuucccucagucugccccucacggcgugguguuucugcacgugacauaugugcccgcucaagagaagaauuucaccaccgcuccagccaucugccacgacggcaaagcccacuuuccuagagaaggcguguucguguccaacggcacccauugguucgugacacagcggaacuucuacgagccccagaucaucaccaccgacaacaccuucgugucuggcaacugcgacgucgugaucggcauugugaacaauaccguguacgacccucugcagcccgagcuggacagcuucaaagaggaacuggacaaguacuuuaagaaccacacaagccccgacguggaccugggcgauaucagcggaaucaaugccagcgucgugaacauccagaaagagaucgaccggcugaacgagguggccaagaaucugaacgagagccugaucgaccugcaagaacuggggaaguacgagcaguacaucaaguggcccugguacaucuggcugggcuuuaucgccggacugauugccaucgugauggucacaaucaugcuguguugcaugaccagcugcuguagcugccugaagggcuguuguagcuguggcagcugcugcaaguucgacgaggacgauucugagcccgugcugaagggcgugaaacugcacuacacaugaggacuaguuauaagacugacuagcccgaugggccucccaacgggcccuccuccccuccuugcaccgagauuaauaaaaaaaaaaaaaaaaaaaaaaaaaaaaaaaaaaaaaaaaaaaaaaaaaaaaaaaaaaaaaaaaugcaucccccccccccccccccccccccccccccccaaaggcucuuuucagagccaccagaauu

SEQ ID NO: 23282 - RNA, 4039 nt, Artificial Sequence
  SARS-CoV-2/Wuhan/WIV05/2019__EPI_ISL_402128 spike protein mRNA gc mod (1-1273)(N439K_D614G)
aggagaaagcuuaccauguucguguuccuggugcugcugccucugguguccagccagugugugaaccugaccaccagaacacagcugccuccagccuacaccaacagcuuuaccagaggcguguacuaccccgacaagguguucagauccagcgugcugcacucuacccaggaccuguuccugccuuucuucagcaacgugaccugguuccacgccauccacguguccggcaccaauggcaccaagagauucgacaaccccgugcugcccuucaacgacgggguguacuuugccagcaccgagaaguccaacaucaucagaggcuggaucuucggcaccacacuggacagcaagacccagagccugcugaucgugaacaacgccaccaacguggucaucaaagugugcgaguuccaguucugcaacgaccccuuccugggcgucuacuaccacaagaacaacaagagcuggauggaaagcgaguuccggguguacagcagcgccaacaacugcaccuucgaguacgugucccagccuuuccugauggaccuggaaggcaagcagggcaacuucaagaaccugcgcgaguucguguuuaagaacaucgacggcuacuucaagaucuacagcaagcacaccccuaucaaccucgugcgggaucugccucagggcuucucugcucuggaaccccugguggaucugcccaucggcaucaacaucacccgguuucagacacugcuggcccugcacagaagcuaccugacaccuggcgauagcagcagcggauggacagcuggugccgccgcuuacuaugugggcuaccugcagccuagaaccuuccugcugaaguacaacgagaacggcaccaucaccgacgccguggauugugcucuggauccucugagcgagacaaagugcacccugaaguccuucaccguggaaaagggcaucuaccagaccagcaacuuccgggugcagcccaccgaauccaucgugcgguuccccaauaucaccaaucugugccccuucggcgagguguucaaugccaccagauucgccucuguguacgccuggaaccggaagcggaucagcaauugcguggccgacuacuccgugcuguacaacuccgccagcuucagcaccuucaagugcuacggcguguccccuaccaagcugaacgaccugugcuucacaaacguguacgccgacagcuucgugauccggggagaugaagugcggcagauugccccuggacagacaggcaagaucgccgacuacaacuacaagcugcccgacgacuucaccggcugugugauugccuggaacagcaagaaccuggacuccaaagucggcggcaacuacaauuaccuguaccggcuguuccggaaguccaaucugaagcccuucgagcgggacaucuccaccgagaucuaucaggccggcagcaccccuuguaacggcguggaaggcuucaacugcuacuucccacugcaguccuacggcuuucagcccacaaauggcgugggcuaucagcccuacagagugguggugcugagcuucgaacugcugcaugccccugccacagugugcggcccuaagaaaagcaccaaucucgugaagaacaaaugcgugaacuucaacuucaacggccugaccggcaccggcgugcugacagagagcaacaagaaguuccugccauuccagcaguuuggccgggauaucgccgauaccacagacgccguuagagauccccagacacuggaaauccuggacaucaccccuugcagcuucggcggagugucugugaucaccccuggcaccaacaccagcaaucagguggcagugcuguaccagggcgugaacuguaccgaagugcccguggccauucacgccgaucagcugacaccuacauggcggguguacuccaccggcagcaauguguuucagaccagagccggcugucugaucggagccgagcacgugaacaauagcuacgagugcgacauccccaucggcgcuggaaucugcgccagcuaccagacacagacaaacagcccucggagagccagaagcguggccagccagagcaucauugccuacacaaugucucugggcgccgagaacagcguggccuacuccaacaacucuaucgcuauccccaccaacuucaccaucagcgugaccacagagauccugccuguguccaugaccaagaccagcguggacugcaccauguacaucugcggcgauuccaccgagugcuccaaccugcugcugcaguacggcagcuucugcacccagcugaauagagcccugacagggaucgccguggaacaggacaagaacacccaagagguguucgcccaagugaagcagaucuacaagaccccuccuaucaaggacuucggcggcuucaauuucagccagauucugcccgauccuagcaagcccagcaagcggagcuucaucgaggaccugcuguucaacaaagugacacuggccgacgccggcuucaucaagcaguauggcgauugucugggcgacauugccgccagggaucugauuugcgcccagaaguuuaacggacugacagugcugccuccucugcugaccgaugagaugaucgcccaguacacaucugcccugcuggccggcacaaucacaagcggcuggacauuuggagcaggcgccgcucugcagauccccuuugcuaugcagauggccuaccgguucaacggcaucggagugacccagaaugugcuguacgagaaccagaagcugaucgccaaccaguucaacagcgccaucggcaagauccaggacagccugagcagcacagcaagcgcccugggaaagcugcaggacguggucaaccagaaugcccaggcacugaacacccuggucaagcagcuguccuccaacuucggcgccaucagcucugugcugaacgauauccugagcagacuggacaaggucgaggccgaggugcagaucgacagacugaucacaggcagacugcagagccuccagacauacgugacccagcagcugaucagagccgccgagauuagagccucugccaaucuggccgccaccaagaugucugagugugugcugggccagagcaagagaguggacuuuugcggcaagggcuaccaccugaugagcuucccucagucugccccucacggcgugguguuucugcacgugacauaugugcccgcucaagagaagaauuucaccaccgcuccagccaucugccacgacggcaaagcccacuuuccuagagaaggcguguucguguccaacggcacccauugguucgugacacagcggaacuucuacgagccccagaucaucaccaccgacaacaccuucgugucuggcaacugcgacgucgugaucggcauugugaacaauaccguguacgacccucugcagcccgagcuggacagcuucaaagaggaacuggacaaguacuuuaagaaccacacaagccccgacguggaccugggcgauaucagcggaaucaaugccagcgucgugaacauccagaaagagaucgaccggcugaacgagguggccaagaaucugaacgagagccugaucgaccugcaagaacuggggaaguacgagcaguacaucaaguggcccugguacaucuggcugggcuuuaucgccggacugauugccaucgugauggucacaaucaugcuguguugcaugaccagcugcuguagcugccugaagggcuguuguagcuguggcagcugcugcaaguucgacgaggacgauucugagcccgugcugaagggcgugaaacugcacuacacaugaggacuaguuauaagacugacuagcccgaugggccucccaacgggcccuccuccccuccuugcaccgagauuaauaaaaaaaaaaaaaaaaaaaaaaaaaaaaaaaaaaaaaaaaaaaaaaaaaaaaaaaaaaaaaaaaugcaucccccccccccccccccccccccccccccccaaaggcucuuuucagagccaccagaauu

SEQ ID NO: 23283 - RNA, 4039 nt, Artificial Sequence
  SARS-CoV-2/Wuhan/WIV05/2019__EPI_ISL_402128 spike protein mRNA gc mod (1-1273)(S477N_D614G)
aggagaaagcuuaccauguucguguuccuggugcugcugccucugguguccagccagugugugaaccugaccaccagaacacagcugccuccagccuacaccaacagcuuuaccagaggcguguacuaccccgacaagguguucagauccagcgugcugcacucuacccaggaccuguuccugccuuucuucagcaacgugaccugguuccacgccauccacguguccggcaccaauggcaccaagagauucgacaaccccgugcugcccuucaacgacgggguguacuuugccagcaccgagaaguccaacaucaucagaggcuggaucuucggcaccacacuggacagcaagacccagagccugcugaucgugaacaacgccaccaacguggucaucaaagugugcgaguuccaguucugcaacgaccccuuccugggcgucuacuaccacaagaacaacaagagcuggauggaaagcgaguuccggguguacagcagcgccaacaacugcaccuucgaguacgugucccagccuuuccugauggaccuggaaggcaagcagggcaacuucaagaaccugcgcgaguucguguuuaagaacaucgacggcuacuucaagaucuacagcaagcacaccccuaucaaccucgugcgggaucugccucagggcuucucugcucuggaaccccugguggaucugcccaucggcaucaacaucacccgguuucagacacugcuggcccugcacagaagcuaccugacaccuggcgauagcagcagcggauggacagcuggugccgccgcuuacuaugugggcuaccugcagccuagaaccuuccugcugaaguacaacgagaacggcaccaucaccgacgccguggauugugcucuggauccucugagcgagacaaagugcacccugaaguccuucaccguggaaaagggcaucuaccagaccagcaacuuccgggugcagcccaccgaauccaucgugcgguuccccaauaucaccaaucugugccccuucggcgagguguucaaugccaccagauucgccucuguguacgccuggaaccggaagcggaucagcaauugcguggccgacuacuccgugcuguacaacuccgccagcuucagcaccuucaagugcuacggcguguccccuaccaagcugaacgaccugugcuucacaaacguguacgccgacagcuucgugauccggggagaugaagugcggcagauugccccuggacagacaggcaagaucgccgacuacaacuacaagcugcccgacgacuucaccggcugugugauugccuggaacagcaacaaccuggacuccaaagucggcggcaacuacaauuaccuguaccggcuguuccggaaguccaaucugaagcccuucgagcgggacaucuccaccgagaucuaucaggccggcaacaccccuuguaacggcguggaaggcuucaacugcuacuucccacugcaguccuacggcuuucagcccacaaauggcgugggcuaucagcccuacagagugguggugcugagcuucgaacugcugcaugccccugccacagugugcggcccuaagaaaagcaccaaucucgugaagaacaaaugcgugaacuucaacuucaacggccugaccggcaccggcgugcugacagagagcaacaagaaguuccugccauuccagcaguuuggccgggauaucgccgauaccacagacgccguuagagauccccagacacuggaaauccuggacaucaccccuugcagcuucggcggagugucugugaucaccccuggcaccaacaccagcaaucagguggcagugcuguaccagggcgugaacuguaccgaagugcccguggccauucacgccgaucagcugacaccuacauggcggguguacuccaccggcagcaauguguuucagaccagagccggcugucugaucggagccgagcacgugaacaauagcuacgagugcgacauccccaucggcgcuggaaucugcgccagcuaccagacacagacaaacagcccucggagagccagaagcguggccagccagagcaucauugccuacacaaugucucugggcgccgagaacagcguggccuacuccaacaacucuaucgcuauccccaccaacuucaccaucagcgugaccacagagauccugccuguguccaugaccaagaccagcguggacugcaccauguacaucugcggcgauuccaccgagugcuccaaccugcugcugcaguacggcagcuucugcacccagcugaauagagcccugacagggaucgccguggaacaggacaagaacacccaagagguguucgcccaagugaagcagaucuacaagaccccuccuaucaaggacuucggcggcuucaauuucagccagauucugcccgauccuagcaagcccagcaagcggagcuucaucgaggaccugcuguucaacaaagugacacuggccgacgccggcuucaucaagcaguauggcgauugucugggcgacauugccgccagggaucugauuugcgcccagaaguuuaacggacugacagugcugccuccucugcugaccgaugagaugaucgcccaguacacaucugcccugcuggccggcacaaucacaagcggcuggacauuuggagcaggcgccgcucugcagauccccuuugcuaugcagauggccuaccgguucaacggcaucggagugacccagaaugugcuguacgagaaccagaagcugaucgccaaccaguucaacagcgccaucggcaagauccaggacagccugagcagcacagcaagcgcccugggaaagcugcaggacguggucaaccagaaugcccaggcacugaacacccuggucaagcagcuguccuccaacuucggcgccaucagcucugugcugaacgauauccugagcagacuggacaaggucgaggccgaggugcagaucgacagacugaucacaggcagacugcagagccuccagacauacgugacccagcagcugaucagagccgccgagauuagagccucugccaaucuggccgccaccaagaugucugagugugugcugggccagagcaagagaguggacuuuugcggcaagggcuaccaccugaugagcuucccucagucugccccucacggcgugguguuucugcacgugacauaugugcccgcucaagagaagaauuucaccaccgcuccagccaucugccacgacggcaaagcccacuuuccuagagaaggcguguucguguccaacggcacccauugguucgugacacagcggaacuucuacgagccccagaucaucaccaccgacaacaccuucgugucuggcaacugcgacgucgugaucggcauugugaacaauaccguguacgacccucugcagcccgagcuggacagcuucaaagaggaacuggacaaguacuuuaagaaccacacaagccccgacguggaccugggcgauaucagcggaaucaaugccagcgucgugaacauccagaaagagaucgaccggcugaacgagguggccaagaaucugaacgagagccugaucgaccugcaagaacuggggaaguacgagcaguacaucaaguggcccugguacaucuggcugggcuuuaucgccggacugauugccaucgugauggucacaaucaugcuguguugcaugaccagcugcuguagcugccugaagggcuguuguagcuguggcagcugcugcaaguucgacgaggacgauucugagcccgugcugaagggcgugaaacugcacuacacaugaggacuaguuauaagacugacuagcccgaugggccucccaacgggcccuccuccccuccuugcaccgagauuaauaaaaaaaaaaaaaaaaaaaaaaaaaaaaaaaaaaaaaaaaaaaaaaaaaaaaaaaaaaaaaaaaugcaucccccccccccccccccccccccccccccccaaaggcucuuuucagagccaccagaauu

SEQ ID NO: 23284 - RNA, 4039 nt, Artificial Sequence
  SARS-CoV-2/Wuhan/WIV05/2019__EPI_ISL_402128 spike protein mRNA gc mod (1-1273)(N501Y_D614G)
aggagaaagcuuaccauguucguguuccuggugcugcugccucugguguccagccagugugugaaccugaccaccagaacacagcugccuccagccuacaccaacagcuuuaccagaggcguguacuaccccgacaagguguucagauccagcgugcugcacucuacccaggaccuguuccugccuuucuucagcaacgugaccugguuccacgccauccacguguccggcaccaauggcaccaagagauucgacaaccccgugcugcccuucaacgacgggguguacuuugccagcaccgagaaguccaacaucaucagaggcuggaucuucggcaccacacuggacagcaagacccagagccugcugaucgugaacaacgccaccaacguggucaucaaagugugcgaguuccaguucugcaacgaccccuuccugggcgucuacuaccacaagaacaacaagagcuggauggaaagcgaguuccggguguacagcagcgccaacaacugcaccuucgaguacgugucccagccuuuccugauggaccuggaaggcaagcagggcaacuucaagaaccugcgcgaguucguguuuaagaacaucgacggcuacuucaagaucuacagcaagcacaccccuaucaaccucgugcgggaucugccucagggcuucucugcucuggaaccccugguggaucugcccaucggcaucaacaucacccgguuucagacacugcuggcccugcacagaagcuaccugacaccuggcgauagcagcagcggauggacagcuggugccgccgcuuacuaugugggcuaccugcagccuagaaccuuccugcugaaguacaacgagaacggcaccaucaccgacgccguggauugugcucuggauccucugagcgagacaaagugcacccugaaguccuucaccguggaaaagggcaucuaccagaccagcaacuuccgggugcagcccaccgaauccaucgugcgguuccccaauaucaccaaucugugccccuucggcgagguguucaaugccaccagauucgccucuguguacgccuggaaccggaagcggaucagcaauugcguggccgacuacuccgugcuguacaacuccgccagcuucagcaccuucaagugcuacggcguguccccuaccaagcugaacgaccugugcuucacaaacguguacgccgacagcuucgugauccggggagaugaagugcggcagauugccccuggacagacaggcaagaucgccgacuacaacuacaagcugcccgacgacuucaccggcugugugauugccuggaacagcaacaaccuggacuccaaagucggcggcaacuacaauuaccuguaccggcuguuccggaaguccaaucugaagcccuucgagcgggacaucuccaccgagaucuaucaggccggcagcaccccuuguaacggcguggaaggcuucaacugcuacuucccacugcaguccuacggcuuucagcccacauacggcgugggcuaucagcccuacagagugguggugcugagcuucgaacugcugcaugccccugccacagugugcggcccuaagaaaagcaccaaucucgugaagaacaaaugcgugaacuucaacuucaacggccugaccggcaccggcgugcugacagagagcaacaagaaguuccugccauuccagcaguuuggccgggauaucgccgauaccacagacgccguuagagauccccagacacuggaaauccuggacaucaccccuugcagcuucggcggagugucugugaucaccccuggcaccaacaccagcaaucagguggcagugcuguaccagggcgugaacuguaccgaagugcccguggccauucacgccgaucagcugacaccuacauggcggguguacuccaccggcagcaauguguuucagaccagagccggcugucugaucggagccgagcacgugaacaauagcuacgagugcgacauccccaucggcgcuggaaucugcgccagcuaccagacacagacaaacagcccucggagagccagaagcguggccagccagagcaucauugccuacacaaugucucugggcgccgagaacagcguggccuacuccaacaacucuaucgcuauccccaccaacuucaccaucagcgugaccacagagauccugccuguguccaugaccaagaccagcguggacugcaccauguacaucugcggcgauuccaccgagugcuccaaccugcugcugcaguacggcagcuucugcacccagcugaauagagcccugacagggaucgccguggaacaggacaagaacacccaagagguguucgcccaagugaagcagaucuacaagaccccuccuaucaaggacuucggcggcuucaauuucagccagauucugcccgauccuagcaagcccagcaagcggagcuucaucgaggaccugcuguucaacaaagugacacuggccgacgccggcuucaucaagcaguauggcgauugucugggcgacauugccgccagggaucugauuugcgcccagaaguuuaacggacugacagugcugccuccucugcugaccgaugagaugaucgcccaguacacaucugcccugcuggccggcacaaucacaagcggcuggacauuuggagcaggcgccgcucugcagauccccuuugcuaugcagauggccuaccgguucaacggcaucggagugacccagaaugugcuguacgagaaccagaagcugaucgccaaccaguucaacagcgccaucggcaagauccaggacagccugagcagcacagcaagcgcccugggaaagcugcaggacguggucaaccagaaugcccaggcacugaacacccuggucaagcagcuguccuccaacuucggcgccaucagcucugugcugaacgauauccugagcagacuggacaaggucgaggccgaggugcagaucgacagacugaucacaggcagacugcagagccuccagacauacgugacccagcagcugaucagagccgccgagauuagagccucugccaaucuggccgccaccaagaugucugagugugugcugggccagagcaagagaguggacuuuugcggcaagggcuaccaccugaugagcuucccucagucugccccucacggcgugguguuucugcacgugacauaugugcccgcucaagagaagaauuucaccaccgcuccagccaucugccacgacggcaaagcccacuuuccuagagaaggcguguucguguccaacggcacccauugguucgugacacagcggaacuucuacgagccccagaucaucaccaccgacaacaccuucgugucuggcaacugcgacgucgugaucggcauugugaacaauaccguguacgacccucugcagcccgagcuggacagcuucaaagaggaacuggacaaguacuuuaagaaccacacaagccccgacguggaccugggcgauaucagcggaaucaaugccagcgucgugaacauccagaaagagaucgaccggcugaacgagguggccaagaaucugaacgagagccugaucgaccugcaagaacuggggaaguacgagcaguacaucaaguggcccugguacaucuggcugggcuuuaucgccggacugauugccaucgugauggucacaaucaugcuguguugcaugaccagcugcuguagcugccugaagggcuguuguagcuguggcagcugcugcaaguucgacgaggacgauucugagcccgugcugaagggcgugaaacugcacuacacaugaggacuaguuauaagacugacuagcccgaugggccucccaacgggcccuccuccccuccuugcaccgagauuaauaaaaaaaaaaaaaaaaaaaaaaaaaaaaaaaaaaaaaaaaaaaaaaaaaaaaaaaaaaaaaaaaugcaucccccccccccccccccccccccccccccccaaaggcucuuuucagagccaccagaauu

SEQ ID NO: 23285 - RNA, 4033 nt, Artificial Sequence
  SARS-CoV-2/Wuhan/WIV05/2019__EPI_ISL_402128 spike protein mRNA gc mod (1-1273)(H69del_V70del_D614G)
aggagaaagcuuaccauguucguguuccuggugcugcugccucugguguccagccagugugugaaccugaccaccagaacacagcugccuccagccuacaccaacagcuuuaccagaggcguguacuaccccgacaagguguucagauccagcgugcugcacucuacccaggaccuguuccugccuuucuucagcaacgugaccugguuccacgccaucuccggcaccaauggcaccaagagauucgacaaccccgugcugcccuucaacgacgggguguacuuugccagcaccgagaaguccaacaucaucagaggcuggaucuucggcaccacacuggacagcaagacccagagccugcugaucgugaacaacgccaccaacguggucaucaaagugugcgaguuccaguucugcaacgaccccuuccugggcgucuacuaccacaagaacaacaagagcuggauggaaagcgaguuccggguguacagcagcgccaacaacugcaccuucgaguacgugucccagccuuuccugauggaccuggaaggcaagcagggcaacuucaagaaccugcgcgaguucguguuuaagaacaucgacggcuacuucaagaucuacagcaagcacaccccuaucaaccucgugcgggaucugccucagggcuucucugcucuggaaccccugguggaucugcccaucggcaucaacaucacccgguuucagacacugcuggcccugcacagaagcuaccugacaccuggcgauagcagcagcggauggacagcuggugccgccgcuuacuaugugggcuaccugcagccuagaaccuuccugcugaaguacaacgagaacggcaccaucaccgacgccguggauugugcucuggauccucugagcgagacaaagugcacccugaaguccuucaccguggaaaagggcaucuaccagaccagcaacuuccgggugcagcccaccgaauccaucgugcgguuccccaauaucaccaaucugugccccuucggcgagguguucaaugccaccagauucgccucuguguacgccuggaaccggaagcggaucagcaauugcguggccgacuacuccgugcuguacaacuccgccagcuucagcaccuucaagugcuacggcguguccccuaccaagcugaacgaccugugcuucacaaacguguacgccgacagcuucgugauccggggagaugaagugcggcagauugccccuggacagacaggcaagaucgccgacuacaacuacaagcugcccgacgacuucaccggcugugugauugccuggaacagcaacaaccuggacuccaaagucggcggcaacuacaauuaccuguaccggcuguuccggaaguccaaucugaagcccuucgagcgggacaucuccaccgagaucuaucaggccggcagcaccccuuguaacggcguggaaggcuucaacugcuacuucccacugcaguccuacggcuuucagcccacaaauggcgugggcuaucagcccuacagagugguggugcugagcuucgaacugcugcaugccccugccacagugugcggcccuaagaaaagcaccaaucucgugaagaacaaaugcgugaacuucaacuucaacggccugaccggcaccggcgugcugacagagagcaacaagaaguuccugccauuccagcaguuuggccgggauaucgccgauaccacagacgccguuagagauccccagacacuggaaauccuggacaucaccccuugcagcuucggcggagugucugugaucaccccuggcaccaacaccagcaaucagguggcagugcuguaccagggcgugaacuguaccgaagugcccguggccauucacgccgaucagcugacaccuacauggcggguguacuccaccggcagcaauguguuucagaccagagccggcugucugaucggagccgagcacgugaacaauagcuacgagugcgacauccccaucggcgcuggaaucugcgccagcuaccagacacagacaaacagcccucggagagccagaagcguggccagccagagcaucauugccuacacaaugucucugggcgccgagaacagcguggccuacuccaacaacucuaucgcuauccccaccaacuucaccaucagcgugaccacagagauccugccuguguccaugaccaagaccagcguggacugcaccauguacaucugcggcgauuccaccgagugcuccaaccugcugcugcaguacggcagcuucugcacccagcugaauagagcccugacagggaucgccguggaacaggacaagaacacccaagagguguucgcccaagugaagcagaucuacaagaccccuccuaucaaggacuucggcggcuucaauuucagccagauucugcccgauccuagcaagcccagcaagcggagcuucaucgaggaccugcuguucaacaaagugacacuggccgacgccggcuucaucaagcaguauggcgauugucugggcgacauugccgccagggaucugauuugcgcccagaaguuuaacggacugacagugcugccuccucugcugaccgaugagaugaucgcccaguacacaucugcccugcuggccggcacaaucacaagcggcuggacauuuggagcaggcgccgcucugcagauccccuuugcuaugcagauggccuaccgguucaacggcaucggagugacccagaaugugcuguacgagaaccagaagcugaucgccaaccaguucaacagcgccaucggcaagauccaggacagccugagcagcacagcaagcgcccugggaaagcugcaggacguggucaaccagaaugcccaggcacugaacacccuggucaagcagcuguccuccaacuucggcgccaucagcucugugcugaacgauauccugagcagacuggacaaggucgaggccgaggugcagaucgacagacugaucacaggcagacugcagagccuccagacauacgugacccagcagcugaucagagccgccgagauuagagccucugccaaucuggccgccaccaagaugucugagugugugcugggccagagcaagagaguggacuuuugcggcaagggcuaccaccugaugagcuucccucagucugccccucacggcgugguguuucugcacgugacauaugugcccgcucaagagaagaauuucaccaccgcuccagccaucugccacgacggcaaagcccacuuuccuagagaaggcguguucguguccaacggcacccauugguucgugacacagcggaacuucuacgagccccagaucaucaccaccgacaacaccuucgugucuggcaacugcgacgucgugaucggcauugugaacaauaccguguacgacccucugcagcccgagcuggacagcuucaaagaggaacuggacaaguacuuuaagaaccacacaagccccgacguggaccugggcgauaucagcggaaucaaugccagcgucgugaacauccagaaagagaucgaccggcugaacgagguggccaagaaucugaacgagagccugaucgaccugcaagaacuggggaaguacgagcaguacaucaaguggcccugguacaucuggcugggcuuuaucgccggacugauugccaucgugauggucacaaucaugcuguguugcaugaccagcugcuguagcugccugaagggcuguuguagcuguggcagcugcugcaaguucgacgaggacgauucugagcccgugcugaagggcgugaaacugcacuacacaugaggacuaguuauaagacugacuagcccgaugggccucccaacgggcccuccuccccuccuugcaccgagauuaauaaaaaaaaaaaaaaaaaaaaaaaaaaaaaaaaaaaaaaaaaaaaaaaaaaaaaaaaaaaaaaaaugcaucccccccccccccccccccccccccccccccaaaggcucuuuucagagccaccagaauu

SEQ ID NO: 23286 - RNA, 4039 nt, Artificial Sequence
  SARS-CoV-2/Wuhan/WIV05/2019__EPI_ISL_402128 spike protein mRNA gc mod (1-1273)(Y453F_D614G)
aggagaaagcuuaccauguucguguuccuggugcugcugccucugguguccagccagugugugaaccugaccaccagaacacagcugccuccagccuacaccaacagcuuuaccagaggcguguacuaccccgacaagguguucagauccagcgugcugcacucuacccaggaccuguuccugccuuucuucagcaacgugaccugguuccacgccauccacguguccggcaccaauggcaccaagagauucgacaaccccgugcugcccuucaacgacgggguguacuuugccagcaccgagaaguccaacaucaucagaggcuggaucuucggcaccacacuggacagcaagacccagagccugcugaucgugaacaacgccaccaacguggucaucaaagugugcgaguuccaguucugcaacgaccccuuccugggcgucuacuaccacaagaacaacaagagcuggauggaaagcgaguuccggguguacagcagcgccaacaacugcaccuucgaguacgugucccagccuuuccugauggaccuggaaggcaagcagggcaacuucaagaaccugcgcgaguucguguuuaagaacaucgacggcuacuucaagaucuacagcaagcacaccccuaucaaccucgugcgggaucugccucagggcuucucugcucuggaaccccugguggaucugcccaucggcaucaacaucacccgguuucagacacugcuggcccugcacagaagcuaccugacaccuggcgauagcagcagcggauggacagcuggugccgccgcuuacuaugugggcuaccugcagccuagaaccuuccugcugaaguacaacgagaacggcaccaucaccgacgccguggauugugcucuggauccucugagcgagacaaagugcacccugaaguccuucaccguggaaaagggcaucuaccagaccagcaacuuccgggugcagcccaccgaauccaucgugcgguuccccaauaucaccaaucugugccccuucggcgagguguucaaugccaccagauucgccucuguguacgccuggaaccggaagcggaucagcaauugcguggccgacuacuccgugcuguacaacuccgccagcuucagcaccuucaagugcuacggcguguccccuaccaagcugaacgaccugugcuucacaaacguguacgccgacagcuucgugauccggggagaugaagugcggcagauugccccuggacagacaggcaagaucgccgacuacaacuacaagcugcccgacgacuucaccggcugugugauugccuggaacagcaacaaccuggacuccaaagucggcggcaacuacaauuaccuguuccggcuguuccggaaguccaaucugaagcccuucgagcgggacaucuccaccgagaucuaucaggccggcagcaccccuuguaacggcguggaaggcuucaacugcuacuucccacugcaguccuacggcuuucagcccacaaauggcgugggcuaucagcccuacagagugguggugcugagcuucgaacugcugcaugccccugccacagugugcggcccuaagaaaagcaccaaucucgugaagaacaaaugcgugaacuucaacuucaacggccugaccggcaccggcgugcugacagagagcaacaagaaguuccugccauuccagcaguuuggccgggauaucgccgauaccacagacgccguuagagauccccagacacuggaaauccuggacaucaccccuugcagcuucggcggagugucugugaucaccccuggcaccaacaccagcaaucagguggcagugcuguaccagggcgugaacuguaccgaagugcccguggccauucacgccgaucagcugacaccuacauggcggguguacuccaccggcagcaauguguuucagaccagagccggcugucugaucggagccgagcacgugaacaauagcuacgagugcgacauccccaucggcgcuggaaucugcgccagcuaccagacacagacaaacagcccucggagagccagaagcguggccagccagagcaucauugccuacacaaugucucugggcgccgagaacagcguggccuacuccaacaacucuaucgcuauccccaccaacuucaccaucagcgugaccacagagauccugccuguguccaugaccaagaccagcguggacugcaccauguacaucugcggcgauuccaccgagugcuccaaccugcugcugcaguacggcagcuucugcacccagcugaauagagcccugacagggaucgccguggaacaggacaagaacacccaagagguguucgcccaagugaagcagaucuacaagaccccuccuaucaaggacuucggcggcuucaauuucagccagauucugcccgauccuagcaagcccagcaagcggagcuucaucgaggaccugcuguucaacaaagugacacuggccgacgccggcuucaucaagcaguauggcgauugucugggcgacauugccgccagggaucugauuugcgcccagaaguuuaacggacugacagugcugccuccucugcugaccgaugagaugaucgcccaguacacaucugcccugcuggccggcacaaucacaagcggcuggacauuuggagcaggcgccgcucugcagauccccuuugcuaugcagauggccuaccgguucaacggcaucggagugacccagaaugugcuguacgagaaccagaagcugaucgccaaccaguucaacagcgccaucggcaagauccaggacagccugagcagcacagcaagcgcccugggaaagcugcaggacguggucaaccagaaugcccaggcacugaacacccuggucaagcagcuguccuccaacuucggcgccaucagcucugugcugaacgauauccugagcagacuggacaaggucgaggccgaggugcagaucgacagacugaucacaggcagacugcagagccuccagacauacgugacccagcagcugaucagagccgccgagauuagagccucugccaaucuggccgccaccaagaugucugagugugugcugggccagagcaagagaguggacuuuugcggcaagggcuaccaccugaugagcuucccucagucugccccucacggcgugguguuucugcacgugacauaugugcccgcucaagagaagaauuucaccaccgcuccagccaucugccacgacggcaaagcccacuuuccuagagaaggcguguucguguccaacggcacccauugguucgugacacagcggaacuucuacgagccccagaucaucaccaccgacaacaccuucgugucuggcaacugcgacgucgugaucggcauugugaacaauaccguguacgacccucugcagcccgagcuggacagcuucaaagaggaacuggacaaguacuuuaagaaccacacaagccccgacguggaccugggcgauaucagcggaaucaaugccagcgucgugaacauccagaaagagaucgaccggcugaacgagguggccaagaaucugaacgagagccugaucgaccugcaagaacuggggaaguacgagcaguacaucaaguggcccugguacaucuggcugggcuuuaucgccggacugauugccaucgugauggucacaaucaugcuguguugcaugaccagcugcuguagcugccugaagggcuguuguagcuguggcagcugcugcaaguucgacgaggacgauucugagcccgugcugaagggcgugaaacugcacuacacaugaggacuaguuauaagacugacuagcccgaugggccucccaacgggcccuccuccccuccuugcaccgagauuaauaaaaaaaaaaaaaaaaaaaaaaaaaaaaaaaaaaaaaaaaaaaaaaaaaaaaaaaaaaaaaaaaugcaucccccccccccccccccccccccccccccccaaaggcucuuuucagagccaccagaauu

SEQ ID NO: 23287 - RNA, 4039 nt, Artificial Sequence
  SARS-CoV-2/Wuhan/WIV05/2019__EPI_ISL_402128 spike protein mRNA gc mod (1-1273)(D614G_I692V)
aggagaaagcuuaccauguucguguuccuggugcugcugccucugguguccagccagugugugaaccugaccaccagaacacagcugccuccagccuacaccaacagcuuuaccagaggcguguacuaccccgacaagguguucagauccagcgugcugcacucuacccaggaccuguuccugccuuucuucagcaacgugaccugguuccacgccauccacguguccggcaccaauggcaccaagagauucgacaaccccgugcugcccuucaacgacgggguguacuuugccagcaccgagaaguccaacaucaucagaggcuggaucuucggcaccacacuggacagcaagacccagagccugcugaucgugaacaacgccaccaacguggucaucaaagugugcgaguuccaguucugcaacgaccccuuccugggcgucuacuaccacaagaacaacaagagcuggauggaaagcgaguuccggguguacagcagcgccaacaacugcaccuucgaguacgugucccagccuuuccugauggaccuggaaggcaagcagggcaacuucaagaaccugcgcgaguucguguuuaagaacaucgacggcuacuucaagaucuacagcaagcacaccccuaucaaccucgugcgggaucugccucagggcuucucugcucuggaaccccugguggaucugcccaucggcaucaacaucacccgguuucagacacugcuggcccugcacagaagcuaccugacaccuggcgauagcagcagcggauggacagcuggugccgccgcuuacuaugugggcuaccugcagccuagaaccuuccugcugaaguacaacgagaacggcaccaucaccgacgccguggauugugcucuggauccucugagcgagacaaagugcacccugaaguccuucaccguggaaaagggcaucuaccagaccagcaacuuccgggugcagcccaccgaauccaucgugcgguuccccaauaucaccaaucugugccccuucggcgagguguucaaugccaccagauucgccucuguguacgccuggaaccggaagcggaucagcaauugcguggccgacuacuccgugcuguacaacuccgccagcuucagcaccuucaagugcuacggcguguccccuaccaagcugaacgaccugugcuucacaaacguguacgccgacagcuucgugauccggggagaugaagugcggcagauugccccuggacagacaggcaagaucgccgacuacaacuacaagcugcccgacgacuucaccggcugugugauugccuggaacagcaacaaccuggacuccaaagucggcggcaacuacaauuaccuguaccggcuguuccggaaguccaaucugaagcccuucgagcgggacaucuccaccgagaucuaucaggccggcagcaccccuuguaacggcguggaaggcuucaacugcuacuucccacugcaguccuacggcuuucagcccacaaauggcgugggcuaucagcccuacagagugguggugcugagcuucgaacugcugcaugccccugccacagugugcggcccuaagaaaagcaccaaucucgugaagaacaaaugcgugaacuucaacuucaacggccugaccggcaccggcgugcugacagagagcaacaagaaguuccugccauuccagcaguuuggccgggauaucgccgauaccacagacgccguuagagauccccagacacuggaaauccuggacaucaccccuugcagcuucggcggagugucugugaucaccccuggcaccaacaccagcaaucagguggcagugcuguaccagggcgugaacuguaccgaagugcccguggccauucacgccgaucagcugacaccuacauggcggguguacuccaccggcagcaauguguuucagaccagagccggcugucugaucggagccgagcacgugaacaauagcuacgagugcgacauccccaucggcgcuggaaucugcgccagcuaccagacacagacaaacagcccucggagagccagaagcguggccagccagagcgugauugccuacacaaugucucugggcgccgagaacagcguggccuacuccaacaacucuaucgcuauccccaccaacuucaccaucagcgugaccacagagauccugccuguguccaugaccaagaccagcguggacugcaccauguacaucugcggcgauuccaccgagugcuccaaccugcugcugcaguacggcagcuucugcacccagcugaauagagcccugacagggaucgccguggaacaggacaagaacacccaagagguguucgcccaagugaagcagaucuacaagaccccuccuaucaaggacuucggcggcuucaauuucagccagauucugcccgauccuagcaagcccagcaagcggagcuucaucgaggaccugcuguucaacaaagugacacuggccgacgccggcuucaucaagcaguauggcgauugucugggcgacauugccgccagggaucugauuugcgcccagaaguuuaacggacugacagugcugccuccucugcugaccgaugagaugaucgcccaguacacaucugcccugcuggccggcacaaucacaagcggcuggacauuuggagcaggcgccgcucugcagauccccuuugcuaugcagauggccuaccgguucaacggcaucggagugacccagaaugugcuguacgagaaccagaagcugaucgccaaccaguucaacagcgccaucggcaagauccaggacagccugagcagcacagcaagcgcccugggaaagcugcaggacguggucaaccagaaugcccaggcacugaacacccuggucaagcagcuguccuccaacuucggcgccaucagcucugugcugaacgauauccugagcagacuggacaaggucgaggccgaggugcagaucgacagacugaucacaggcagacugcagagccuccagacauacgugacccagcagcugaucagagccgccgagauuagagccucugccaaucuggccgccaccaagaugucugagugugugcugggccagagcaagagaguggacuuuugcggcaagggcuaccaccugaugagcuucccucagucugccccucacggcgugguguuucugcacgugacauaugugcccgcucaagagaagaauuucaccaccgcuccagccaucugccacgacggcaaagcccacuuuccuagagaaggcguguucguguccaacggcacccauugguucgugacacagcggaacuucuacgagccccagaucaucaccaccgacaacaccuucgugucuggcaacugcgacgucgugaucggcauugugaacaauaccguguacgacccucugcagcccgagcuggacagcuucaaagaggaacuggacaaguacuuuaagaaccacacaagccccgacguggaccugggcgauaucagcggaaucaaugccagcgucgugaacauccagaaagagaucgaccggcugaacgagguggccaagaaucugaacgagagccugaucgaccugcaagaacuggggaaguacgagcaguacaucaaguggcccugguacaucuggcugggcuuuaucgccggacugauugccaucgugauggucacaaucaugcuguguugcaugaccagcugcuguagcugccugaagggcuguuguagcuguggcagcugcugcaaguucgacgaggacgauucugagcccgugcugaagggcgugaaacugcacuacacaugaggacuaguuauaagacugacuagcccgaugggccucccaacgggcccuccuccccuccuugcaccgagauuaauaaaaaaaaaaaaaaaaaaaaaaaaaaaaaaaaaaaaaaaaaaaaaaaaaaaaaaaaaaaaaaaaugcaucccccccccccccccccccccccccccccccaaaggcucuuuucagagccaccagaauu

SEQ ID NO: 23288 - RNA, 4039 nt, Artificial Sequence
  SARS-CoV-2/Wuhan/WIV05/2019__EPI_ISL_402128 spike protein mRNA gc mod (1-1273)(D614G_M1229I)
aggagaaagcuuaccauguucguguuccuggugcugcugccucugguguccagccagugugugaaccugaccaccagaacacagcugccuccagccuacaccaacagcuuuaccagaggcguguacuaccccgacaagguguucagauccagcgugcugcacucuacccaggaccuguuccugccuuucuucagcaacgugaccugguuccacgccauccacguguccggcaccaauggcaccaagagauucgacaaccccgugcugcccuucaacgacgggguguacuuugccagcaccgagaaguccaacaucaucagaggcuggaucuucggcaccacacuggacagcaagacccagagccugcugaucgugaacaacgccaccaacguggucaucaaagugugcgaguuccaguucugcaacgaccccuuccugggcgucuacuaccacaagaacaacaagagcuggauggaaagcgaguuccggguguacagcagcgccaacaacugcaccuucgaguacgugucccagccuuuccugauggaccuggaaggcaagcagggcaacuucaagaaccugcgcgaguucguguuuaagaacaucgacggcuacuucaagaucuacagcaagcacaccccuaucaaccucgugcgggaucugccucagggcuucucugcucuggaaccccugguggaucugcccaucggcaucaacaucacccgguuucagacacugcuggcccugcacagaagcuaccugacaccuggcgauagcagcagcggauggacagcuggugccgccgcuuacuaugugggcuaccugcagccuagaaccuuccugcugaaguacaacgagaacggcaccaucaccgacgccguggauugugcucuggauccucugagcgagacaaagugcacccugaaguccuucaccguggaaaagggcaucuaccagaccagcaacuuccgggugcagcccaccgaauccaucgugcgguuccccaauaucaccaaucugugccccuucggcgagguguucaaugccaccagauucgccucuguguacgccuggaaccggaagcggaucagcaauugcguggccgacuacuccgugcuguacaacuccgccagcuucagcaccuucaagugcuacggcguguccccuaccaagcugaacgaccugugcuucacaaacguguacgccgacagcuucgugauccggggagaugaagugcggcagauugccccuggacagacaggcaagaucgccgacuacaacuacaagcugcccgacgacuucaccggcugugugauugccuggaacagcaacaaccuggacuccaaagucggcggcaacuacaauuaccuguaccggcuguuccggaaguccaaucugaagcccuucgagcgggacaucuccaccgagaucuaucaggccggcagcaccccuuguaacggcguggaaggcuucaacugcuacuucccacugcaguccuacggcuuucagcccacaaauggcgugggcuaucagcccuacagagugguggugcugagcuucgaacugcugcaugccccugccacagugugcggcccuaagaaaagcaccaaucucgugaagaacaaaugcgugaacuucaacuucaacggccugaccggcaccggcgugcugacagagagcaacaagaaguuccugccauuccagcaguuuggccgggauaucgccgauaccacagacgccguuagagauccccagacacuggaaauccuggacaucaccccuugcagcuucggcggagugucugugaucaccccuggcaccaacaccagcaaucagguggcagugcuguaccagggcgugaacuguaccgaagugcccguggccauucacgccgaucagcugacaccuacauggcggguguacuccaccggcagcaauguguuucagaccagagccggcugucugaucggagccgagcacgugaacaauagcuacgagugcgacauccccaucggcgcuggaaucugcgccagcuaccagacacagacaaacagcccucggagagccagaagcguggccagccagagcaucauugccuacacaaugucucugggcgccgagaacagcguggccuacuccaacaacucuaucgcuauccccaccaacuucaccaucagcgugaccacagagauccugccuguguccaugaccaagaccagcguggacugcaccauguacaucugcggcgauuccaccgagugcuccaaccugcugcugcaguacggcagcuucugcacccagcugaauagagcccugacagggaucgccguggaacaggacaagaacacccaagagguguucgcccaagugaagcagaucuacaagaccccuccuaucaaggacuucggcggcuucaauuucagccagauucugcccgauccuagcaagcccagcaagcggagcuucaucgaggaccugcuguucaacaaagugacacuggccgacgccggcuucaucaagcaguauggcgauugucugggcgacauugccgccagggaucugauuugcgcccagaaguuuaacggacugacagugcugccuccucugcugaccgaugagaugaucgcccaguacacaucugcccugcuggccggcacaaucacaagcggcuggacauuuggagcaggcgccgcucugcagauccccuuugcuaugcagauggccuaccgguucaacggcaucggagugacccagaaugugcuguacgagaaccagaagcugaucgccaaccaguucaacagcgccaucggcaagauccaggacagccugagcagcacagcaagcgcccugggaaagcugcaggacguggucaaccagaaugcccaggcacugaacacccuggucaagcagcuguccuccaacuucggcgccaucagcucugugcugaacgauauccugagcagacuggacaaggucgaggccgaggugcagaucgacagacugaucacaggcagacugcagagccuccagacauacgugacccagcagcugaucagagccgccgagauuagagccucugccaaucuggccgccaccaagaugucugagugugugcugggccagagcaagagaguggacuuuugcggcaagggcuaccaccugaugagcuucccucagucugccccucacggcgugguguuucugcacgugacauaugugcccgcucaagagaagaauuucaccaccgcuccagccaucugccacgacggcaaagcccacuuuccuagagaaggcguguucguguccaacggcacccauugguucgugacacagcggaacuucuacgagccccagaucaucaccaccgacaacaccuucgugucuggcaacugcgacgucgugaucggcauugugaacaauaccguguacgacccucugcagcccgagcuggacagcuucaaagaggaacuggacaaguacuuuaagaaccacacaagccccgacguggaccugggcgauaucagcggaaucaaugccagcgucgugaacauccagaaagagaucgaccggcugaacgagguggccaagaaucugaacgagagccugaucgaccugcaagaacuggggaaguacgagcaguacaucaaguggcccugguacaucuggcugggcuuuaucgccggacugauugccaucgugaucgucacaaucaugcuguguugcaugaccagcugcuguagcugccugaagggcuguuguagcuguggcagcugcugcaaguucgacgaggacgauucugagcccgugcugaagggcgugaaacugcacuacacaugaggacuaguuauaagacugacuagcccgaugggccucccaacgggcccuccuccccuccuugcaccgagauuaauaaaaaaaaaaaaaaaaaaaaaaaaaaaaaaaaaaaaaaaaaaaaaaaaaaaaaaaaaaaaaaaaugcaucccccccccccccccccccccccccccccccaaaggcucuuuucagagccaccagaauu

SEQ ID NO: 23289 - RNA, 4033 nt, Artificial Sequence
  SARS-CoV-2/Wuhan/WIV05/2019__EPI_ISL_402128 spike protein mRNA gc mod (1-1273)(H69del_V70del_A222V_Y453F_S477N_D614G_I692V)
aggagaaagcuuaccauguucguguuccuggugcugcugccucugguguccagccagugugugaaccugaccaccagaacacagcugccuccagccuacaccaacagcuuuaccagaggcguguacuaccccgacaagguguucagauccagcgugcugcacucuacccaggaccuguuccugccuuucuucagcaacgugaccugguuccacgccaucuccggcaccaauggcaccaagagauucgacaaccccgugcugcccuucaacgacgggguguacuuugccagcaccgagaaguccaacaucaucagaggcuggaucuucggcaccacacuggacagcaagacccagagccugcugaucgugaacaacgccaccaacguggucaucaaagugugcgaguuccaguucugcaacgaccccuuccugggcgucuacuaccacaagaacaacaagagcuggauggaaagcgaguuccggguguacagcagcgccaacaacugcaccuucgaguacgugucccagccuuuccugauggaccuggaaggcaagcagggcaacuucaagaaccugcgcgaguucguguuuaagaacaucgacggcuacuucaagaucuacagcaagcacaccccuaucaaccucgugcgggaucugccucagggcuucucugugcuggaaccccugguggaucugcccaucggcaucaacaucacccgguuucagacacugcuggcccugcacagaagcuaccugacaccuggcgauagcagcagcggauggacagcuggugccgccgcuuacuaugugggcuaccugcagccuagaaccuuccugcugaaguacaacgagaacggcaccaucaccgacgccguggauugugcucuggauccucugagcgagacaaagugcacccugaaguccuucaccguggaaaagggcaucuaccagaccagcaacuuccgggugcagcccaccgaauccaucgugcgguuccccaauaucaccaaucugugccccuucggcgagguguucaaugccaccagauucgccucuguguacgccuggaaccggaagcggaucagcaauugcguggccgacuacuccgugcuguacaacuccgccagcuucagcaccuucaagugcuacggcguguccccuaccaagcugaacgaccugugcuucacaaacguguacgccgacagcuucgugauccggggagaugaagugcggcagauugccccuggacagacaggcaagaucgccgacuacaacuacaagcugcccgacgacuucaccggcugugugauugccuggaacagcaacaaccuggacuccaaagucggcggcaacuacaauuaccuguuccggcuguuccggaaguccaaucugaagcccuucgagcgggacaucuccaccgagaucuaucaggccggcaacaccccuuguaacggcguggaaggcuucaacugcuacuucccacugcaguccuacggcuuucagcccacaaauggcgugggcuaucagcccuacagagugguggugcugagcuucgaacugcugcaugccccugccacagugugcggcccuaagaaaagcaccaaucucgugaagaacaaaugcgugaacuucaacuucaacggccugaccggcaccggcgugcugacagagagcaacaagaaguuccugccauuccagcaguuuggccgggauaucgccgauaccacagacgccguuagagauccccagacacuggaaauccuggacaucaccccuugcagcuucggcggagugucugugaucaccccuggcaccaacaccagcaaucagguggcagugcuguaccagggcgugaacuguaccgaagugcccguggccauucacgccgaucagcugacaccuacauggcggguguacuccaccggcagcaauguguuucagaccagagccggcugucugaucggagccgagcacgugaacaauagcuacgagugcgacauccccaucggcgcuggaaucugcgccagcuaccagacacagacaaacagcccucggagagccagaagcguggccagccagagcgugauugccuacacaaugucucugggcgccgagaacagcguggccuacuccaacaacucuaucgcuauccccaccaacuucaccaucagcgugaccacagagauccugccuguguccaugaccaagaccagcguggacugcaccauguacaucugcggcgauuccaccgagugcuccaaccugcugcugcaguacggcagcuucugcacccagcugaauagagcccugacagggaucgccguggaacaggacaagaacacccaagagguguucgcccaagugaagcagaucuacaagaccccuccuaucaaggacuucggcggcuucaauuucagccagauucugcccgauccuagcaagcccagcaagcggagcuucaucgaggaccugcuguucaacaaagugacacuggccgacgccggcuucaucaagcaguauggcgauugucugggcgacauugccgccagggaucugauuugcgcccagaaguuuaacggacugacagugcugccuccucugcugaccgaugagaugaucgcccaguacacaucugcccugcuggccggcacaaucacaagcggcuggacauuuggagcaggcgccgcucugcagauccccuuugcuaugcagauggccuaccgguucaacggcaucggagugacccagaaugugcuguacgagaaccagaagcugaucgccaaccaguucaacagcgccaucggcaagauccaggacagccugagcagcacagcaagcgcccugggaaagcugcaggacguggucaaccagaaugcccaggcacugaacacccuggucaagcagcuguccuccaacuucggcgccaucagcucugugcugaacgauauccugagcagacuggacaaggucgaggccgaggugcagaucgacagacugaucacaggcagacugcagagccuccagacauacgugacccagcagcugaucagagccgccgagauuagagccucugccaaucuggccgccaccaagaugucugagugugugcugggccagagcaagagaguggacuuuugcggcaagggcuaccaccugaugagcuucccucagucugccccucacggcgugguguuucugcacgugacauaugugcccgcucaagagaagaauuucaccaccgcuccagccaucugccacgacggcaaagcccacuuuccuagagaaggcguguucguguccaacggcacccauugguucgugacacagcggaacuucuacgagccccagaucaucaccaccgacaacaccuucgugucuggcaacugcgacgucgugaucggcauugugaacaauaccguguacgacccucugcagcccgagcuggacagcuucaaagaggaacuggacaaguacuuuaagaaccacacaagccccgacguggaccugggcgauaucagcggaaucaaugccagcgucgugaacauccagaaagagaucgaccggcugaacgagguggccaagaaucugaacgagagccugaucgaccugcaagaacuggggaaguacgagcaguacaucaaguggcccugguacaucuggcugggcuuuaucgccggacugauugccaucgugauggucacaaucaugcuguguugcaugaccagcugcuguagcugccugaagggcuguuguagcuguggcagcugcugcaaguucgacgaggacgauucugagcccgugcugaagggcgugaaacugcacuacacaugaggacuaguuauaagacugacuagcccgaugggccucccaacgggcccuccuccccuccuugcaccgagauuaauaaaaaaaaaaaaaaaaaaaaaaaaaaaaaaaaaaaaaaaaaaaaaaaaaaaaaaaaaaaaaaaaugcaucccccccccccccccccccccccccccccccaaaggcucuuuucagagccaccagaauu

SEQ ID NO: 23290 - RNA, 4033 nt, Artificial Sequence
  SARS-CoV-2/Wuhan/WIV05/2019__EPI_ISL_402128 spike protein mRNA gc mod (1-1273)(H69del_V70del_Y453F_D614G_I692V_M1229I)
aggagaaagcuuaccauguucguguuccuggugcugcugccucugguguccagccagugugugaaccugaccaccagaacacagcugccuccagccuacaccaacagcuuuaccagaggcguguacuaccccgacaagguguucagauccagcgugcugcacucuacccaggaccuguuccugccuuucuucagcaacgugaccugguuccacgccaucuccggcaccaauggcaccaagagauucgacaaccccgugcugcccuucaacgacgggguguacuuugccagcaccgagaaguccaacaucaucagaggcuggaucuucggcaccacacuggacagcaagacccagagccugcugaucgugaacaacgccaccaacguggucaucaaagugugcgaguuccaguucugcaacgaccccuuccugggcgucuacuaccacaagaacaacaagagcuggauggaaagcgaguuccggguguacagcagcgccaacaacugcaccuucgaguacgugucccagccuuuccugauggaccuggaaggcaagcagggcaacuucaagaaccugcgcgaguucguguuuaagaacaucgacggcuacuucaagaucuacagcaagcacaccccuaucaaccucgugcgggaucugccucagggcuucucugcucuggaaccccugguggaucugcccaucggcaucaacaucacccgguuucagacacugcuggcccugcacagaagcuaccugacaccuggcgauagcagcagcggauggacagcuggugccgccgcuuacuaugugggcuaccugcagccuagaaccuuccugcugaaguacaacgagaacggcaccaucaccgacgccguggauugugcucuggauccucugagcgagacaaagugcacccugaaguccuucaccguggaaaagggcaucuaccagaccagcaacuuccgggugcagcccaccgaauccaucgugcgguuccccaauaucaccaaucugugccccuucggcgagguguucaaugccaccagauucgccucuguguacgccuggaaccggaagcggaucagcaauugcguggccgacuacuccgugcuguacaacuccgccagcuucagcaccuucaagugcuacggcguguccccuaccaagcugaacgaccugugcuucacaaacguguacgccgacagcuucgugauccggggagaugaagugcggcagauugccccuggacagacaggcaagaucgccgacuacaacuacaagcugcccgacgacuucaccggcugugugauugccuggaacagcaacaaccuggacuccaaagucggcggcaacuacaauuaccuguuccggcuguuccggaaguccaaucugaagcccuucgagcgggacaucuccaccgagaucuaucaggccggcagcaccccuuguaacggcguggaaggcuucaacugcuacuucccacugcaguccuacggcuuucagcccacaaauggcgugggcuaucagcccuacagagugguggugcugagcuucgaacugcugcaugccccugccacagugugcggcccuaagaaaagcaccaaucucgugaagaacaaaugcgugaacuucaacuucaacggccugaccggcaccggcgugcugacagagagcaacaagaaguuccugccauuccagcaguuuggccgggauaucgccgauaccacagacgccguuagagauccccagacacuggaaauccuggacaucaccccuugcagcuucggcggagugucugugaucaccccuggcaccaacaccagcaaucagguggcagugcuguaccagggcgugaacuguaccgaagugcccguggccauucacgccgaucagcugacaccuacauggcggguguacuccaccggcagcaauguguuucagaccagagccggcugucugaucggagccgagcacgugaacaauagcuacgagugcgacauccccaucggcgcuggaaucugcgccagcuaccagacacagacaaacagcccucggagagccagaagcguggccagccagagcgugauugccuacacaaugucucugggcgccgagaacagcguggccuacuccaacaacucuaucgcuauccccaccaacuucaccaucagcgugaccacagagauccugccuguguccaugaccaagaccagcguggacugcaccauguacaucugcggcgauuccaccgagugcuccaaccugcugcugcaguacggcagcuucugcacccagcugaauagagcccugacagggaucgccguggaacaggacaagaacacccaagagguguucgcccaagugaagcagaucuacaagaccccuccuaucaaggacuucggcggcuucaauuucagccagauucugcccgauccuagcaagcccagcaagcggagcuucaucgaggaccugcuguucaacaaagugacacuggccgacgccggcuucaucaagcaguauggcgauugucugggcgacauugccgccagggaucugauuugcgcccagaaguuuaacggacugacagugcugccuccucugcugaccgaugagaugaucgcccaguacacaucugcccugcuggccggcacaaucacaagcggcuggacauuuggagcaggcgccgcucugcagauccccuuugcuaugcagauggccuaccgguucaacggcaucggagugacccagaaugugcuguacgagaaccagaagcugaucgccaaccaguucaacagcgccaucggcaagauccaggacagccugagcagcacagcaagcgcccugggaaagcugcaggacguggucaaccagaaugcccaggcacugaacacccuggucaagcagcuguccuccaacuucggcgccaucagcucugugcugaacgauauccugagcagacuggacaaggucgaggccgaggugcagaucgacagacugaucacaggcagacugcagagccuccagacauacgugacccagcagcugaucagagccgccgagauuagagccucugccaaucuggccgccaccaagaugucugagugugugcugggccagagcaagagaguggacuuuugcggcaagggcuaccaccugaugagcuucccucagucugccccucacggcgugguguuucugcacgugacauaugugcccgcucaagagaagaauuucaccaccgcuccagccaucugccacgacggcaaagcccacuuuccuagagaaggcguguucguguccaacggcacccauugguucgugacacagcggaacuucuacgagccccagaucaucaccaccgacaacaccuucgugucuggcaacugcgacgucgugaucggcauugugaacaauaccguguacgacccucugcagcccgagcuggacagcuucaaagaggaacuggacaaguacuuuaagaaccacacaagccccgacguggaccugggcgauaucagcggaaucaaugccagcgucgugaacauccagaaagagaucgaccggcugaacgagguggccaagaaucugaacgagagccugaucgaccugcaagaacuggggaaguacgagcaguacaucaaguggcccugguacaucuggcugggcuuuaucgccggacugauugccaucgugaucgucacaaucaugcuguguugcaugaccagcugcuguagcugccugaagggcuguuguagcuguggcagcugcugcaaguucgacgaggacgauucugagcccgugcugaagggcgugaaacugcacuacacaugaggacuaguuauaagacugacuagcccgaugggccucccaacgggcccuccuccccuccuugcaccgagauuaauaaaaaaaaaaaaaaaaaaaaaaaaaaaaaaaaaaaaaaaaaaaaaaaaaaaaaaaaaaaaaaaaugcaucccccccccccccccccccccccccccccccaaaggcucuuuucagagccaccagaauu

SEQ ID NO: 23291 - RNA, 4030 nt, Artificial Sequence
  SARS-CoV-2/Wuhan/WIV05/2019__EPI_ISL_402128 spike protein mRNA gc mod (1-1273)(H69del_V70del_Y144del_N501Y_A570D_D614G_P681H_T716I_S982 A_D1118H)
aggagaaagcuuaccauguucguguuccuggugcugcugccucugguguccagccagugugugaaccugaccaccagaacacagcugccuccagccuacaccaacagcuuuaccagaggcguguacuaccccgacaagguguucagauccagcgugcugcacucuacccaggaccuguuccugccuuucuucagcaacgugaccugguuccacgccaucuccggcaccaauggcaccaagagauucgacaaccccgugcugcccuucaacgacgggguguacuuugccagcaccgagaaguccaacaucaucagaggcuggaucuucggcaccacacuggacagcaagacccagagccugcugaucgugaacaacgccaccaacguggucaucaaagugugcgaguuccaguucugcaacgaccccuuccugggcgucuaccacaagaacaacaagagcuggauggaaagcgaguuccggguguacagcagcgccaacaacugcaccuucgaguacgugucccagccuuuccugauggaccuggaaggcaagcagggcaacuucaagaaccugcgcgaguucguguuuaagaacaucgacggcuacuucaagaucuacagcaagcacaccccuaucaaccucgugcgggaucugccucagggcuucucugcucuggaaccccugguggaucugcccaucggcaucaacaucacccgguuucagacacugcuggcccugcacagaagcuaccugacaccuggcgauagcagcagcggauggacagcuggugccgccgcuuacuaugugggcuaccugcagccuagaaccuuccugcugaaguacaacgagaacggcaccaucaccgacgccguggauugugcucuggauccucugagcgagacaaagugcacccugaaguccuucaccguggaaaagggcaucuaccagaccagcaacuuccgggugcagcccaccgaauccaucgugcgguuccccaauaucaccaaucugugccccuucggcgagguguucaaugccaccagauucgccucuguguacgccuggaaccggaagcggaucagcaauugcguggccgacuacuccgugcuguacaacuccgccagcuucagcaccuucaagugcuacggcguguccccuaccaagcugaacgaccugugcuucacaaacguguacgccgacagcuucgugauccggggagaugaagugcggcagauugccccuggacagacaggcaagaucgccgacuacaacuacaagcugcccgacgacuucaccggcugugugauugccuggaacagcaacaaccuggacuccaaagucggcggcaacuacaauuaccuguaccggcuguuccggaaguccaaucugaagcccuucgagcgggacaucuccaccgagaucuaucaggccggcagcaccccuuguaacggcguggaaggcuucaacugcuacuucccacugcaguccuacggcuuucagcccacauacggcgugggcuaucagcccuacagagugguggugcugagcuucgaacugcugcaugccccugccacagugugcggcccuaagaaaagcaccaaucucgugaagaacaaaugcgugaacuucaacuucaacggccugaccggcaccggcgugcugacagagagcaacaagaaguuccugccauuccagcaguuuggccgggauaucgacgauaccacagacgccguuagagauccccagacacuggaaauccuggacaucaccccuugcagcuucggcggagugucugugaucaccccuggcaccaacaccagcaaucagguggcagugcuguaccagggcgugaacuguaccgaagugcccguggccauucacgccgaucagcugacaccuacauggcggguguacuccaccggcagcaauguguuucagaccagagccggcugucugaucggagccgagcacgugaacaauagcuacgagugcgacauccccaucggcgcuggaaucugcgccagcuaccagacacagacaaacagccaccggagagccagaagcguggccagccagagcaucauugccuacacaaugucucugggcgccgagaacagcguggccuacuccaacaacucuaucgcuauccccaucaacuucaccaucagcgugaccacagagauccugccuguguccaugaccaagaccagcguggacugcaccauguacaucugcggcgauuccaccgagugcuccaaccugcugcugcaguacggcagcuucugcacccagcugaauagagcccugacagggaucgccguggaacaggacaagaacacccaagagguguucgcccaagugaagcagaucuacaagaccccuccuaucaaggacuucggcggcuucaauuucagccagauucugcccgauccuagcaagcccagcaagcggagcuucaucgaggaccugcuguucaacaaagugacacuggccgacgccggcuucaucaagcaguauggcgauugucugggcgacauugccgccagggaucugauuugcgcccagaaguuuaacggacugacagugcugccuccucugcugaccgaugagaugaucgcccaguacacaucugcccugcuggccggcacaaucacaagcggcuggacauuuggagcaggcgccgcucugcagauccccuuugcuaugcagauggccuaccgguucaacggcaucggagugacccagaaugugcuguacgagaaccagaagcugaucgccaaccaguucaacagcgccaucggcaagauccaggacagccugagcagcacagcaagcgcccugggaaagcugcaggacguggucaaccagaaugcccaggcacugaacacccuggucaagcagcuguccuccaacuucggcgccaucagcucugugcugaacgauauccuggccagacuggacaaggucgaggccgaggugcagaucgacagacugaucacaggcagacugcagagccuccagacauacgugacccagcagcugaucagagccgccgagauuagagccucugccaaucuggccgccaccaagaugucugagugugugcugggccagagcaagagaguggacuuuugcggcaagggcuaccaccugaugagcuucccucagucugccccucacggcgugguguuucugcacgugacauaugugcccgcucaagagaagaauuucaccaccgcuccagccaucugccacgacggcaaagcccacuuuccuagagaaggcguguucguguccaacggcacccauugguucgugacacagcggaacuucuacgagccccagaucaucaccacccacaacaccuucgugucuggcaacugcgacgucgugaucggcauugugaacaauaccguguacgacccucugcagcccgagcuggacagcuucaaagaggaacuggacaaguacuuuaagaaccacacaagccccgacguggaccugggcgauaucagcggaaucaaugccagcgucgugaacauccagaaagagaucgaccggcugaacgagguggccaagaaucugaacgagagccugaucgaccugcaagaacuggggaaguacgagcaguacaucaaguggcccugguacaucuggcugggcuuuaucgccggacugauugccaucgugauggucacaaucaugcuguguugcaugaccagcugcuguagcugccugaagggcuguuguagcuguggcagcugcugcaaguucgacgaggacgauucugagcccgugcugaagggcgugaaacugcacuacacaugaggacuaguuauaagacugacuagcccgaugggccucccaacgggcccuccuccccuccuugcaccgagauuaauaaaaaaaaaaaaaaaaaaaaaaaaaaaaaaaaaaaaaaaaaaaaaaaaaaaaaaaaaaaaaaaaugcaucccccccccccccccccccccccccccccccaaaggcucuuuucagagccaccagaauu

SEQ ID NO: 23292 - RNA, 4039 nt, Artificial Sequence
  SARS-CoV-2/Wuhan/WIV05/2019__EPI_ISL_402128 spike protein mRNA gc mod (1-1273)(K417N_E484K_N501Y_D614G)
aggagaaagcuuaccauguucguguuccuggugcugcugccucugguguccagccagugugugaaccugaccaccagaacacagcugccuccagccuacaccaacagcuuuaccagaggcguguacuaccccgacaagguguucagauccagcgugcugcacucuacccaggaccuguuccugccuuucuucagcaacgugaccugguuccacgccauccacguguccggcaccaauggcaccaagagauucgacaaccccgugcugcccuucaacgacgggguguacuuugccagcaccgagaaguccaacaucaucagaggcuggaucuucggcaccacacuggacagcaagacccagagccugcugaucgugaacaacgccaccaacguggucaucaaagugugcgaguuccaguucugcaacgaccccuuccugggcgucuacuaccacaagaacaacaagagcuggauggaaagcgaguuccggguguacagcagcgccaacaacugcaccuucgaguacgugucccagccuuuccugauggaccuggaaggcaagcagggcaacuucaagaaccugcgcgaguucguguuuaagaacaucgacggcuacuucaagaucuacagcaagcacaccccuaucaaccucgugcgggaucugccucagggcuucucugcucuggaaccccugguggaucugcccaucggcaucaacaucacccgguuucagacacugcuggcccugcacagaagcuaccugacaccuggcgauagcagcagcggauggacagcuggugccgccgcuuacuaugugggcuaccugcagccuagaaccuuccugcugaaguacaacgagaacggcaccaucaccgacgccguggauugugcucuggauccucugagcgagacaaagugcacccugaaguccuucaccguggaaaagggcaucuaccagaccagcaacuuccgggugcagcccaccgaauccaucgugcgguuccccaauaucaccaaucugugccccuucggcgagguguucaaugccaccagauucgccucuguguacgccuggaaccggaagcggaucagcaauugcguggccgacuacuccgugcuguacaacuccgccagcuucagcaccuucaagugcuacggcguguccccuaccaagcugaacgaccugugcuucacaaacguguacgccgacagcuucgugauccggggagaugaagugcggcagauugccccuggacagacaggcaacaucgccgacuacaacuacaagcugcccgacgacuucaccggcugugugauugccuggaacagcaacaaccuggacuccaaagucggcggcaacuacaauuaccuguaccggcuguuccggaaguccaaucugaagcccuucgagcgggacaucuccaccgagaucuaucaggccggcagcaccccuuguaacggcgugaagggcuucaacugcuacuucccacugcaguccuacggcuuucagcccacauacggcgugggcuaucagcccuacagagugguggugcugagcuucgaacugcugcaugccccugccacagugugcggcccuaagaaaagcaccaaucucgugaagaacaaaugcgugaacuucaacuucaacggccugaccggcaccggcgugcugacagagagcaacaagaaguuccugccauuccagcaguuuggccgggauaucgccgauaccacagacgccguuagagauccccagacacuggaaauccuggacaucaccccuugcagcuucggcggagugucugugaucaccccuggcaccaacaccagcaaucagguggcagugcuguaccagggcgugaacuguaccgaagugcccguggccauucacgccgaucagcugacaccuacauggcggguguacuccaccggcagcaauguguuucagaccagagccggcugucugaucggagccgagcacgugaacaauagcuacgagugcgacauccccaucggcgcuggaaucugcgccagcuaccagacacagacaaacagcccucggagagccagaagcguggccagccagagcaucauugccuacacaaugucucugggcgccgagaacagcguggccuacuccaacaacucuaucgcuauccccaccaacuucaccaucagcgugaccacagagauccugccuguguccaugaccaagaccagcguggacugcaccauguacaucugcggcgauuccaccgagugcuccaaccugcugcugcaguacggcagcuucugcacccagcugaauagagcccugacagggaucgccguggaacaggacaagaacacccaagagguguucgcccaagugaagcagaucuacaagaccccuccuaucaaggacuucggcggcuucaauuucagccagauucugcccgauccuagcaagcccagcaagcggagcuucaucgaggaccugcuguucaacaaagugacacuggccgacgccggcuucaucaagcaguauggcgauugucugggcgacauugccgccagggaucugauuugcgcccagaaguuuaacggacugacagugcugccuccucugcugaccgaugagaugaucgcccaguacacaucugcccugcuggccggcacaaucacaagcggcuggacauuuggagcaggcgccgcucugcagauccccuuugcuaugcagauggccuaccgguucaacggcaucggagugacccagaaugugcuguacgagaaccagaagcugaucgccaaccaguucaacagcgccaucggcaagauccaggacagccugagcagcacagcaagcgcccugggaaagcugcaggacguggucaaccagaaugcccaggcacugaacacccuggucaagcagcuguccuccaacuucggcgccaucagcucugugcugaacgauauccugagcagacuggacaaggucgaggccgaggugcagaucgacagacugaucacaggcagacugcagagccuccagacauacgugacccagcagcugaucagagccgccgagauuagagccucugccaaucuggccgccaccaagaugucugagugugugcugggccagagcaagagaguggacuuuugcggcaagggcuaccaccugaugagcuucccucagucugccccucacggcgugguguuucugcacgugacauaugugcccgcucaagagaagaauuucaccaccgcuccagccaucugccacgacggcaaagcccacuuuccuagagaaggcguguucguguccaacggcacccauugguucgugacacagcggaacuucuacgagccccagaucaucaccaccgacaacaccuucgugucuggcaacugcgacgucgugaucggcauugugaacaauaccguguacgacccucugcagcccgagcuggacagcuucaaagaggaacuggacaaguacuuuaagaaccacacaagccccgacguggaccugggcgauaucagcggaaucaaugccagcgucgugaacauccagaaagagaucgaccggcugaacgagguggccaagaaucugaacgagagccugaucgaccugcaagaacuggggaaguacgagcaguacaucaaguggcccugguacaucuggcugggcuuuaucgccggacugauugccaucgugauggucacaaucaugcuguguugcaugaccagcugcuguagcugccugaagggcuguuguagcuguggcagcugcugcaaguucgacgaggacgauucugagcccgugcugaagggcgugaaacugcacuacacaugaggacuaguuauaagacugacuagcccgaugggccucccaacgggcccuccuccccuccuugcaccgagauuaauaaaaaaaaaaaaaaaaaaaaaaaaaaaaaaaaaaaaaaaaaaaaaaaaaaaaaaaaaaaaaaaaugcaucccccccccccccccccccccccccccccccaaaggcucuuuucagagccaccagaauu

SEQ ID NO: 23293 - RNA, 4030 nt, Artificial Sequence
  SARS-CoV-2/Wuhan/WIV05/2019__EPI_ISL_402128 spike protein mRNA gc mod (1-1273)(L18F_D80A_D215G_L242del_A243del_L244del_R246I_K417N_E484 K_N501Y_D614G_A701V)
aggagaaagcuuaccauguucguguuccuggugcugcugccucugguguccagccagugugugaacuucaccaccagaacacagcugccuccagccuacaccaacagcuuuaccagaggcguguacuaccccgacaagguguucagauccagcgugcugcacucuacccaggaccuguuccugccuuucuucagcaacgugaccugguuccacgccauccacguguccggcaccaauggcaccaagagauucgccaaccccgugcugcccuucaacgacgggguguacuuugccagcaccgagaaguccaacaucaucagaggcuggaucuucggcaccacacuggacagcaagacccagagccugcugaucgugaacaacgccaccaacguggucaucaaagugugcgaguuccaguucugcaacgaccccuuccugggcgucuacuaccacaagaacaacaagagcuggauggaaagcgaguuccggguguacagcagcgccaacaacugcaccuucgaguacgugucccagccuuuccugauggaccuggaaggcaagcagggcaacuucaagaaccugcgcgaguucguguuuaagaacaucgacggcuacuucaagaucuacagcaagcacaccccuaucaaccucgugcggggccugccucagggcuucucugcucuggaaccccugguggaucugcccaucggcaucaacaucacccgguuucagacacugcacaucagcuaccugacaccuggcgauagcagcagcggauggacagcuggugccgccgcuuacuaugugggcuaccugcagccuagaaccuuccugcugaaguacaacgagaacggcaccaucaccgacgccguggauugugcucuggauccucugagcgagacaaagugcacccugaaguccuucaccguggaaaagggcaucuaccagaccagcaacuuccgggugcagcccaccgaauccaucgugcgguuccccaauaucaccaaucugugccccuucggcgagguguucaaugccaccagauucgccucuguguacgccuggaaccggaagcggaucagcaauugcguggccgacuacuccgugcuguacaacuccgccagcuucagcaccuucaagugcuacggcguguccccuaccaagcugaacgaccugugcuucacaaacguguacgccgacagcuucgugauccggggagaugaagugcggcagauugccccuggacagacaggcaacaucgccgacuacaacuacaagcugcccgacgacuucaccggcugugugauugccuggaacagcaacaaccuggacuccaaagucggcggcaacuacaauuaccuguaccggcuguuccggaaguccaaucugaagcccuucgagcgggacaucuccaccgagaucuaucaggccggcagcaccccuuguaacggcgugaagggcuucaacugcuacuucccacugcaguccuacggcuuucagcccacauacggcgugggcuaucagcccuacagagugguggugcugagcuucgaacugcugcaugccccugccacagugugcggcccuaagaaaagcaccaaucucgugaagaacaaaugcgugaacuucaacuucaacggccugaccggcaccggcgugcugacagagagcaacaagaaguuccugccauuccagcaguuuggccgggauaucgccgauaccacagacgccguuagagauccccagacacuggaaauccuggacaucaccccuugcagcuucggcggagugucugugaucaccccuggcaccaacaccagcaaucagguggcagugcuguaccagggcgugaacuguaccgaagugcccguggccauucacgccgaucagcugacaccuacauggcggguguacuccaccggcagcaauguguuucagaccagagccggcugucugaucggagccgagcacgugaacaauagcuacgagugcgacauccccaucggcgcuggaaucugcgccagcuaccagacacagacaaacagcccucggagagccagaagcguggccagccagagcaucauugccuacacaaugucucugggcguggagaacagcguggccuacuccaacaacucuaucgcuauccccaccaacuucaccaucagcgugaccacagagauccugccuguguccaugaccaagaccagcguggacugcaccauguacaucugcggcgauuccaccgagugcuccaaccugcugcugcaguacggcagcuucugcacccagcugaauagagcccugacagggaucgccguggaacaggacaagaacacccaagagguguucgcccaagugaagcagaucuacaagaccccuccuaucaaggacuucggcggcuucaauuucagccagauucugcccgauccuagcaagcccagcaagcggagcuucaucgaggaccugcuguucaacaaagugacacuggccgacgccggcuucaucaagcaguauggcgauugucugggcgacauugccgccagggaucugauuugcgcccagaaguuuaacggacugacagugcugccuccucugcugaccgaugagaugaucgcccaguacacaucugcccugcuggccggcacaaucacaagcggcuggacauuuggagcaggcgccgcucugcagauccccuuugcuaugcagauggccuaccgguucaacggcaucggagugacccagaaugugcuguacgagaaccagaagcugaucgccaaccaguucaacagcgccaucggcaagauccaggacagccugagcagcacagcaagcgcccugggaaagcugcaggacguggucaaccagaaugcccaggcacugaacacccuggucaagcagcuguccuccaacuucggcgccaucagcucugugcugaacgauauccugagcagacuggacaaggucgaggccgaggugcagaucgacagacugaucacaggcagacugcagagccuccagacauacgugacccagcagcugaucagagccgccgagauuagagccucugccaaucuggccgccaccaagaugucugagugugugcugggccagagcaagagaguggacuuuugcggcaagggcuaccaccugaugagcuucccucagucugccccucacggcgugguguuucugcacgugacauaugugcccgcucaagagaagaauuucaccaccgcuccagccaucugccacgacggcaaagcccacuuuccuagagaaggcguguucguguccaacggcacccauugguucgugacacagcggaacuucuacgagccccagaucaucaccaccgacaacaccuucgugucuggcaacugcgacgucgugaucggcauugugaacaauaccguguacgacccucugcagcccgagcuggacagcuucaaagaggaacuggacaaguacuuuaagaaccacacaagccccgacguggaccugggcgauaucagcggaaucaaugccagcgucgugaacauccagaaagagaucgaccggcugaacgagguggccaagaaucugaacgagagccugaucgaccugcaagaacuggggaaguacgagcaguacaucaaguggcccugguacaucuggcugggcuuuaucgccggacugauugccaucgugauggucacaaucaugcuguguugcaugaccagcugcuguagcugccugaagggcuguuguagcuguggcagcugcugcaaguucgacgaggacgauucugagcccgugcugaagggcgugaaacugcacuacacaugaggacuaguuauaagacugacuagcccgaugggccucccaacgggcccuccuccccuccuugcaccgagauuaauaaaaaaaaaaaaaaaaaaaaaaaaaaaaaaaaaaaaaaaaaaaaaaaaaaaaaaaaaaaaaaaaugcaucccccccccccccccccccccccccccccccaaaggcucuuuucagagccaccagaauu

SEQ ID NO: 23294 - RNA, 4039 nt, Artificial Sequence
  SARS-CoV-2/Wuhan/WIV05/2019__EPI_ISL_402128 spike protein mRNA gc mod (1-1273)(E484K_D614G)
aggagaaagcuuaccauguucguguuccuggugcugcugccucugguguccagccagugugugaaccugaccaccagaacacagcugccuccagccuacaccaacagcuuuaccagaggcguguacuaccccgacaagguguucagauccagcgugcugcacucuacccaggaccuguuccugccuuucuucagcaacgugaccugguuccacgccauccacguguccggcaccaauggcaccaagagauucgacaaccccgugcugcccuucaacgacgggguguacuuugccagcaccgagaaguccaacaucaucagaggcuggaucuucggcaccacacuggacagcaagacccagagccugcugaucgugaacaacgccaccaacguggucaucaaagugugcgaguuccaguucugcaacgaccccuuccugggcgucuacuaccacaagaacaacaagagcuggauggaaagcgaguuccggguguacagcagcgccaacaacugcaccuucgaguacgugucccagccuuuccugauggaccuggaaggcaagcagggcaacuucaagaaccugcgcgaguucguguuuaagaacaucgacggcuacuucaagaucuacagcaagcacaccccuaucaaccucgugcgggaucugccucagggcuucucugcucuggaaccccugguggaucugcccaucggcaucaacaucacccgguuucagacacugcuggcccugcacagaagcuaccugacaccuggcgauagcagcagcggauggacagcuggugccgccgcuuacuaugugggcuaccugcagccuagaaccuuccugcugaaguacaacgagaacggcaccaucaccgacgccguggauugugcucuggauccucugagcgagacaaagugcacccugaaguccuucaccguggaaaagggcaucuaccagaccagcaacuuccgggugcagcccaccgaauccaucgugcgguuccccaauaucaccaaucugugccccuucggcgagguguucaaugccaccagauucgccucuguguacgccuggaaccggaagcggaucagcaauugcguggccgacuacuccgugcuguacaacuccgccagcuucagcaccuucaagugcuacggcguguccccuaccaagcugaacgaccugugcuucacaaacguguacgccgacagcuucgugauccggggagaugaagugcggcagauugccccuggacagacaggcaagaucgccgacuacaacuacaagcugcccgacgacuucaccggcugugugauugccuggaacagcaacaaccuggacuccaaagucggcggcaacuacaauuaccuguaccggcuguuccggaaguccaaucugaagcccuucgagcgggacaucuccaccgagaucuaucaggccggcagcaccccuuguaacggcgugaagggcuucaacugcuacuucccacugcaguccuacggcuuucagcccacaaauggcgugggcuaucagcccuacagagugguggugcugagcuucgaacugcugcaugccccugccacagugugcggcccuaagaaaagcaccaaucucgugaagaacaaaugcgugaacuucaacuucaacggccugaccggcaccggcgugcugacagagagcaacaagaaguuccugccauuccagcaguuuggccgggauaucgccgauaccacagacgccguuagagauccccagacacuggaaauccuggacaucaccccuugcagcuucggcggagugucugugaucaccccuggcaccaacaccagcaaucagguggcagugcuguaccagggcgugaacuguaccgaagugcccguggccauucacgccgaucagcugacaccuacauggcggguguacuccaccggcagcaauguguuucagaccagagccggcugucugaucggagccgagcacgugaacaauagcuacgagugcgacauccccaucggcgcuggaaucugcgccagcuaccagacacagacaaacagcccucggagagccagaagcguggccagccagagcaucauugccuacacaaugucucugggcgccgagaacagcguggccuacuccaacaacucuaucgcuauccccaccaacuucaccaucagcgugaccacagagauccugccuguguccaugaccaagaccagcguggacugcaccauguacaucugcggcgauuccaccgagugcuccaaccugcugcugcaguacggcagcuucugcacccagcugaauagagcccugacagggaucgccguggaacaggacaagaacacccaagagguguucgcccaagugaagcagaucuacaagaccccuccuaucaaggacuucggcggcuucaauuucagccagauucugcccgauccuagcaagcccagcaagcggagcuucaucgaggaccugcuguucaacaaagugacacuggccgacgccggcuucaucaagcaguauggcgauugucugggcgacauugccgccagggaucugauuugcgcccagaaguuuaacggacugacagugcugccuccucugcugaccgaugagaugaucgcccaguacacaucugcccugcuggccggcacaaucacaagcggcuggacauuuggagcaggcgccgcucugcagauccccuuugcuaugcagauggccuaccgguucaacggcaucggagugacccagaaugugcuguacgagaaccagaagcugaucgccaaccaguucaacagcgccaucggcaagauccaggacagccugagcagcacagcaagcgcccugggaaagcugcaggacguggucaaccagaaugcccaggcacugaacacccuggucaagcagcuguccuccaacuucggcgccaucagcucugugcugaacgauauccugagcagacuggacaaggucgaggccgaggugcagaucgacagacugaucacaggcagacugcagagccuccagacauacgugacccagcagcugaucagagccgccgagauuagagccucugccaaucuggccgccaccaagaugucugagugugugcugggccagagcaagagaguggacuuuugcggcaagggcuaccaccugaugagcuucccucagucugccccucacggcgugguguuucugcacgugacauaugugcccgcucaagagaagaauuucaccaccgcuccagccaucugccacgacggcaaagcccacuuuccuagagaaggcguguucguguccaacggcacccauugguucgugacacagcggaacuucuacgagccccagaucaucaccaccgacaacaccuucgugucuggcaacugcgacgucgugaucggcauugugaacaauaccguguacgacccucugcagcccgagcuggacagcuucaaagaggaacuggacaaguacuuuaagaaccacacaagccccgacguggaccugggcgauaucagcggaaucaaugccagcgucgugaacauccagaaagagaucgaccggcugaacgagguggccaagaaucugaacgagagccugaucgaccugcaagaacuggggaaguacgagcaguacaucaaguggcccugguacaucuggcugggcuuuaucgccggacugauugccaucgugauggucacaaucaugcuguguugcaugaccagcugcuguagcugccugaagggcuguuguagcuguggcagcugcugcaaguucgacgaggacgauucugagcccgugcugaagggcgugaaacugcacuacacaugaggacuaguuauaagacugacuagcccgaugggccucccaacgggcccuccuccccuccuugcaccgagauuaauaaaaaaaaaaaaaaaaaaaaaaaaaaaaaaaaaaaaaaaaaaaaaaaaaaaaaaaaaaaaaaaaugcaucccccccccccccccccccccccccccccccaaaggcucuuuucagagccaccagaauu

SEQ ID NO: 23295 - RNA, 4039 nt, Artificial Sequence
  SARS-CoV-2/Wuhan/WIV05/2019__EPI_ISL_402128 spike protein mRNA gc mod (1-1273)(L18F_T20N_P26S_D138Y_R190S_K417T_E484K_N501Y_D614G_H655Y _T1027I)
aggagaaagcuuaccauguucguguuccuggugcugcugccucugguguccagccagugugugaacuucaccaacagaacacagcugccuagcgccuacaccaacagcuuuaccagaggcguguacuaccccgacaagguguucagauccagcgugcugcacucuacccaggaccuguuccugccuuucuucagcaacgugaccugguuccacgccauccacguguccggcaccaauggcaccaagagauucgacaaccccgugcugcccuucaacgacgggguguacuuugccagcaccgagaaguccaacaucaucagaggcuggaucuucggcaccacacuggacagcaagacccagagccugcugaucgugaacaacgccaccaacguggucaucaaagugugcgaguuccaguucugcaacuaccccuuccugggcgucuacuaccacaagaacaacaagagcuggauggaaagcgaguuccggguguacagcagcgccaacaacugcaccuucgaguacgugucccagccuuuccugauggaccuggaaggcaagcagggcaacuucaagaaccugagcgaguucguguuuaagaacaucgacggcuacuucaagaucuacagcaagcacaccccuaucaaccucgugcgggaucugccucagggcuucucugcucuggaaccccugguggaucugcccaucggcaucaacaucacccgguuucagacacugcuggcccugcacagaagcuaccugacaccuggcgauagcagcagcggauggacagcuggugccgccgcuuacuaugugggcuaccugcagccuagaaccuuccugcugaaguacaacgagaacggcaccaucaccgacgccguggauugugcucuggauccucugagcgagacaaagugcacccugaaguccuucaccguggaaaagggcaucuaccagaccagcaacuuccgggugcagcccaccgaauccaucgugcgguuccccaauaucaccaaucugugccccuucggcgagguguucaaugccaccagauucgccucuguguacgccuggaaccggaagcggaucagcaauugcguggccgacuacuccgugcuguacaacuccgccagcuucagcaccuucaagugcuacggcguguccccuaccaagcugaacgaccugugcuucacaaacguguacgccgacagcuucgugauccggggagaugaagugcggcagauugccccuggacagacaggcaccaucgccgacuacaacuacaagcugcccgacgacuucaccggcugugugauugccuggaacagcaacaaccuggacuccaaagucggcggcaacuacaauuaccuguaccggcuguuccggaaguccaaucugaagcccuucgagcgggacaucuccaccgagaucuaucaggccggcagcaccccuuguaacggcgugaagggcuucaacugcuacuucccacugcaguccuacggcuuucagcccacauacggcgugggcuaucagcccuacagagugguggugcugagcuucgaacugcugcaugccccugccacagugugcggcccuaagaaaagcaccaaucucgugaagaacaaaugcgugaacuucaacuucaacggccugaccggcaccggcgugcugacagagagcaacaagaaguuccugccauuccagcaguuuggccgggauaucgccgauaccacagacgccguuagagauccccagacacuggaaauccuggacaucaccccuugcagcuucggcggagugucugugaucaccccuggcaccaacaccagcaaucagguggcagugcuguaccagggcgugaacuguaccgaagugcccguggccauucacgccgaucagcugacaccuacauggcggguguacuccaccggcagcaauguguuucagaccagagccggcugucugaucggagccgaguacgugaacaauagcuacgagugcgacauccccaucggcgcuggaaucugcgccagcuaccagacacagacaaacagcccucggagagccagaagcguggccagccagagcaucauugccuacacaaugucucugggcgccgagaacagcguggccuacuccaacaacucuaucgcuauccccaccaacuucaccaucagcgugaccacagagauccugccuguguccaugaccaagaccagcguggacugcaccauguacaucugcggcgauuccaccgagugcuccaaccugcugcugcaguacggcagcuucugcacccagcugaauagagcccugacagggaucgccguggaacaggacaagaacacccaagagguguucgcccaagugaagcagaucuacaagaccccuccuaucaaggacuucggcggcuucaauuucagccagauucugcccgauccuagcaagcccagcaagcggagcuucaucgaggaccugcuguucaacaaagugacacuggccgacgccggcuucaucaagcaguauggcgauugucugggcgacauugccgccagggaucugauuugcgcccagaaguuuaacggacugacagugcugccuccucugcugaccgaugagaugaucgcccaguacacaucugcccugcuggccggcacaaucacaagcggcuggacauuuggagcaggcgccgcucugcagauccccuuugcuaugcagauggccuaccgguucaacggcaucggagugacccagaaugugcuguacgagaaccagaagcugaucgccaaccaguucaacagcgccaucggcaagauccaggacagccugagcagcacagcaagcgcccugggaaagcugcaggacguggucaaccagaaugcccaggcacugaacacccuggucaagcagcuguccuccaacuucggcgccaucagcucugugcugaacgauauccugagcagacuggacaaggucgaggccgaggugcagaucgacagacugaucacaggcagacugcagagccuccagacauacgugacccagcagcugaucagagccgccgagauuagagccucugccaaucuggccgccaucaagaugucugagugugugcugggccagagcaagagaguggacuuuugcggcaagggcuaccaccugaugagcuucccucagucugccccucacggcgugguguuucugcacgugacauaugugcccgcucaagagaagaauuucaccaccgcuccagccaucugccacgacggcaaagcccacuuuccuagagaaggcguguucguguccaacggcacccauugguucgugacacagcggaacuucuacgagccccagaucaucaccaccgacaacaccuucgugucuggcaacugcgacgucgugaucggcauugugaacaauaccguguacgacccucugcagcccgagcuggacagcuucaaagaggaacuggacaaguacuuuaagaaccacacaagccccgacguggaccugggcgauaucagcggaaucaaugccagcgucgugaacauccagaaagagaucgaccggcugaacgagguggccaagaaucugaacgagagccugaucgaccugcaagaacuggggaaguacgagcaguacaucaaguggcccugguacaucuggcugggcuuuaucgccggacugauugccaucgugauggucacaaucaugcuguguugcaugaccagcugcuguagcugccugaagggcuguuguagcuguggcagcugcugcaaguucgacgaggacgauucugagcccgugcugaagggcgugaaacugcacuacacaugaggacuaguuauaagacugacuagcccgaugggccucccaacgggcccuccuccccuccuugcaccgagauuaauaaaaaaaaaaaaaaaaaaaaaaaaaaaaaaaaaaaaaaaaaaaaaaaaaaaaaaaaaaaaaaaaugcaucccccccccccccccccccccccccccccccaaaggcucuuuucagagccaccagaauu

SEQ ID NO: 23296 - RNA, 4039 nt, Artificial Sequence
  SARS-CoV-2/Wuhan/WIV05/2019__EPI_ISL_402128 spike protein mRNA gc mod (1-1273)(S13I_W152C_L452R_D614G)
aggagaaagcuuaccauguucguguuccuggugcugcugccucugguguccauccagugugugaaccugaccaccagaacacagcugccuccagccuacaccaacagcuuuaccagaggcguguacuaccccgacaagguguucagauccagcgugcugcacucuacccaggaccuguuccugccuuucuucagcaacgugaccugguuccacgccauccacguguccggcaccaauggcaccaagagauucgacaaccccgugcugcccuucaacgacgggguguacuuugccagcaccgagaaguccaacaucaucagaggcuggaucuucggcaccacacuggacagcaagacccagagccugcugaucgugaacaacgccaccaacguggucaucaaagugugcgaguuccaguucugcaacgaccccuuccugggcgucuacuaccacaagaacaacaagagcugcauggaaagcgaguuccggguguacagcagcgccaacaacugcaccuucgaguacgugucccagccuuuccugauggaccuggaaggcaagcagggcaacuucaagaaccugcgcgaguucguguuuaagaacaucgacggcuacuucaagaucuacagcaagcacaccccuaucaaccucgugcgggaucugccucagggcuucucugcucuggaaccccugguggaucugcccaucggcaucaacaucacccgguuucagacacugcuggcccugcacagaagcuaccugacaccuggcgauagcagcagcggauggacagcuggugccgccgcuuacuaugugggcuaccugcagccuagaaccuuccugcugaaguacaacgagaacggcaccaucaccgacgccguggauugugcucuggauccucugagcgagacaaagugcacccugaaguccuucaccguggaaaagggcaucuaccagaccagcaacuuccgggugcagcccaccgaauccaucgugcgguuccccaauaucaccaaucugugccccuucggcgagguguucaaugccaccagauucgccucuguguacgccuggaaccggaagcggaucagcaauugcguggccgacuacuccgugcuguacaacuccgccagcuucagcaccuucaagugcuacggcguguccccuaccaagcugaacgaccugugcuucacaaacguguacgccgacagcuucgugauccggggagaugaagugcggcagauugccccuggacagacaggcaagaucgccgacuacaacuacaagcugcccgacgacuucaccggcugugugauugccuggaacagcaacaaccuggacuccaaagucggcggcaacuacaauuaccgcuaccggcuguuccggaaguccaaucugaagcccuucgagcgggacaucuccaccgagaucuaucaggccggcagcaccccuuguaacggcguggaaggcuucaacugcuacuucccacugcaguccuacggcuuucagcccacaaauggcgugggcuaucagcccuacagagugguggugcugagcuucgaacugcugcaugccccugccacagugugcggcccuaagaaaagcaccaaucucgugaagaacaaaugcgugaacuucaacuucaacggccugaccggcaccggcgugcugacagagagcaacaagaaguuccugccauuccagcaguuuggccgggauaucgccgauaccacagacgccguuagagauccccagacacuggaaauccuggacaucaccccuugcagcuucggcggagugucugugaucaccccuggcaccaacaccagcaaucagguggcagugcuguaccagggcgugaacuguaccgaagugcccguggccauucacgccgaucagcugacaccuacauggcggguguacuccaccggcagcaauguguuucagaccagagccggcugucugaucggagccgagcacgugaacaauagcuacgagugcgacauccccaucggcgcuggaaucugcgccagcuaccagacacagacaaacagcccucggagagccagaagcguggccagccagagcaucauugccuacacaaugucucugggcgccgagaacagcguggccuacuccaacaacucuaucgcuauccccaccaacuucaccaucagcgugaccacagagauccugccuguguccaugaccaagaccagcguggacugcaccauguacaucugcggcgauuccaccgagugcuccaaccugcugcugcaguacggcagcuucugcacccagcugaauagagcccugacagggaucgccguggaacaggacaagaacacccaagagguguucgcccaagugaagcagaucuacaagaccccuccuaucaaggacuucggcggcuucaauuucagccagauucugcccgauccuagcaagcccagcaagcggagcuucaucgaggaccugcuguucaacaaagugacacuggccgacgccggcuucaucaagcaguauggcgauugucugggcgacauugccgccagggaucugauuugcgcccagaaguuuaacggacugacagugcugccuccucugcugaccgaugagaugaucgcccaguacacaucugcccugcuggccggcacaaucacaagcggcuggacauuuggagcaggcgccgcucugcagauccccuuugcuaugcagauggccuaccgguucaacggcaucggagugacccagaaugugcuguacgagaaccagaagcugaucgccaaccaguucaacagcgccaucggcaagauccaggacagccugagcagcacagcaagcgcccugggaaagcugcaggacguggucaaccagaaugcccaggcacugaacacccuggucaagcagcuguccuccaacuucggcgccaucagcucugugcugaacgauauccugagcagacuggacaaggucgaggccgaggugcagaucgacagacugaucacaggcagacugcagagccuccagacauacgugacccagcagcugaucagagccgccgagauuagagccucugccaaucuggccgccaccaagaugucugagugugugcugggccagagcaagagaguggacuuuugcggcaagggcuaccaccugaugagcuucccucagucugccccucacggcgugguguuucugcacgugacauaugugcccgcucaagagaagaauuucaccaccgcuccagccaucugccacgacggcaaagcccacuuuccuagagaaggcguguucguguccaacggcacccauugguucgugacacagcggaacuucuacgagccccagaucaucaccaccgacaacaccuucgugucuggcaacugcgacgucgugaucggcauugugaacaauaccguguacgacccucugcagcccgagcuggacagcuucaaagaggaacuggacaaguacuuuaagaaccacacaagccccgacguggaccugggcgauaucagcggaaucaaugccagcgucgugaacauccagaaagagaucgaccggcugaacgagguggccaagaaucugaacgagagccugaucgaccugcaagaacuggggaaguacgagcaguacaucaaguggcccugguacaucuggcugggcuuuaucgccggacugauugccaucgugauggucacaaucaugcuguguugcaugaccagcugcuguagcugccugaagggcuguuguagcuguggcagcugcugcaaguucgacgaggacgauucugagcccgugcugaagggcgugaaacugcacuacacaugaggacuaguuauaagacugacuagcccgaugggccucccaacgggcccuccuccccuccuugcaccgagauuaauaaaaaaaaaaaaaaaaaaaaaaaaaaaaaaaaaaaaaaaaaaaaaaaaaaaaaaaaaaaaaaaaugcaucccccccccccccccccccccccccccccccaaaggcucuuuucagagccaccagaauu

SEQ ID NO: 23297 - RNA, 4039 nt, Artificial Sequence; identical to SEQ ID NO: 163
  SARS-CoV-2/Wuhan/WIV05/2019__EPI_ISL_402128 spike protein mRNA gc (1-1273)(K986P_V987P) R9515, R10157

SEQ ID NO: 23298 - RNA, 4039 nt, Artificial Sequence; identical to SEQ ID NO: 22819
  SARS-CoV-2/Wuhan/WIV05/2019__EPI_ISL_402128 spike protein mRNA gc (1-1273)(K986P_V987P_ D614G) R10165

SEQ ID NO: 23299 - RNA, 4039 nt, Artificial Sequence; identical to SEQ ID NO: 22821
  SARS-CoV-2/Wuhan/WIV05/2019__EPI_ISL_402128 spike protein mRNA gc (1-1273)(K986P_V987P_A222V_D614G) R10277

SEQ ID NO: 23300 - RNA, 4039 nt, Artificial Sequence; identical to SEQ ID NO: 22823
  SARS-CoV-2/Wuhan/WIV05/2019__EPI_ISL_402128 spike protein mRNA gc (1-1273)(K986P_V987P_N439K_D614G) R10297

SEQ ID NO: 23301 - RNA, 4039 nt, Artificial Sequence; identical to SEQ ID NO: 22825
  SARS-CoV-2/Wuhan/WIV05/2019__EPI_ISL_402128 spike protein mRNA gc (1-1273)(K986P_V987P_S477N_D614G) R10285

SEQ ID NO: 23302 - RNA, 4039 nt, Artificial Sequence; identical to SEQ ID NO: 22827
  SARS-CoV-2/Wuhan/WIV05/2019__EPI_ISL_402128 spike protein mRNA gc (1-1273)(K986P_V987P_N501Y_D614G) R10351

SEQ ID NO: 23303 - RNA, 4033 nt, Artificial Sequence; identical to SEQ ID NO: 22829
  SARS-CoV-2/Wuhan/WIV05/2019__EPI_ISL_402128 spike protein mRNA gc (1-1273)(K986P_V987P_H69del_V70del_D614G) R10273

SEQ ID NO: 23304 - RNA, 4039 nt, Artificial Sequence; identical to SEQ ID NO: 22831
  SARS-CoV-2/Wuhan/WIV05/2019__EPI_ISL_402128 spike protein mRNA gc (1-1273)(K986P_V987P_Y453F_D614G) R10281

SEQ ID NO: 23305 - RNA, 4039 nt, Artificial Sequence; identical to SEQ ID NO: 22833
  SARS-CoV-2/Wuhan/WIV05/2019__EPI_ISL_402128 spike protein mRNA gc (1-1273)(K986P_V987P_D614G_I692V) R10289

SEQ ID NO: 23306 - RNA, 4039 nt, Artificial Sequence; identical to SEQ ID NO: 22835
  SARS-CoV-2/Wuhan/WIV05/2019__EPI_ISL_402128 spike protein mRNA gc (1-1273)(K986P_V987P_D614G_M1229I) R10345

SEQ ID NO: 23307 - RNA, 4033 nt, Artificial Sequence; identical to SEQ ID NO: 22837
  SARS-CoV-2/Wuhan/WIV05/2019__EPI_ISL_402128 spike protein mRNA gc (1-1273)(K986P_V987P_H69del_V70del_A222V_Y453F_S477N_D614G_I692V) R10293

SEQ ID NO: 23308 - RNA, 4033 nt, Artificial Sequence; identical to SEQ ID NO: 22839
  SARS-CoV-2/Wuhan/WIV05/2019__EPI_ISL_402128 spike protein mRNA gc (1-1273)(K986P_V987P_H69del_V70del_Y453F_D614G_I692V_M1229I) R10347

SEQ ID NO: 23309 - RNA, 4030 nt, Artificial Sequence
  SARS-CoV-2/Wuhan/WIV05/2019__EPI_ISL_402128 spike protein mRNA gc (1-1273)(K986P_V987P_K986P_V987P_H69del_V70del_Y144del_N501Y_A570 D_D614G_P681H_T716I_S982A_D1118H) R10353
aggagaaagcuuaccauguucguguuccugguccuccugccccuggugagcucccagugcgugaaccucaccacccgcacgcagcugccgcccgccuacaccaacagcuucacccggggcgucuacuaccccgacaagguguuccgcuccagcgugcugcacuccacccaggaccucuuccugcccuucuucagcaacgucacgugguuccacgccaucuccgggaccaacggcaccaagcgguucgacaacccggugcugcccuucaacgacggggucuacuucgcgagcaccgagaaguccaacaucauccgcggcuggaucuucgggacgacccucgacagcaagacccagucccugcugaucgugaacaacgccaccaacguggucaucaaggugugcgaguuccaguucugcaacgaccccuuccucggcguguaccacaagaacaacaagagcuggauggaguccgaguuccgggucuacagcuccgccaacaacugcacguucgaguacgugagccagcccuuccugauggaccuggagggcaagcaggggaacuucaagaaccuccgcgaguucguguucaagaacaucgacggcuacuucaagaucuacuccaagcacaccccgaucaaccugguccgggaccugccccagggguucagcgcccucgagccccugguggaccugcccaucggcaucaacaucacccgcuuccagacccuccuggcccugcaccgguccuaccucacgccgggggacagcagcuccggcuggaccgcgggcgccgccgccuacuacgugggguaccugcagccccgcaccuuccugcucaaguacaacgagaacggcaccaucacggacgcggucgacugcgcccuggacccccugagcgagaccaagugcacccucaaguccuucaccguggagaaggggaucuaccagacgagcaacuuccgggugcagcccaccgaguccaucguccgcuucccgaacaucaccaaccugugccccuucggcgagguguucaacgccacccgguucgccagcgucuacgccuggaaccgcaagcggaucuccaacugcguggcggacuacagcgugcuguacaacuccgccagcuucuccacguucaagugcuacggcgucagccccaccaagcucaacgaccugugcuucaccaacguguacgccgacuccuucgugauccgcggggacgagguccggcagaucgcccccggccagaccgggaagaucgccgacuacaacuacaagcugccggacgacuucacgggcugcgugaucgcguggaacagcaacaaccucgacuccaaggucgggggcaacuacaacuaccuguaccgccuguuccgcaagagcaaccucaagcccuucgagcgggacaucuccaccgagaucuaccaggccggcagcacccccugcaacgggguggagggcuucaacugcuacuucccccugcaguccuacggguuccagccgaccuacggcgugggguaccagcccuaccggguggucgugcugagcuucgagcuccugcacgcccccgccacggugugcggccccaagaaguccaccaaccuggucaagaacaagugcgugaacuucaacuucaacggccucaccgggaccggcgugcugaccgagagcaacaagaaguuccugccguuccagcaguucgggcgcgacaucgacgacacgaccgacgcgguccgcgacccccagacccuggagauccucgacaucacccccugcagcuucggcgggguguccgugaucacgccgggcaccaacaccagcaaccaggucgccgugcuguaccagggcgugaacugcaccgagguccccguggccauccacgccgaccagcugacgcccaccuggcggguguacuccaccggcagcaacgucuuccagacccgcgccgggugccucaucggcgcggagcacgugaacaacuccuacgagugcgacauccccaucggggccggcaucugcgccagcuaccagacgcagaccaacucccaccggcgcgcccggagcguggcgucccagagcaucaucgccuacaccaugucccugggcgccgagaacagcgucgccuacuccaacaacagcaucgccauccccaucaacuucacgaucuccgugaccaccgagauccugcccgugagcaugaccaagacgagcgucgacugcaccauguacaucugcggggacuccaccgagugcagcaaccuccugcugcaguacggcuccuucugcacccagcucaaccgcgcgcugacggggaucgccguggagcaggacaagaacacccaggagguguucgcccaggucaagcagaucuacaagacgcccccgaucaaggacuucggcggguucaacuucagccagauccugcccgaccccuccaagcccagcaagcgguccuucaucgaggaccuccuguucaacaaggugacccuggccgacgccggcuucaucaagcaguacggcgacugccucggggacaucgcggcccgcgaccugaucugcgcccagaaguucaacggccugaccgugcucccgccccugcugaccgacgagaugaucgcccaguacaccagcgcccuccuggcggggaccaucacguccggcuggaccuucggggccggcgccgcccugcagauccccuucgcgaugcagauggccuaccgguucaacggcaucggggucacccagaacgugcucuacgagaaccagaagcugaucgccaaccaguucaacagcgccaucggcaagauccaggacucccugagcuccaccgccagcgcgcucgggaagcugcaggacguggucaaccagaacgcccaggcccugaacacgcucgugaagcagcuguccagcaacuucggcgccaucuccagcgugcugaacgacauccucgcccgccuggacccgcccgaggccgaggugcagaucgaccggcugaucaccgggcgccuccagagccugcagaccuacgugacccagcagcugauccgggcggccgagauccgcgccagcgccaaccucgccgcgaccaagauguccgagugcguccugggccagagcaagcggguggacuucugcggcaagggguaccaccugauguccuucccccagagcgccccgcacggcguggucuuccuccacgugacguacguccccgcccaggagaagaacuucaccaccgcccccgcgaucugccacgacgggaaggcccacuucccccgcgagggcguguucguguccaacgggacccacugguucgucacgcagcggaacuucuacgagccgcagaucaucaccacccacaacaccuucgugagcggcaacugcgacguggucaucggcaucgugaacaacacgguguacgacccccugcagcccgagcuggacuccuucaaggaggagcucgacaaguacuucaagaaccacaccagccccgacgucgaccugggggacaucuccggcaucaacgccagcguggugaacauccagaaggagaucgaccgccugaacgaggucgccaagaaccucaacgagucccugaucgaccugcaggagcucgggaaguacgagcaguacaucaaguggccgugguacaucuggcugggcuucaucgccggccugaucgcgaucgugauggugaccaucaugcucugcugcaugaccagcugcugcuccugccugaaggggugcugcagcugcggcuccugcugcaaguucgacgaggacgacagcgagcccguccugaagggggugaagcuccacuacacgugaggacuaguuauaagacugacuagcccgaugggccucccaacgggcccuccuccccuccuugcaccgagauuaauaaaaaaaaaaaaaaaaaaaaaaaaaaaaaaaaaaaaaaaaaaaaaaaaaaaaaaaaaaaaaaaaugcaucccccccccccccccccccccccccccccccaaaggcucuuuucagagccaccagaauu

SEQ ID NO: 23310 - RNA, 4039 nt, Artificial Sequence
  SARS-CoV-2/Wuhan/WIV05/2019__EPI_ISL_402128 spike protein mRNA gc (1-1273)(K986P_V987P_K986P_V987P_K417N_E484K_N501Y_D614G) R10360
aggagaaagcuuaccauguucguguuccugguccuccugccccuggugagcucccagugcgugaaccucaccacccgcacgcagcugccgcccgccuacaccaacagcuucacccggggcgucuacuaccccgacaagguguuccgcuccagcgugcugcacuccacccaggaccucuuccugcccuucuucagcaacgucacgugguuccacgccauccacguguccgggaccaacggcaccaagcgguucgacaacccggugcugcccuucaacgacggggucuacuucgcgagcaccgagaaguccaacaucauccgcggcuggaucuucgggacgacccucgacagcaagacccagucccugcugaucgugaacaacgccaccaacguggucaucaaggugugcgaguuccaguucugcaacgaccccuuccucggcguguacuaccacaagaacaacaagagcuggauggaguccgaguuccgggucuacagcuccgccaacaacugcacguucgaguacgugagccagcccuuccugauggaccuggagggcaagcaggggaacuucaagaaccuccgcgaguucguguucaagaacaucgacggcuacuucaagaucuacuccaagcacaccccgaucaaccugguccgggaccugccccagggguucagcgcccucgagccccugguggaccugcccaucggcaucaacaucacccgcuuccagacccuccuggcccugcaccgguccuaccucacgccgggggacagcagcuccggcuggaccgcgggcgccgccgccuacuacgugggguaccugcagccccgcaccuuccugcucaaguacaacgagaacggcaccaucacggacgcggucgacugcgcccuggacccccugagcgagaccaagugcacccucaaguccuucaccguggagaaggggaucuaccagacgagcaacuuccgggugcagcccaccgaguccaucguccgcuucccgaacaucaccaaccugugccccuucggcgagguguucaacgccacccgguucgccagcgucuacgccuggaaccgcaagcggaucuccaacugcguggcggacuacagcgugcuguacaacuccgccagcuucuccacguucaagugcuacggcgucagccccaccaagcucaacgaccugugcuucaccaacguguacgccgacuccuucgugauccgcggggacgagguccggcagaucgcccccggccagaccgggaacaucgccgacuacaacuacaagcugccggacgacuucacgggcugcgugaucgcguggaacagcaacaaccucgacuccaaggucgggggcaacuacaacuaccuguaccgccuguuccgcaagagcaaccucaagcccuucgagcgggacaucuccaccgagaucuaccaggccggcagcacccccugcaacggggugaagggcuucaacugcuacuucccccugcaguccuacggguuccagccgaccuacggcgugggguaccagcccuaccggguggucgugcugagcuucgagcuccugcacgcccccgccacggugugcggccccaagaaguccaccaaccuggucaagaacaagugcgugaacuucaacuucaacggccucaccgggaccggcgugcugaccgagagcaacaagaaguuccugccguuccagcaguucgggcgcgacaucgccgacacgaccgacgcgguccgcgacccccagacccuggagauccucgacaucacccccugcagcuucggcgggguguccgugaucacgccgggcaccaacaccagcaaccaggucgccgugcuguaccagggcgugaacugcaccgagguccccguggccauccacgccgaccagcugacgcccaccuggcggguguacuccaccggcagcaacgucuuccagacccgcgccgggugccucaucggcgcggagcacgugaacaacuccuacgagugcgacauccccaucggggccggcaucugcgccagcuaccagacgcagaccaacuccccgcggcgcgcccggagcguggcgucccagagcaucaucgccuacaccaugucccugggcgccgagaacagcgucgccuacuccaacaacagcaucgccauccccaccaacuucacgaucuccgugaccaccgagauccugcccgugagcaugaccaagacgagcgucgacugcaccauguacaucugcggggacuccaccgagugcagcaaccuccugcugcaguacggcuccuucugcacccagcucaaccgcgcgcugacggggaucgccguggagcaggacaagaacacccaggagguguucgcccaggucaagcagaucuacaagacgcccccgaucaaggacuucggcggguucaacuucagccagauccugcccgaccccuccaagcccagcaagcgguccuucaucgaggaccuccuguucaacaaggugacccuggccgacgccggcuucaucaagcaguacggcgacugccucggggacaucgcggcccgcgaccugaucugcgcccagaaguucaacggccugaccgugcucccgccccugcugaccgacgagaugaucgcccaguacaccagcgcccuccuggcggggaccaucacguccggcuggaccuucggggccggcgccgcccugcagauccccuucgcgaugcagauggccuaccgguucaacggcaucggggucacccagaacgugcucuacgagaaccagaagcugaucgccaaccaguucaacagcgccaucggcaagauccaggacucccugagcuccaccgccagcgcgcucgggaagcugcaggacguggucaaccagaacgcccaggcccugaacacgcucgugaagcagcuguccagcaacuucggcgccaucuccagcgugcugaacgacauccucucccgccuggacccgcccgaggccgaggugcagaucgaccggcugaucaccgggcgccuccagagccugcagaccuacgugacccagcagcugauccgggcggccgagauccgcgccagcgccaaccucgccgcgaccaagauguccgagugcguccugggccagagcaagcggguggacuucugcggcaagggguaccaccugauguccuucccccagagcgccccgcacggcguggucuuccuccacgugacguacguccccgcccaggagaagaacuucaccaccgcccccgcgaucugccacgacgggaaggcccacuucccccgcgagggcguguucguguccaacgggacccacugguucgucacgcagcggaacuucuacgagccgcagaucaucaccaccgacaacaccuucgugagcggcaacugcgacguggucaucggcaucgugaacaacacgguguacgacccccugcagcccgagcuggacuccuucaaggaggagcucgacaaguacuucaagaaccacaccagccccgacgucgaccugggggacaucuccggcaucaacgccagcguggugaacauccagaaggagaucgaccgccugaacgaggucgccaagaaccucaacgagucccugaucgaccugcaggagcucgggaaguacgagcaguacaucaaguggccgugguacaucuggcugggcuucaucgccggccugaucgcgaucgugauggugaccaucaugcucugcugcaugaccagcugcugcuccugccugaaggggugcugcagcugcggcuccugcugcaaguucgacgaggacgacagcgagcccguccugaagggggugaagcuccacuacacgugaggacuaguuauaagacugacuagcccgaugggccucccaacgggcccuccuccccuccuugcaccgagauuaauaaaaaaaaaaaaaaaaaaaaaaaaaaaaaaaaaaaaaaaaaaaaaaaaaaaaaaaaaaaaaaaaugcaucccccccccccccccccccccccccccccccaaaggcucuuuucagagccaccagaauu

SEQ ID NO: 23311 - RNA, 4030 nt, Artificial Sequence
  SARS-CoV-2/Wuhan/WIV05/2019__EPI_ISL_402128 spike protein mRNA gc (1-1273)(K986P_V987P_K986P_V987P_L18F_D80A_D215G_L242del_A243del_ L244del_R246I_K417N_E484K_N501Y_D614G_A701V) R10379
aggagaaagcuuaccauguucguguuccugguccuccugccccuggugagcucccagugcgugaacuucaccacccgcacgcagcugccgcccgccuacaccaacagcuucacccggggcgucuacuaccccgacaagguguuccgcuccagcgugcugcacuccacccaggaccucuuccugcccuucuucagcaacgucacgugguuccacgccauccacguguccgggaccaacggcaccaagcgguucgccaacccggugcugcccuucaacgacggggucuacuucgcgagcaccgagaaguccaacaucauccgcggcuggaucuucgggacgacccucgacagcaagacccagucccugcugaucgugaacaacgccaccaacguggucaucaaggugugcgaguuccaguucugcaacgaccccuuccucggcguguacuaccacaagaacaacaagagcuggauggaguccgaguuccgggucuacagcuccgccaacaacugcacguucgaguacgugagccagcccuuccugauggaccuggagggcaagcaggggaacuucaagaaccuccgcgaguucguguucaagaacaucgacggcuacuucaagaucuacuccaagcacaccccgaucaaccugguccggggccugccccagggguucagcgcccucgagccccugguggaccugcccaucggcaucaacaucacccgcuuccagacccuccacaucuccuaccucacgccgggggacagcagcuccggcuggaccgcgggcgccgccgccuacuacgugggguaccugcagccccgcaccuuccugcucaaguacaacgagaacggcaccaucacggacgcggucgacugcgcccuggacccccugagcgagaccaagugcacccucaaguccuucaccguggagaaggggaucuaccagacgagcaacuuccgggugcagcccaccgaguccaucguccgcuucccgaacaucaccaaccugugccccuucggcgagguguucaacgccacccgguucgccagcgucuacgccuggaaccgcaagcggaucuccaacugcguggcggacuacagcgugcuguacaacuccgccagcuucuccacguucaagugcuacggcgucagccccaccaagcucaacgaccugugcuucaccaacguguacgccgacuccuucgugauccgcggggacgagguccggcagaucgcccccggccagaccgggaacaucgccgacuacaacuacaagcugccggacgacuucacgggcugcgugaucgcguggaacagcaacaaccucgacuccaaggucgggggcaacuacaacuaccuguaccgccuguuccgcaagagcaaccucaagcccuucgagcgggacaucuccaccgagaucuaccaggccggcagcacccccugcaacggggugaagggcuucaacugcuacuucccccugcaguccuacggguuccagccgaccuacggcgugggguaccagcccuaccggguggucgugcugagcuucgagcuccugcacgcccccgccacggugugcggccccaagaaguccaccaaccuggucaagaacaagugcgugaacuucaacuucaacggccucaccgggaccggcgugcugaccgagagcaacaagaaguuccugccguuccagcaguucgggcgcgacaucgccgacacgaccgacgcgguccgcgacccccagacccuggagauccucgacaucacccccugcagcuucggcgggguguccgugaucacgccgggcaccaacaccagcaaccaggucgccgugcuguaccagggcgugaacugcaccgagguccccguggccauccacgccgaccagcugacgcccaccuggcggguguacuccaccggcagcaacgucuuccagacccgcgccgggugccucaucggcgcggagcacgugaacaacuccuacgagugcgacauccccaucggggccggcaucugcgccagcuaccagacgcagaccaacuccccgcggcgcgcccggagcguggcgucccagagcaucaucgccuacaccaugucccugggcguggagaacagcgucgccuacuccaacaacagcaucgccauccccaccaacuucacgaucuccgugaccaccgagauccugcccgugagcaugaccaagacgagcgucgacugcaccauguacaucugcggggacuccaccgagugcagcaaccuccugcugcaguacggcuccuucugcacccagcucaaccgcgcgcugacggggaucgccguggagcaggacaagaacacccaggagguguucgcccaggucaagcagaucuacaagacgcccccgaucaaggacuucggcggguucaacuucagccagauccugcccgaccccuccaagcccagcaagcgguccuucaucgaggaccuccuguucaacaaggugacccuggccgacgccggcuucaucaagcaguacggcgacugccucggggacaucgcggcccgcgaccugaucugcgcccagaaguucaacggccugaccgugcucccgccccugcugaccgacgagaugaucgcccaguacaccagcgcccuccuggcggggaccaucacguccggcuggaccuucggggccggcgccgcccugcagauccccuucgcgaugcagauggccuaccgguucaacggcaucggggucacccagaacgugcucuacgagaaccagaagcugaucgccaaccaguucaacagcgccaucggcaagauccaggacucccugagcuccaccgccagcgcgcucgggaagcugcaggacguggucaaccagaacgcccaggcccugaacacgcucgugaagcagcuguccagcaacuucggcgccaucuccagcgugcugaacgacauccucucccgccuggacccgcccgaggccgaggugcagaucgaccggcugaucaccgggcgccuccagagccugcagaccuacgugacccagcagcugauccgggcggccgagauccgcgccagcgccaaccucgccgcgaccaagauguccgagugcguccugggccagagcaagcggguggacuucugcggcaagggguaccaccugauguccuucccccagagcgccccgcacggcguggucuuccuccacgugacguacguccccgcccaggagaagaacuucaccaccgcccccgcgaucugccacgacgggaaggcccacuucccccgcgagggcguguucguguccaacgggacccacugguucgucacgcagcggaacuucuacgagccgcagaucaucaccaccgacaacaccuucgugagcggcaacugcgacguggucaucggcaucgugaacaacacgguguacgacccccugcagcccgagcuggacuccuucaaggaggagcucgacaaguacuucaagaaccacaccagccccgacgucgaccugggggacaucuccggcaucaacgccagcguggugaacauccagaaggagaucgaccgccugaacgaggucgccaagaaccucaacgagucccugaucgaccugcaggagcucgggaaguacgagcaguacaucaaguggccgugguacaucuggcugggcuucaucgccggccugaucgcgaucgugauggugaccaucaugcucugcugcaugaccagcugcugcuccugccugaaggggugcugcagcugcggcuccugcugcaaguucgacgaggacgacagcgagcccguccugaagggggugaagcuccacuacacgugaggacuaguuauaagacugacuagcccgaugggccucccaacgggcccuccuccccuccuugcaccgagauuaauaaaaaaaaaaaaaaaaaaaaaaaaaaaaaaaaaaaaaaaaaaaaaaaaaaaaaaaaaaaaaaaaugcaucccccccccccccccccccccccccccccccaaaggcucuuuucagagccaccagaauu

SEQ ID NO: 23312 - RNA, 4039 nt, Artificial Sequence
  SARS-CoV-2/Wuhan/WIV05/2019__EPI_ISL_402128 spike protein mRNA gc (1-1273)(K986P_V987P_K986P_V987P_E484K_D614G) R10378
aggagaaagcuuaccauguucguguuccugguccuccugccccuggugagcucccagugcgugaaccucaccacccgcacgcagcugccgcccgccuacaccaacagcuucacccggggcgucuacuaccccgacaagguguuccgcuccagcgugcugcacuccacccaggaccucuuccugcccuucuucagcaacgucacgugguuccacgccauccacguguccgggaccaacggcaccaagcgguucgacaacccggugcugcccuucaacgacggggucuacuucgcgagcaccgagaaguccaacaucauccgcggcuggaucuucgggacgacccucgacagcaagacccagucccugcugaucgugaacaacgccaccaacguggucaucaaggugugcgaguuccaguucugcaacgaccccuuccucggcguguacuaccacaagaacaacaagagcuggauggaguccgaguuccgggucuacagcuccgccaacaacugcacguucgaguacgugagccagcccuuccugauggaccuggagggcaagcaggggaacuucaagaaccuccgcgaguucguguucaagaacaucgacggcuacuucaagaucuacuccaagcacaccccgaucaaccugguccgggaccugccccagggguucagcgcccucgagccccugguggaccugcccaucggcaucaacaucacccgcuuccagacccuccuggcccugcaccgguccuaccucacgccgggggacagcagcuccggcuggaccgcgggcgccgccgccuacuacgugggguaccugcagccccgcaccuuccugcucaaguacaacgagaacggcaccaucacggacgcggucgacugcgcccuggacccccugagcgagaccaagugcacccucaaguccuucaccguggagaaggggaucuaccagacgagcaacuuccgggugcagcccaccgaguccaucguccgcuucccgaacaucaccaaccugugccccuucggcgagguguucaacgccacccgguucgccagcgucuacgccuggaaccgcaagcggaucuccaacugcguggcggacuacagcgugcuguacaacuccgccagcuucuccacguucaagugcuacggcgucagccccaccaagcucaacgaccugugcuucaccaacguguacgccgacuccuucgugauccgcggggacgagguccggcagaucgcccccggccagaccgggaagaucgccgacuacaacuacaagcugccggacgacuucacgggcugcgugaucgcguggaacagcaacaaccucgacuccaaggucgggggcaacuacaacuaccuguaccgccuguuccgcaagagcaaccucaagcccuucgagcgggacaucuccaccgagaucuaccaggccggcagcacccccugcaacggggugaagggcuucaacugcuacuucccccugcaguccuacggguuccagccgaccaacggcgugggguaccagcccuaccggguggucgugcugagcuucgagcuccugcacgcccccgccacggugugcggccccaagaaguccaccaaccuggucaagaacaagugcgugaacuucaacuucaacggccucaccgggaccggcgugcugaccgagagcaacaagaaguuccugccguuccagcaguucgggcgcgacaucgccgacacgaccgacgcgguccgcgacccccagacccuggagauccucgacaucacccccugcagcuucggcgggguguccgugaucacgccgggcaccaacaccagcaaccaggucgccgugcuguaccagggcgugaacugcaccgagguccccguggccauccacgccgaccagcugacgcccaccuggcggguguacuccaccggcagcaacgucuuccagacccgcgccgggugccucaucggcgcggagcacgugaacaacuccuacgagugcgacauccccaucggggccggcaucugcgccagcuaccagacgcagaccaacuccccgcggcgcgcccggagcguggcgucccagagcaucaucgccuacaccaugucccugggcgccgagaacagcgucgccuacuccaacaacagcaucgccauccccaccaacuucacgaucuccgugaccaccgagauccugcccgugagcaugaccaagacgagcgucgacugcaccauguacaucugcggggacuccaccgagugcagcaaccuccugcugcaguacggcuccuucugcacccagcucaaccgcgcgcugacggggaucgccguggagcaggacaagaacacccaggagguguucgcccaggucaagcagaucuacaagacgcccccgaucaaggacuucggcggguucaacuucagccagauccugcccgaccccuccaagcccagcaagcgguccuucaucgaggaccuccuguucaacaaggugacccuggccgacgccggcuucaucaagcaguacggcgacugccucggggacaucgcggcccgcgaccugaucugcgcccagaaguucaacggccugaccgugcucccgccccugcugaccgacgagaugaucgcccaguacaccagcgcccuccuggcggggaccaucacguccggcuggaccuucggggccggcgccgcccugcagauccccuucgcgaugcagauggccuaccgguucaacggcaucggggucacccagaacgugcucuacgagaaccagaagcugaucgccaaccaguucaacagcgccaucggcaagauccaggacucccugagcuccaccgccagcgcgcucgggaagcugcaggacguggucaaccagaacgcccaggcccugaacacgcucgugaagcagcuguccagcaacuucggcgccaucuccagcgugcugaacgacauccucucccgccuggacccgcccgaggccgaggugcagaucgaccggcugaucaccgggcgccuccagagccugcagaccuacgugacccagcagcugauccgggcggccgagauccgcgccagcgccaaccucgccgcgaccaagauguccgagugcguccugggccagagcaagcggguggacuucugcggcaagggguaccaccugauguccuucccccagagcgccccgcacggcguggucuuccuccacgugacguacguccccgcccaggagaagaacuucaccaccgcccccgcgaucugccacgacgggaaggcccacuucccccgcgagggcguguucguguccaacgggacccacugguucgucacgcagcggaacuucuacgagccgcagaucaucaccaccgacaacaccuucgugagcggcaacugcgacguggucaucggcaucgugaacaacacgguguacgacccccugcagcccgagcuggacuccuucaaggaggagcucgacaaguacuucaagaaccacaccagccccgacgucgaccugggggacaucuccggcaucaacgccagcguggugaacauccagaaggagaucgaccgccugaacgaggucgccaagaaccucaacgagucccugaucgaccugcaggagcucgggaaguacgagcaguacaucaaguggccgugguacaucuggcugggcuucaucgccggccugaucgcgaucgugauggugaccaucaugcucugcugcaugaccagcugcugcuccugccugaaggggugcugcagcugcggcuccugcugcaaguucgacgaggacgacagcgagcccguccugaagggggugaagcuccacuacacgugaggacuaguuauaagacugacuagcccgaugggccucccaacgggcccuccuccccuccuugcaccgagauuaauaaaaaaaaaaaaaaaaaaaaaaaaaaaaaaaaaaaaaaaaaaaaaaaaaaaaaaaaaaaaaaaaugcaucccccccccccccccccccccccccccccccaaaggcucuuuucagagccaccagaauu

SEQ ID NO: 23313 - RNA, 4039 nt, Artificial Sequence
  SARS-CoV-2/Wuhan/WIV05/2019__EPI_ISL_402128 spike protein mRNA gc (1-1273)(K986P_V987P_K986P_V987P_L18F_T20N_P26S_D138Y_R190S_K417T _E484K_N501Y_D614G_H655Y_T1027I) R10380
aggagaaagcuuaccauguucguguuccugguccuccugccccuggugagcucccagugcgugaacuucaccaaccgcacgcagcugccgagcgccuacaccaacagcuucacccggggcgucuacuaccccgacaagguguuccgcuccagcgugcugcacuccacccaggaccucuuccugcccuucuucagcaacgucacgugguuccacgccauccacguguccgggaccaacggcaccaagcgguucgacaacccggugcugcccuucaacgacggggucuacuucgcgagcaccgagaaguccaacaucauccgcggcuggaucuucgggacgacccucgacagcaagacccagucccugcugaucgugaacaacgccaccaacguggucaucaaggugugcgaguuccaguucugcaacuaccccuuccucggcguguacuaccacaagaacaacaagagcuggauggaguccgaguuccgggucuacagcuccgccaacaacugcacguucgaguacgugagccagcccuuccugauggaccuggagggcaagcaggggaacuucaagaaccucagcgaguucguguucaagaacaucgacggcuacuucaagaucuacuccaagcacaccccgaucaaccugguccgggaccugccccagggguucagcgcccucgagccccugguggaccugcccaucggcaucaacaucacccgcuuccagacccuccuggcccugcaccgguccuaccucacgccgggggacagcagcuccggcuggaccgcgggcgccgccgccuacuacgugggguaccugcagccccgcaccuuccugcucaaguacaacgagaacggcaccaucacggacgcggucgacugcgcccuggacccccugagcgagaccaagugcacccucaaguccuucaccguggagaaggggaucuaccagacgagcaacuuccgggugcagcccaccgaguccaucguccgcuucccgaacaucaccaaccugugccccuucggcgagguguucaacgccacccgguucgccagcgucuacgccuggaaccgcaagcggaucuccaacugcguggcggacuacagcgugcuguacaacuccgccagcuucuccacguucaagugcuacggcgucagccccaccaagcucaacgaccugugcuucaccaacguguacgccgacuccuucgugauccgcggggacgagguccggcagaucgcccccggccagaccgggaccaucgccgacuacaacuacaagcugccggacgacuucacgggcugcgugaucgcguggaacagcaacaaccucgacuccaaggucgggggcaacuacaacuaccuguaccgccuguuccgcaagagcaaccucaagcccuucgagcgggacaucuccaccgagaucuaccaggccggcagcacccccugcaacggggugaagggcuucaacugcuacuucccccugcaguccuacggguuccagccgaccuacggcgugggguaccagcccuaccggguggucgugcugagcuucgagcuccugcacgcccccgccacggugugcggccccaagaaguccaccaaccuggucaagaacaagugcgugaacuucaacuucaacggccucaccgggaccggcgugcugaccgagagcaacaagaaguuccugccguuccagcaguucgggcgcgacaucgccgacacgaccgacgcgguccgcgacccccagacccuggagauccucgacaucacccccugcagcuucggcgggguguccgugaucacgccgggcaccaacaccagcaaccaggucgccgugcuguaccagggcgugaacugcaccgagguccccguggccauccacgccgaccagcugacgcccaccuggcggguguacuccaccggcagcaacgucuuccagacccgcgccgggugccucaucggcgcggaguacgugaacaacuccuacgagugcgacauccccaucggggccggcaucugcgccagcuaccagacgcagaccaacuccccgcggcgcgcccggagcguggcgucccagagcaucaucgccuacaccaugucccugggcgccgagaacagcgucgccuacuccaacaacagcaucgccauccccaccaacuucacgaucuccgugaccaccgagauccugcccgugagcaugaccaagacgagcgucgacugcaccauguacaucugcggggacuccaccgagugcagcaaccuccugcugcaguacggcuccuucugcacccagcucaaccgcgcgcugacggggaucgccguggagcaggacaagaacacccaggagguguucgcccaggucaagcagaucuacaagacgcccccgaucaaggacuucggcggguucaacuucagccagauccugcccgaccccuccaagcccagcaagcgguccuucaucgaggaccuccuguucaacaaggugacccuggccgacgccggcuucaucaagcaguacggcgacugccucggggacaucgcggcccgcgaccugaucugcgcccagaaguucaacggccugaccgugcucccgccccugcugaccgacgagaugaucgcccaguacaccagcgcccuccuggcggggaccaucacguccggcuggaccuucggggccggcgccgcccugcagauccccuucgcgaugcagauggccuaccgguucaacggcaucggggucacccagaacgugcucuacgagaaccagaagcugaucgccaaccaguucaacagcgccaucggcaagauccaggacucccugagcuccaccgccagcgcgcucgggaagcugcaggacguggucaaccagaacgcccaggcccugaacacgcucgugaagcagcuguccagcaacuucggcgccaucuccagcgugcugaacgacauccucucccgccuggacccgcccgaggccgaggugcagaucgaccggcugaucaccgggcgccuccagagccugcagaccuacgugacccagcagcugauccgggcggccgagauccgcgccagcgccaaccucgccgcgaucaagauguccgagugcguccugggccagagcaagcggguggacuucugcggcaagggguaccaccugauguccuucccccagagcgccccgcacggcguggucuuccuccacgugacguacguccccgcccaggagaagaacuucaccaccgcccccgcgaucugccacgacgggaaggcccacuucccccgcgagggcguguucguguccaacgggacccacugguucgucacgcagcggaacuucuacgagccgcagaucaucaccaccgacaacaccuucgugagcggcaacugcgacguggucaucggcaucgugaacaacacgguguacgacccccugcagcccgagcuggacuccuucaaggaggagcucgacaaguacuucaagaaccacaccagccccgacgucgaccugggggacaucuccggcaucaacgccagcguggugaacauccagaaggagaucgaccgccugaacgaggucgccaagaaccucaacgagucccugaucgaccugcaggagcucgggaaguacgagcaguacaucaaguggccgugguacaucuggcugggcuucaucgccggccugaucgcgaucgugauggugaccaucaugcucugcugcaugaccagcugcugcuccugccugaaggggugcugcagcugcggcuccugcugcaaguucgacgaggacgacagcgagcccguccugaagggggugaagcuccacuacacgugaggacuaguuauaagacugacuagcccgaugggccucccaacgggcccuccuccccuccuugcaccgagauuaauaaaaaaaaaaaaaaaaaaaaaaaaaaaaaaaaaaaaaaaaaaaaaaaaaaaaaaaaaaaaaaaaugcaucccccccccccccccccccccccccccccccaaaggcucuuuucagagccaccagaauu

SEQ ID NO: 23314 - RNA, 4039 nt, Artificial Sequence
  SARS-CoV-2/Wuhan/WIV05/2019__EPI_ISL_402128 spike protein mRNA gc (1-1273)(K986P_V987P_K986P_V987P_S13I_W152C_L452R_D614G) R10381
aggagaaagcuuaccauguucguguuccugguccuccugccccuggugagcauccagugcgugaaccucaccacccgcacgcagcugccgcccgccuacaccaacagcuucacccggggcgucuacuaccccgacaagguguuccgcuccagcgugcugcacuccacccaggaccucuuccugcccuucuucagcaacgucacgugguuccacgccauccacguguccgggaccaacggcaccaagcgguucgacaacccggugcugcccuucaacgacggggucuacuucgcgagcaccgagaaguccaacaucauccgcggcuggaucuucgggacgacccucgacagcaagacccagucccugcugaucgugaacaacgccaccaacguggucaucaaggugugcgaguuccaguucugcaacgaccccuuccucggcguguacuaccacaagaacaacaagagcugcauggaguccgaguuccgggucuacagcuccgccaacaacugcacguucgaguacgugagccagcccuuccugauggaccuggagggcaagcaggggaacuucaagaaccuccgcgaguucguguucaagaacaucgacggcuacuucaagaucuacuccaagcacaccccgaucaaccugguccgggaccugccccagggguucagcgcccucgagccccugguggaccugcccaucggcaucaacaucacccgcuuccagacccuccuggcccugcaccgguccuaccucacgccgggggacagcagcuccggcuggaccgcgggcgccgccgccuacuacgugggguaccugcagccccgcaccuuccugcucaaguacaacgagaacggcaccaucacggacgcggucgacugcgcccuggacccccugagcgagaccaagugcacccucaaguccuucaccguggagaaggggaucuaccagacgagcaacuuccgggugcagcccaccgaguccaucguccgcuucccgaacaucaccaaccugugccccuucggcgagguguucaacgccacccgguucgccagcgucuacgccuggaaccgcaagcggaucuccaacugcguggcggacuacagcgugcuguacaacuccgccagcuucuccacguucaagugcuacggcgucagccccaccaagcucaacgaccugugcuucaccaacguguacgccgacuccuucgugauccgcggggacgagguccggcagaucgcccccggccagaccgggaagaucgccgacuacaacuacaagcugccggacgacuucacgggcugcgugaucgcguggaacagcaacaaccucgacuccaaggucgggggcaacuacaacuaccgcuaccgccuguuccgcaagagcaaccucaagcccuucgagcgggacaucuccaccgagaucuaccaggccggcagcacccccugcaacgggguggagggcuucaacugcuacuucccccugcaguccuacggguuccagccgaccaacggcgugggguaccagcccuaccggguggucgugcugagcuucgagcuccugcacgcccccgccacggugugcggccccaagaaguccaccaaccuggucaagaacaagugcgugaacuucaacuucaacggccucaccgggaccggcgugcugaccgagagcaacaagaaguuccugccguuccagcaguucgggcgcgacaucgccgacacgaccgacgcgguccgcgacccccagacccuggagauccucgacaucacccccugcagcuucggcgggguguccgugaucacgccgggcaccaacaccagcaaccaggucgccgugcuguaccagggcgugaacugcaccgagguccccguggccauccacgccgaccagcugacgcccaccuggcggguguacuccaccggcagcaacgucuuccagacccgcgccgggugccucaucggcgcggagcacgugaacaacuccuacgagugcgacauccccaucggggccggcaucugcgccagcuaccagacgcagaccaacuccccgcggcgcgcccggagcguggcgucccagagcaucaucgccuacaccaugucccugggcgccgagaacagcgucgccuacuccaacaacagcaucgccauccccaccaacuucacgaucuccgugaccaccgagauccugcccgugagcaugaccaagacgagcgucgacugcaccauguacaucugcggggacuccaccgagugcagcaaccuccugcugcaguacggcuccuucugcacccagcucaaccgcgcgcugacggggaucgccguggagcaggacaagaacacccaggagguguucgcccaggucaagcagaucuacaagacgcccccgaucaaggacuucggcggguucaacuucagccagauccugcccgaccccuccaagcccagcaagcgguccuucaucgaggaccuccuguucaacaaggugacccuggccgacgccggcuucaucaagcaguacggcgacugccucggggacaucgcggcccgcgaccugaucugcgcccagaaguucaacggccugaccgugcucccgccccugcugaccgacgagaugaucgcccaguacaccagcgcccuccuggcggggaccaucacguccggcuggaccuucggggccggcgccgcccugcagauccccuucgcgaugcagauggccuaccgguucaacggcaucggggucacccagaacgugcucuacgagaaccagaagcugaucgccaaccaguucaacagcgccaucggcaagauccaggacucccugagcuccaccgccagcgcgcucgggaagcugcaggacguggucaaccagaacgcccaggcccugaacacgcucgugaagcagcuguccagcaacuucggcgccaucuccagcgugcugaacgacauccucucccgccuggacccgcccgaggccgaggugcagaucgaccggcugaucaccgggcgccuccagagccugcagaccuacgugacccagcagcugauccgggcggccgagauccgcgccagcgccaaccucgccgcgaccaagauguccgagugcguccugggccagagcaagcggguggacuucugcggcaagggguaccaccugauguccuucccccagagcgccccgcacggcguggucuuccuccacgugacguacguccccgcccaggagaagaacuucaccaccgcccccgcgaucugccacgacgggaaggcccacuucccccgcgagggcguguucguguccaacgggacccacugguucgucacgcagcggaacuucuacgagccgcagaucaucaccaccgacaacaccuucgugagcggcaacugcgacguggucaucggcaucgugaacaacacgguguacgacccccugcagcccgagcuggacuccuucaaggaggagcucgacaaguacuucaagaaccacaccagccccgacgucgaccugggggacaucuccggcaucaacgccagcguggugaacauccagaaggagaucgaccgccugaacgaggucgccaagaaccucaacgagucccugaucgaccugcaggagcucgggaaguacgagcaguacaucaaguggccgugguacaucuggcugggcuucaucgccggccugaucgcgaucgugauggugaccaucaugcucugcugcaugaccagcugcugcuccugccugaaggggugcugcagcugcggcuccugcugcaaguucgacgaggacgacagcgagcccguccugaagggggugaagcuccacuacacgugaggacuaguuauaagacugacuagcccgaugggccucccaacgggcccuccuccccuccuugcaccgagauuaauaaaaaaaaaaaaaaaaaaaaaaaaaaaaaaaaaaaaaaaaaaaaaaaaaaaaaaaaaaaaaaaaugcaucccccccccccccccccccccccccccccccaaaggcucuuuucagagccaccagaauu

SEQ ID NO: 23315 - RNA, 4039 nt, Artificial Sequence
  SARS-CoV-2/Wuhan/WIV05/2019__EPI_ISL_402128 spike protein mRNA gc (1-1273)(K986P_V987P)
aggagaaagcuuaccauguucguguuccugguccuccugccccuggugagcucccagugcgugaaccucaccacccgcacgcagcugccgcccgccuacaccaacagcuucacccggggcgucuacuaccccgacaagguguuccgcuccagcgugcugcacuccacccaggaccucuuccugcccuucuucagcaacgucacgugguuccacgccauccacguguccgggaccaacggcaccaagcgguucgacaacccggugcugcccuucaacgacggggucuacuucgcgagcaccgagaaguccaacaucauccgcggcuggaucuucgggacgacccucgacagcaagacccagucccugcugaucgugaacaacgccaccaacguggucaucaaggugugcgaguuccaguucugcaacgaccccuuccucggcguguacuaccacaagaacaacaagagcuggauggaguccgaguuccgggucuacagcuccgccaacaacugcacguucgaguacgugagccagcccuuccugauggaccuggagggcaagcaggggaacuucaagaaccuccgcgaguucguguucaagaacaucgacggcuacuucaagaucuacuccaagcacaccccgaucaaccugguccgggaccugccccagggguucagcgcccucgagccccugguggaccugcccaucggcaucaacaucacccgcuuccagacccuccuggcccugcaccgguccuaccucacgccgggggacagcagcuccggcuggaccgcgggcgccgccgccuacuacgugggguaccugcagccccgcaccuuccugcucaaguacaacgagaacggcaccaucacggacgcggucgacugcgcccuggacccccugagcgagaccaagugcacccucaaguccuucaccguggagaaggggaucuaccagacgagcaacuuccgggugcagcccaccgaguccaucguccgcuucccgaacaucaccaaccugugccccuucggcgagguguucaacgccacccgguucgccagcgucuacgccuggaaccgcaagcggaucuccaacugcguggcggacuacagcgugcuguacaacuccgccagcuucuccacguucaagugcuacggcgucagccccaccaagcucaacgaccugugcuucaccaacguguacgccgacuccuucgugauccgcggggacgagguccggcagaucgcccccggccagaccgggaagaucgccgacuacaacuacaagcugccggacgacuucacgggcugcgugaucgcguggaacagcaacaaccucgacuccaaggucgggggcaacuacaacuaccuguaccgccuguuccgcaagagcaaccucaagcccuucgagcgggacaucuccaccgagaucuaccaggccggcagcacccccugcaacgggguggagggcuucaacugcuacuucccccugcaguccuacggguuccagccgaccaacggcgugggguaccagcccuaccggguggucgugcugagcuucgagcuccugcacgcccccgccacggugugcggccccaagaaguccaccaaccuggucaagaacaagugcgugaacuucaacuucaacggccucaccgggaccggcgugcugaccgagagcaacaagaaguuccugccguuccagcaguucgggcgcgacaucgccgacacgaccgacgcgguccgcgacccccagacccuggagauccucgacaucacccccugcagcuucggcgggguguccgugaucacgccgggcaccaacaccagcaaccaggucgccgugcuguaccaggacgugaacugcaccgagguccccguggccauccacgccgaccagcugacgcccaccuggcggguguacuccaccggcagcaacgucuuccagacccgcgccgggugccucaucggcgcggagcacgugaacaacuccuacgagugcgacauccccaucggggccggcaucugcgccagcuaccagacgcagaccaacuccccgcggcgcgcccggagcguggcgucccagagcaucaucgccuacaccaugucccugggcgccgagaacagcgucgccuacuccaacaacagcaucgccauccccaccaacuucacgaucuccgugaccaccgagauccugcccgugagcaugaccaagacgagcgucgacugcaccauguacaucugcggggacuccaccgagugcagcaaccuccugcugcaguacggcuccuucugcacccagcucaaccgcgcgcugacggggaucgccguggagcaggacaagaacacccaggagguguucgcccaggucaagcagaucuacaagacgcccccgaucaaggacuucggcggguucaacuucagccagauccugcccgaccccuccaagcccagcaagcgguccuucaucgaggaccuccuguucaacaaggugacccuggccgacgccggcuucaucaagcaguacggcgacugccucggggacaucgcggcccgcgaccugaucugcgcccagaaguucaacggccugaccgugcucccgccccugcugaccgacgagaugaucgcccaguacaccagcgcccuccuggcggggaccaucacguccggcuggaccuucggggccggcgccgcccugcagauccccuucgcgaugcagauggccuaccgguucaacggcaucggggucacccagaacgugcucuacgagaaccagaagcugaucgccaaccaguucaacagcgccaucggcaagauccaggacucccugagcuccaccgccagcgcgcucgggaagcugcaggacguggucaaccagaacgcccaggcccugaacacgcucgugaagcagcuguccagcaacuucggcgccaucuccagcgugcugaacgacauccucucccgccuggacccgcccgaggccgagguccagaucgaccggcugaucaccgggcgccuccagagccugcagaccuacgugacccagcagcugauccgggcggccgagauccgcgccagcgccaaccucgccgcgaccaagauguccgagugcgugcugggccagagcaagcgggucgacuucugcggcaagggguaccaccugauguccuucccccagagcgcgccccacggcgugguguuccuccacgucacguacgugcccgcccaggagaagaacuucaccaccgccccggccaucugccacgacgggaaggcccacuucccccgcgagggcgucuucguguccaacgggacccacugguucgugacgcagcggaacuucuacgagccccagaucaucaccaccgacaacaccuucgucagcggcaacugcgacguggugaucggcaucgucaacaacacgguguacgacccccugcagccggagcuggacuccuucaaggaggagcucgacaaguacuucaagaaccacaccagccccgacguggaccugggggacaucuccggcaucaacgccagcgucgugaacauccagaaggagaucgaccgccugaacgagguggccaagaaccucaacgagucccugaucgaccugcaggagcucgggaaguacgagcaguacaucaaguggcccugguacaucuggcugggcuucaucgccggccugaucgcgaucgucauggugaccaucaugcucugcugcaugaccagcugcugcuccugccugaaggggugcugcagcugcggcuccugcugcaaguucgacgaggacgacagcgagccggugcugaagggggucaagcuccacuacacgugaggacuaguuauaagacugacuagcccgaugggccucccaacgggcccuccuccccuccuugcaccgagauuaauaaaaaaaaaaaaaaaaaaaaaaaaaaaaaaaaaaaaaaaaaaaaaaaaaaaaaaaaaaaaaaaaugcaucccccccccccccccccccccccccccccccaaaggcucuuuucagagccaccagaauu

SEQ ID NO: 23316 - RNA, 4039 nt, Artificial Sequence
  SARS-CoV-2/Wuhan/WIV05/2019__EPI_ISL_402128 spike protein mRNA gc (1-1273)(K986P_V987P_ D614G)
aggagaaagcuuaccauguucguguuccugguccuccugccccuggugagcucccagugcgugaaccucaccacccgcacgcagcugccgcccgccuacaccaacagcuucacccggggcgucuacuaccccgacaagguguuccgcuccagcgugcugcacuccacccaggaccucuuccugcccuucuucagcaacgucacgugguuccacgccauccacguguccgggaccaacggcaccaagcgguucgacaacccggugcugcccuucaacgacggggucuacuucgcgagcaccgagaaguccaacaucauccgcggcuggaucuucgggacgacccucgacagcaagacccagucccugcugaucgugaacaacgccaccaacguggucaucaaggugugcgaguuccaguucugcaacgaccccuuccucggcguguacuaccacaagaacaacaagagcuggauggaguccgaguuccgggucuacagcuccgccaacaacugcacguucgaguacgugagccagcccuuccugauggaccuggagggcaagcaggggaacuucaagaaccuccgcgaguucguguucaagaacaucgacggcuacuucaagaucuacuccaagcacaccccgaucaaccugguccgggaccugccccagggguucagcgcccucgagccccugguggaccugcccaucggcaucaacaucacccgcuuccagacccuccuggcccugcaccgguccuaccucacgccgggggacagcagcuccggcuggaccgcgggcgccgccgccuacuacgugggguaccugcagccccgcaccuuccugcucaaguacaacgagaacggcaccaucacggacgcggucgacugcgcccuggacccccugagcgagaccaagugcacccucaaguccuucaccguggagaaggggaucuaccagacgagcaacuuccgggugcagcccaccgaguccaucguccgcuucccgaacaucaccaaccugugccccuucggcgagguguucaacgccacccgguucgccagcgucuacgccuggaaccgcaagcggaucuccaacugcguggcggacuacagcgugcuguacaacuccgccagcuucuccacguucaagugcuacggcgucagccccaccaagcucaacgaccugugcuucaccaacguguacgccgacuccuucgugauccgcggggacgagguccggcagaucgcccccggccagaccgggaagaucgccgacuacaacuacaagcugccggacgacuucacgggcugcgugaucgcguggaacagcaacaaccucgacuccaaggucgggggcaacuacaacuaccuguaccgccuguuccgcaagagcaaccucaagcccuucgagcgggacaucuccaccgagaucuaccaggccggcagcacccccugcaacgggguggagggcuucaacugcuacuucccccugcaguccuacggguuccagccgaccaacggcgugggguaccagcccuaccggguggucgugcugagcuucgagcuccugcacgcccccgccacggugugcggccccaagaaguccaccaaccuggucaagaacaagugcgugaacuucaacuucaacggccucaccgggaccggcgugcugaccgagagcaacaagaaguuccugccguuccagcaguucgggcgcgacaucgccgacacgaccgacgcgguccgcgacccccagacccuggagauccucgacaucacccccugcagcuucggcgggguguccgugaucacgccgggcaccaacaccagcaaccaggucgccgugcuguaccagggcgugaacugcaccgagguccccguggccauccacgccgaccagcugacgcccaccuggcggguguacuccaccgggagcaacgucuuccagacccgcgccggcugccucaucggggcggagcacgugaacaacuccuacgagugcgacauccccaucggcgccggcaucugcgccagcuaccagacgcagaccaacuccccgcggcgcgcccggagcguggcgucccagagcaucaucgccuacaccaugucccugggggccgagaacagcgucgccuacuccaacaacagcaucgccauccccaccaacuucacgaucuccgugaccaccgagauccugcccgugagcaugaccaagacgagcgucgacugcaccauguacaucugcggcgacuccaccgagugcagcaaccuccugcugcaguacggguccuucugcacccagcucaaccgcgcgcugacgggcaucgccguggagcaggacaagaacacccaggagguguucgcccaggucaagcagaucuacaagacgcccccgaucaaggacuucgggggcuucaacuucagccagauccugcccgaccccuccaagcccagcaagcgguccuucaucgaggaccuccuguucaacaaggugacccuggccgacgccggcuucaucaagcaguacggggacugccucggcgacaucgcggcccgcgaccugaucugcgcccagaaguucaacgggcugaccgugcucccgccccugcugaccgacgagaugaucgcccaguacaccagcgcccuccuggcgggcaccaucacguccggguggaccuucggcgccggcgccgcccugcagauccccuucgcgaugcagauggccuaccgguucaacgggaucggcgucacccagaacgugcucuacgagaaccagaagcugaucgccaaccaguucaacagcgccaucgggaagauccaggacucccugagcuccaccgccagcgcgcucggcaagcugcaggacguggucaaccagaacgcccaggcccugaacacgcucgugaagcagcuguccagcaacuucggggccaucuccagcgugcugaacgacauccucucccgccuggacccgcccgaggccgagguccagaucgaccggcugaucaccggccgccuccagagccugcagaccuacgugacccagcagcugauccgggcggccgagauccgcgccagcgccaaccucgccgcgaccaagauguccgagugcgugcugggccagagcaagcgggucgacuucugcgggaagggcuaccaccugauguccuucccccagagcgcgccccacggggugguguuccuccacgucacguacgugcccgcccaggagaagaacuucaccaccgccccggccaucugccacgacggcaaggcccacuucccccgcgagggggucuucguguccaacggcacccacugguucgugacgcagcggaacuucuacgagccccagaucaucaccaccgacaacaccuucgucagcggcaacugcgacguggugaucgggaucgucaacaacacgguguacgacccccugcagccggagcuggacuccuucaaggaggagcucgacaaguacuucaagaaccacaccagccccgacguggaccugggcgacaucuccgggaucaacgccagcgucgugaacauccagaaggagaucgaccgccugaacgagguggccaagaaccucaacgagucccugaucgaccugcaggagcucggcaaguacgagcaguacaucaaguggcccugguacaucuggcugggcuucaucgccgggcugaucgcgaucgucauggugaccaucaugcucugcugcaugaccagcugcugcuccugccugaagggcugcugcagcugcggguccugcugcaaguucgacgaggacgacagcgagccggugcugaagggcgucaagcuccacuacacgugaggacuaguuauaagacugacuagcccgaugggccucccaacgggcccuccuccccuccuugcaccgagauuaauaaaaaaaaaaaaaaaaaaaaaaaaaaaaaaaaaaaaaaaaaaaaaaaaaaaaaaaaaaaaaaaaugcaucccccccccccccccccccccccccccccccaaaggcucuuuucagagccaccagaauu

SEQ ID NO: 23317 - RNA, 4039 nt, Artificial Sequence
  SARS-CoV-2/Wuhan/WIV05/2019__EPI_ISL_402128 spike protein mRNA gc (1-1273)(K986P_V987P_A222V_D614G)
aggagaaagcuuaccauguucguguuccugguccuccugccccuggugagcucccagugcgugaaccucaccacccgcacgcagcugccgcccgccuacaccaacagcuucacccggggcgucuacuaccccgacaagguguuccgcuccagcgugcugcacuccacccaggaccucuuccugcccuucuucagcaacgucacgugguuccacgccauccacguguccgggaccaacggcaccaagcgguucgacaacccggugcugcccuucaacgacggggucuacuucgcgagcaccgagaaguccaacaucauccgcggcuggaucuucgggacgacccucgacagcaagacccagucccugcugaucgugaacaacgccaccaacguggucaucaaggugugcgaguuccaguucugcaacgaccccuuccucggcguguacuaccacaagaacaacaagagcuggauggaguccgaguuccgggucuacagcuccgccaacaacugcacguucgaguacgugagccagcccuuccugauggaccuggagggcaagcaggggaacuucaagaaccuccgcgaguucguguucaagaacaucgacggcuacuucaagaucuacuccaagcacaccccgaucaaccugguccgggaccugccccagggguucagcgugcucgagccccugguggaccugcccaucggcaucaacaucacccgcuuccagacccuccuggcccugcaccgguccuaccucacgccgggggacagcagcuccggcuggaccgccggcgcggccgccuacuacgucggguaccugcagccccgcaccuuccugcucaaguacaacgagaacggcaccaucacggacgccguggacugcgcgcuggacccccugagcgagaccaagugcacccucaaguccuucaccguggagaaggggaucuaccagacgagcaacuuccggguccagcccaccgaguccaucgugcgcuucccgaacaucaccaaccugugccccuucggcgaggucuucaacgccacccgguucgccagcguguacgccuggaaccgcaagcggaucuccaacugcguggccgacuacagcguccuguacaacuccgcgagcuucuccacguucaagugcuacggcgugagccccaccaagcucaacgaccugugcuucaccaacguguacgccgacuccuucgucauccgcggggacgaggugcggcagaucgcccccggccagaccgggaagaucgccgacuacaacuacaagcugccggacgacuucacgggcugcgugaucgccuggaacagcaacaaccucgacuccaaggucgggggcaacuacaacuaccuguaccgccuguuccgcaagagcaaccucaagcccuucgagcgggacaucuccaccgagaucuaccaggcgggcagcacccccugcaacgggguggagggcuucaacugcuacuucccccugcaguccuacggguuccagccgaccaacggcgugggguaccagcccuaccgggucguggugcugagcuucgagcuccugcacgcccccgccacggucugcggccccaagaaguccaccaaccuggugaagaacaagugcgugaacuucaacuucaacggccucaccgggaccggcguccugaccgagagcaacaagaaguuccugccguuccagcaguucgggcgcgacaucgccgacacgaccgacgccgugcgcgacccccagacccuggagauccucgacaucacccccugcagcuucggcgggguguccgucaucacgccgggcaccaacaccagcaaccagguggcggugcuguaccagggcgucaacugcaccgaggugcccguggccauccacgccgaccagcugacgcccaccuggcgggucuacuccaccgggagcaacguguuccagacccgcgccggcugccucaucggggccgagcacgugaacaacuccuacgagugcgacauccccaucggcgcgggcaucugcgccagcuaccagacgcagaccaacuccccgcggcgcgcccggagcgucgccucccagagcaucaucgcguacaccaugucccugggggccgagaacagcguggccuacuccaacaacagcaucgccauccccaccaacuucacgaucuccgugaccaccgagauccugcccgucagcaugaccaagacgagcguggacugcaccauguacaucugcggcgacuccaccgagugcagcaaccuccugcugcaguacggguccuucugcacccagcucaaccgcgcccugacgggcaucgcgguggagcaggacaagaacacccaggaggucuucgcccaggugaagcagaucuacaagacgcccccgaucaaggacuucgggggcuucaacuucagccagauccugcccgaccccuccaagcccagcaagcgguccuucaucgaggaccuccuguucaacaaggugacccuggccgacgccggcuucaucaagcaguacggggacugccucggcgacaucgccgcgcgcgaccugaucugcgcccagaaguucaacgggcugaccguccucccgccccugcugaccgacgagaugaucgcccaguacaccagcgcccuccuggccggcaccaucacguccggguggaccuucggcgcgggcgccgcccugcagauccccuucgccaugcagauggcguaccgguucaacgggaucggcgugacccagaacgugcucuacgagaaccagaagcugaucgccaaccaguucaacagcgccaucgggaagauccaggacucccugagcuccaccgccagcgcccucggcaagcugcaggacgucgugaaccagaacgcgcaggcccugaacacgcucgugaagcagcuguccagcaacuucggggccaucuccagcguccugaacgacauccucucccgccuggacccgcccgaggccgaggugcagaucgaccggcugaucaccggccgccuccagagccugcagaccuacgugacccagcagcugauccgggccgcggagauccgcgccagcgccaaccucgccgccaccaagauguccgagugcguccugggccagagcaagcggguggacuucugcgggaagggcuaccaccugauguccuucccccagagcgcgccccacgggguggucuuccuccacgugacguacguccccgcccaggagaagaacuucaccaccgccccggccaucugccacgacggcaaggcgcacuucccccgcgaggggguguucguguccaacggcacccacugguucgucacgcagcggaacuucuacgagccccagaucaucaccaccgacaacaccuucgugagcggcaacugcgacguggucaucgggaucgugaacaacacgguguacgacccccugcagccggagcuggacuccuucaaggaggagcucgacaaguacuucaagaaccacaccagccccgacgucgaccugggcgacaucuccgggaucaacgccagcguggugaacauccagaaggagaucgaccgccugaacgaggucgccaagaaccucaacgagucccugaucgaccugcaggagcucggcaaguacgagcaguacaucaaguggcccugguacaucuggcugggcuucaucgccgggcugaucgccaucgugauggugaccaucaugcucugcugcaugaccagcugcugcuccugccugaagggcugcugcagcugcggguccugcugcaaguucgacgaggacgacagcgagccgguccugaagggcgugaagcuccacuacacgugaggacuaguuauaagacugacuagcccgaugggccucccaacgggcccuccuccccuccuugcaccgagauuaauaaaaaaaaaaaaaaaaaaaaaaaaaaaaaaaaaaaaaaaaaaaaaaaaaaaaaaaaaaaaaaaaugcaucccccccccccccccccccccccccccccccaaaggcucuuuucagagccaccagaauu

SEQ ID NO: 23318 - RNA, 4039 nt, Artificial Sequence
  SARS-CoV-2/Wuhan/WIV05/2019__EPI_ISL_402128 spike protein mRNA gc (1-1273)(K986P_V987P_N439K_D614G)
aggagaaagcuuaccauguucguguuccugguccuccugccccuggugagcucccagugcgugaaccucaccacccgcacgcagcugccgcccgccuacaccaacagcuucacccggggcgucuacuaccccgacaagguguuccgcuccagcgugcugcacuccacccaggaccucuuccugcccuucuucagcaacgucacgugguuccacgccauccacguguccgggaccaacggcaccaagcgguucgacaacccggugcugcccuucaacgacggggucuacuucgcgagcaccgagaaguccaacaucauccgcggcuggaucuucgggacgacccucgacagcaagacccagucccugcugaucgugaacaacgccaccaacguggucaucaaggugugcgaguuccaguucugcaacgaccccuuccucggcguguacuaccacaagaacaacaagagcuggauggaguccgaguuccgggucuacagcuccgccaacaacugcacguucgaguacgugagccagcccuuccugauggaccuggagggcaagcaggggaacuucaagaaccuccgcgaguucguguucaagaacaucgacggcuacuucaagaucuacuccaagcacaccccgaucaaccugguccgggaccugccccagggguucagcgcccucgagccccugguggaccugcccaucggcaucaacaucacccgcuuccagacccuccuggcccugcaccgguccuaccucacgccgggggacagcagcuccggcuggaccgcgggcgccgccgccuacuacgugggguaccugcagccccgcaccuuccugcucaaguacaacgagaacggcaccaucacggacgcggucgacugcgcccuggacccccugagcgagaccaagugcacccucaaguccuucaccguggagaaggggaucuaccagacgagcaacuuccgggugcagcccaccgaguccaucguccgcuucccgaacaucaccaaccugugccccuucggcgagguguucaacgccacccgguucgccagcgucuacgccuggaaccgcaagcggaucuccaacugcguggcggacuacagcgugcuguacaacuccgccagcuucuccacguucaagugcuacggcgucagccccaccaagcucaacgaccugugcuucaccaacguguacgccgacuccuucgugauccgcggggacgagguccggcagaucgcccccggccagaccgggaagaucgccgacuacaacuacaagcugccggacgacuucacgggcugcgugaucgcguggaacagcaagaaccucgacuccaaggucgggggcaacuacaacuaccuguaccgccuguuccgcaagagcaaccucaagcccuucgagcgggacaucuccaccgagaucuaccaggccggcagcacccccugcaacgggguggagggcuucaacugcuacuucccccugcaguccuacggguuccagccgaccaacggcgugggguaccagcccuaccggguggucgugcugagcuucgagcuccugcacgcccccgccacggugugcggccccaagaaguccaccaaccuggucaagaacaagugcgugaacuucaacuucaacggccucaccgggaccggcgugcugaccgagagcaacaagaaguuccugccguuccagcaguucgggcgcgacaucgccgacacgaccgacgcgguccgcgacccccagacccuggagauccucgacaucacccccugcagcuucggcgggguguccgugaucacgccgggcaccaacaccagcaaccaggucgccgugcuguaccagggcgugaacugcaccgagguccccguggccauccacgccgaccagcugacgcccaccuggcggguguacuccaccgggagcaacgucuuccagacccgcgccggcugccucaucggggcggagcacgugaacaacuccuacgagugcgacauccccaucggcgccggcaucugcgccagcuaccagacgcagaccaacuccccgcggcgcgcccggagcguggcgucccagagcaucaucgccuacaccaugucccugggggccgagaacagcgucgccuacuccaacaacagcaucgccauccccaccaacuucacgaucuccgugaccaccgagauccugcccgugagcaugaccaagacgagcgucgacugcaccauguacaucugcggcgacuccaccgagugcagcaaccuccugcugcaguacggguccuucugcacccagcucaaccgcgcgcugacgggcaucgccguggagcaggacaagaacacccaggagguguucgcccaggucaagcagaucuacaagacgcccccgaucaaggacuucgggggcuucaacuucagccagauccugcccgaccccuccaagcccagcaagcgguccuucaucgaggaccuccuguucaacaaggugacccuggccgacgccggcuucaucaagcaguacggggacugccucggcgacaucgcggcccgcgaccugaucugcgcccagaaguucaacgggcugaccgugcucccgccccugcugaccgacgagaugaucgcccaguacaccagcgcccuccuggcgggcaccaucacguccggguggaccuucggcgccggcgccgcccugcagauccccuucgcgaugcagauggccuaccgguucaacgggaucggcgucacccagaacgugcucuacgagaaccagaagcugaucgccaaccaguucaacagcgccaucgggaagauccaggacucccugagcuccaccgccagcgcgcucggcaagcugcaggacguggucaaccagaacgcccaggcccugaacacgcucgugaagcagcuguccagcaacuucggggccaucuccagcgugcugaacgacauccucucccgccuggacccgcccgaggccgagguccagaucgaccggcugaucaccggccgccuccagagccugcagaccuacgugacccagcagcugauccgggcggccgagauccgcgccagcgccaaccucgccgcgaccaagauguccgagugcgugcugggccagagcaagcgggucgacuucugcgggaagggcuaccaccugauguccuucccccagagcgcgccccacggggugguguuccuccacgucacguacgugcccgcccaggagaagaacuucaccaccgccccggccaucugccacgacggcaaggcccacuucccccgcgagggggucuucguguccaacggcacccacugguucgugacgcagcggaacuucuacgagccccagaucaucaccaccgacaacaccuucgucagcggcaacugcgacguggugaucgggaucgucaacaacacgguguacgacccccugcagccggagcuggacuccuucaaggaggagcucgacaaguacuucaagaaccacaccagccccgacguggaccugggcgacaucuccgggaucaacgccagcgucgugaacauccagaaggagaucgaccgccugaacgagguggccaagaaccucaacgagucccugaucgaccugcaggagcucggcaaguacgagcaguacaucaaguggcccugguacaucuggcugggcuucaucgccgggcugaucgcgaucgucauggugaccaucaugcucugcugcaugaccagcugcugcuccugccugaagggcugcugcagcugcggguccugcugcaaguucgacgaggacgacagcgagccggugcugaagggcgucaagcuccacuacacgugaggacuaguuauaagacugacuagcccgaugggccucccaacgggcccuccuccccuccuugcaccgagauuaauaaaaaaaaaaaaaaaaaaaaaaaaaaaaaaaaaaaaaaaaaaaaaaaaaaaaaaaaaaaaaaaaugcaucccccccccccccccccccccccccccccccaaaggcucuuuucagagccaccagaauu

SEQ ID NO: 23319 - RNA, 4039 nt, Artificial Sequence
  SARS-CoV-2/Wuhan/WIV05/2019__EPI_ISL_402128 spike protein mRNA gc (1-1273)(K986P_V987P_S477N_D614G)
aggagaaagcuuaccauguucguguuccugguccuccugccccuggugagcucccagugcgugaaccucaccacccgcacgcagcugccgcccgccuacaccaacagcuucacccggggcgucuacuaccccgacaagguguuccgcuccagcgugcugcacuccacccaggaccucuuccugcccuucuucagcaacgucacgugguuccacgccauccacguguccgggaccaacggcaccaagcgguucgacaacccggugcugcccuucaacgacggggucuacuucgcgagcaccgagaaguccaacaucauccgcggcuggaucuucgggacgacccucgacagcaagacccagucccugcugaucgugaacaacgccaccaacguggucaucaaggugugcgaguuccaguucugcaacgaccccuuccucggcguguacuaccacaagaacaacaagagcuggauggaguccgaguuccgggucuacagcuccgccaacaacugcacguucgaguacgugagccagcccuuccugauggaccuggagggcaagcaggggaacuucaagaaccuccgcgaguucguguucaagaacaucgacggcuacuucaagaucuacuccaagcacaccccgaucaaccugguccgggaccugccccagggguucagcgcccucgagccccugguggaccugcccaucggcaucaacaucacccgcuuccagacccuccuggcccugcaccgguccuaccucacgccgggggacagcagcuccggcuggaccgcgggcgccgccgccuacuacgugggguaccugcagccccgcaccuuccugcucaaguacaacgagaacggcaccaucacggacgcggucgacugcgcccuggacccccugagcgagaccaagugcacccucaaguccuucaccguggagaaggggaucuaccagacgagcaacuuccgggugcagcccaccgaguccaucguccgcuucccgaacaucaccaaccugugccccuucggcgagguguucaacgccacccgguucgccagcgucuacgccuggaaccgcaagcggaucuccaacugcguggcggacuacagcgugcuguacaacuccgccagcuucuccacguucaagugcuacggcgucagccccaccaagcucaacgaccugugcuucaccaacguguacgccgacuccuucgugauccgcggggacgagguccggcagaucgcccccggccagaccgggaagaucgccgacuacaacuacaagcugccggacgacuucacgggcugcgugaucgcguggaacagcaacaaccucgacuccaaggucgggggcaacuacaacuaccuguaccgccuguuccgcaagagcaaccucaagcccuucgagcgggacaucuccaccgagaucuaccaggccggcaacacccccugcaacgggguggagggcuucaacugcuacuucccccugcagagcuacggguuccagccgaccaacggcgugggguaccagcccuaccggguggucgugcuguccuucgagcuccugcacgcccccgccacggugugcggccccaagaaguccaccaaccuggucaagaacaagugcgugaacuucaacuucaacggccucaccgggaccggcgugcugaccgagagcaacaagaaguuccugccguuccagcaguucgggcgcgacaucgccgacacgaccgacgcgguccgcgacccccagacccuggagauccucgacaucacccccugcagcuucggcggggugagcgugaucacgccgggcaccaacaccuccaaccaggucgccgugcuguaccagggcgugaacugcaccgagguccccguggccauccacgccgaccagcugacgcccaccuggcggguguacagcaccggguccaacgucuuccagacccgcgccggcugccucaucggggcggagcacgugaacaacagcuacgagugcgacauccccaucggcgccggcaucugcgccuccuaccagacgcagaccaacagcccgcggcgcgcccgguccguggcgagccaguccaucaucgccuacaccaugagccugggggccgagaacuccgucgccuacagcaacaacuccaucgccauccccaccaacuucacgaucagcgugaccaccgagauccugcccguguccaugaccaagacgagcgucgacugcaccauguacaucugcggcgacagcaccgagugcuccaaccuccugcugcaguacgggagcuucugcacccagcucaaccgcgcgcugacgggcaucgccguggagcaggacaagaacacccaggagguguucgcccaggucaagcagaucuacaagacgcccccgaucaaggacuucgggggcuucaacuucucccagauccugcccgaccccagcaagcccuccaagcggagcuucaucgaggaccuccuguucaacaaggugacccuggccgacgccggcuucaucaagcaguacggggacugccucggcgacaucgcggcccgcgaccugaucugcgcccagaaguucaacgggcugaccgugcucccgccccugcugaccgacgagaugaucgcccaguacaccuccgcccuccuggcgggcaccaucacgagcggguggaccuucggcgccggcgccgcccugcagauccccuucgcgaugcagauggccuaccgguucaacgggaucggcgucacccagaacgugcucuacgagaaccagaagcugaucgccaaccaguucaacuccgccaucgggaagauccaggacagccuguccagcaccgccuccgcgcucggcaagcugcaggacguggucaaccagaacgcccaggcccugaacacgcucgugaagcagcugagcuccaacuucggggccaucagcuccgugcugaacgacauccucagccgccuggacccgcccgaggccgagguccagaucgaccggcugaucaccggccgccuccagucccugcagaccuacgugacccagcagcugauccgggcggccgagauccgcgccagcgccaaccucgccgcgaccaagaugagcgagugcgugcugggccaguccaagcgggucgacuucugcgggaagggcuaccaccugaugagcuucccccaguccgcgccccacggggugguguuccuccacgucacguacgugcccgcccaggagaagaacuucaccaccgccccggccaucugccacgacggcaaggcccacuucccccgcgagggggucuucgugagcaacggcacccacugguucgugacgcagcggaacuucuacgagccccagaucaucaccaccgacaacaccuucgucuccggcaacugcgacguggugaucgggaucgucaacaacacgguguacgacccccugcagccggagcuggacagcuucaaggaggagcucgacaaguacuucaagaaccacaccucccccgacguggaccugggcgacaucagcgggaucaacgccuccgucgugaacauccagaaggagaucgaccgccugaacgagguggccaagaaccucaacgagagccugaucgaccugcaggagcucggcaaguacgagcaguacaucaaguggcccugguacaucuggcugggcuucaucgccgggcugaucgcgaucgucauggugaccaucaugcucugcugcaugaccuccugcugcagcugccugaagggcugcugcuccugcgggagcugcugcaaguucgacgaggacgacuccgagccggugcugaagggcgucaagcuccacuacacgugaggacuaguuauaagacugacuagcccgaugggccucccaacgggcccuccuccccuccuugcaccgagauuaauaaaaaaaaaaaaaaaaaaaaaaaaaaaaaaaaaaaaaaaaaaaaaaaaaaaaaaaaaaaaaaaaugcaucccccccccccccccccccccccccccccccaaaggcucuuuucagagccaccagaauu

SEQ ID NO: 23320 - RNA, 4039 nt, Artificial Sequence
  SARS-CoV-2/Wuhan/WIV05/2019__EPI_ISL_402128 spike protein mRNA gc (1-1273)(K986P_V987P_N501Y_D614G)
aggagaaagcuuaccauguucguguuccugguccuccugccccuggugagcucccagugcgugaaccucaccacccgcacgcagcugccgcccgccuacaccaacagcuucacccggggcgucuacuaccccgacaagguguuccgcuccagcgugcugcacuccacccaggaccucuuccugcccuucuucagcaacgucacgugguuccacgccauccacguguccgggaccaacggcaccaagcgguucgacaacccggugcugcccuucaacgacggggucuacuucgcgagcaccgagaaguccaacaucauccgcggcuggaucuucgggacgacccucgacagcaagacccagucccugcugaucgugaacaacgccaccaacguggucaucaaggugugcgaguuccaguucugcaacgaccccuuccucggcguguacuaccacaagaacaacaagagcuggauggaguccgaguuccgggucuacagcuccgccaacaacugcacguucgaguacgugagccagcccuuccugauggaccuggagggcaagcaggggaacuucaagaaccuccgcgaguucguguucaagaacaucgacggcuacuucaagaucuacuccaagcacaccccgaucaaccugguccgggaccugccccagggguucagcgcccucgagccccugguggaccugcccaucggcaucaacaucacccgcuuccagacccuccuggcccugcaccgguccuaccucacgccgggggacagcagcuccggcuggaccgcgggcgccgccgccuacuacgugggguaccugcagccccgcaccuuccugcucaaguacaacgagaacggcaccaucacggacgcggucgacugcgcccuggacccccugagcgagaccaagugcacccucaaguccuucaccguggagaaggggaucuaccagacgagcaacuuccgggugcagcccaccgaguccaucguccgcuucccgaacaucaccaaccugugccccuucggcgagguguucaacgccacccgguucgccagcgucuacgccuggaaccgcaagcggaucuccaacugcguggcggacuacagcgugcuguacaacuccgccagcuucuccacguucaagugcuacggcgucagccccaccaagcucaacgaccugugcuucaccaacguguacgccgacuccuucgugauccgcggggacgagguccggcagaucgcccccggccagaccgggaagaucgccgacuacaacuacaagcugccggacgacuucacgggcugcgugaucgcguggaacagcaacaaccucgacuccaaggucgggggcaacuacaacuaccuguaccgccuguuccgcaagagcaaccucaagcccuucgagcgggacaucuccaccgagaucuaccaggccggcagcacccccugcaacgggguggagggcuucaacugcuacuucccccugcaguccuacggguuccagccgaccuacggcgugggguaccagcccuaccggguggucgugcugagcuucgagcuccugcacgcccccgccacggugugcggccccaagaaguccaccaaccuggucaagaacaagugcgugaacuucaacuucaacggccucaccgggaccggcgugcugaccgagagcaacaagaaguuccugccguuccagcaguucgggcgcgacaucgccgacacgaccgacgcgguccgcgacccccagacccuggagauccucgacaucacccccugcagcuucggcgggguguccgugaucacgccgggcaccaacaccagcaaccaggucgccgugcuguaccagggcgugaacugcaccgagguccccguggccauccacgccgaccagcugacgcccaccuggcggguguacuccaccgggagcaacgucuuccagacccgcgccggcugccucaucggggcggagcacgugaacaacuccuacgagugcgacauccccaucggcgccggcaucugcgccagcuaccagacgcagaccaacuccccgcggcgcgcccggagcguggcgucccagagcaucaucgccuacaccaugucccugggggccgagaacagcgucgccuacuccaacaacagcaucgccauccccaccaacuucacgaucuccgugaccaccgagauccugcccgugagcaugaccaagacgagcgucgacugcaccauguacaucugcggcgacuccaccgagugcagcaaccuccugcugcaguacggguccuucugcacccagcucaaccgcgcgcugacgggcaucgccguggagcaggacaagaacacccaggagguguucgcccaggucaagcagaucuacaagacgcccccgaucaaggacuucgggggcuucaacuucagccagauccugcccgaccccuccaagcccagcaagcgguccuucaucgaggaccuccuguucaacaaggugacccuggccgacgccggcuucaucaagcaguacggggacugccucggcgacaucgcggcccgcgaccugaucugcgcccagaaguucaacgggcugaccgugcucccgccccugcugaccgacgagaugaucgcccaguacaccagcgcccuccuggcgggcaccaucacguccggguggaccuucggcgccggcgccgcccugcagauccccuucgcgaugcagauggccuaccgguucaacgggaucggcgucacccagaacgugcucuacgagaaccagaagcugaucgccaaccaguucaacagcgccaucgggaagauccaggacucccugagcuccaccgccagcgcgcucggcaagcugcaggacguggucaaccagaacgcccaggcccugaacacgcucgugaagcagcuguccagcaacuucggggccaucuccagcgugcugaacgacauccucucccgccuggacccgcccgaggccgagguccagaucgaccggcugaucaccggccgccuccagagccugcagaccuacgugacccagcagcugauccgggcggccgagauccgcgccagcgccaaccucgccgcgaccaagauguccgagugcgugcugggccagagcaagcgggucgacuucugcgggaagggcuaccaccugauguccuucccccagagcgcgccccacggggugguguuccuccacgucacguacgugcccgcccaggagaagaacuucaccaccgccccggccaucugccacgacggcaaggcccacuucccccgcgagggggucuucguguccaacggcacccacugguucgugacgcagcggaacuucuacgagccccagaucaucaccaccgacaacaccuucgucagcggcaacugcgacguggugaucgggaucgucaacaacacgguguacgacccccugcagccggagcuggacuccuucaaggaggagcucgacaaguacuucaagaaccacaccagccccgacguggaccugggcgacaucuccgggaucaacgccagcgucgugaacauccagaaggagaucgaccgccugaacgagguggccaagaaccucaacgagucccugaucgaccugcaggagcucggcaaguacgagcaguacaucaaguggcccugguacaucuggcugggcuucaucgccgggcugaucgcgaucgucauggugaccaucaugcucugcugcaugaccagcugcugcuccugccugaagggcugcugcagcugcggguccugcugcaaguucgacgaggacgacagcgagccggugcugaagggcgucaagcuccacuacacgugaggacuaguuauaagacugacuagcccgaugggccucccaacgggcccuccuccccuccuugcaccgagauuaauaaaaaaaaaaaaaaaaaaaaaaaaaaaaaaaaaaaaaaaaaaaaaaaaaaaaaaaaaaaaaaaaugcaucccccccccccccccccccccccccccccccaaaggcucuuuucagagccaccagaauu

SEQ ID NO: 23321 - RNA, 4033 nt, Artificial Sequence
  SARS-CoV-2/Wuhan/WIV05/2019__EPI_ISL_402128 spike protein mRNA gc (1-1273)(K986P_V987P_H69del_V70del_D614G)
aggagaaagcuuaccauguucguguuccugguccuccugccccuggugagcucccagugcgugaaccucaccacccgcacgcagcugccgcccgccuacaccaacagcuucacccggggcgucuacuaccccgacaagguguuccgcuccagcgugcugcacuccacccaggaccucuuccugcccuucuucagcaacgucacgugguuccacgccaucuccgggaccaacggcaccaagcgguucgacaacccggugcugcccuucaacgacgggguguacuucgcgagcaccgagaaguccaacaucauccgcggcuggaucuucgggacgacccucgacagcaagacccagucccugcugaucgucaacaacgccaccaacguggugaucaaggucugcgaguuccaguucugcaacgaccccuuccucggcguguacuaccacaagaacaacaagagcuggauggaguccgaguuccggguguacagcuccgccaacaacugcacguucgaguacgucagccagcccuuccugauggaccuggagggcaagcaggggaacuucaagaaccuccgcgaguucguguucaagaacaucgacggcuacuucaagaucuacuccaagcacaccccgaucaaccuggugcgggaccugccccagggguucagcgcccucgagccccuggucgaccugcccaucggcaucaacaucacccgcuuccagacccuccuggcccugcaccgguccuaccucacgccgggggacagcagcuccggcuggaccgcgggcgccgccgccuacuacgugggguaccugcagccccgcaccuuccugcucaaguacaacgagaacggcaccaucacggacgcgguggacugcgcccuggacccccugagcgagaccaagugcacccucaaguccuucaccgucgagaaggggaucuaccagacgagcaacuuccgggugcagcccaccgaguccaucgugcgcuucccgaacaucaccaaccugugccccuucggcgaggucuucaacgccacccgguucgccagcguguacgccuggaaccgcaagcggaucuccaacugcgucgcggacuacagcgugcuguacaacuccgccagcuucuccacguucaagugcuacggcgugagccccaccaagcucaacgaccugugcuucaccaacgucuacgccgacuccuucgugauccgcggggacgaggugcggcagaucgcccccggccagaccgggaagaucgccgacuacaacuacaagcugccggacgacuucacgggcugcgucaucgcguggaacagcaacaaccucgacuccaaggucgggggcaacuacaacuaccuguaccgccuguuccgcaagagcaaccucaagcccuucgagcgggacaucuccaccgagaucuaccaggccggcagcacccccugcaacgggguggagggcuucaacugcuacuucccccugcaguccuacggguuccagccgaccaacggcgugggguaccagcccuaccggguggugguccugagcuucgagcuccugcacgcccccgccacggugugcggccccaagaaguccaccaaccuggugaagaacaagugcgucaacuucaacuucaacggccucaccgggaccggcgugcugaccgagagcaacaagaaguuccugccguuccagcaguucgggcgcgacaucgccgacacgaccgacgcggugcgcgacccccagacccuggagauccucgacaucacccccugcagcuucggcggggucuccgugaucacgccgggcaccaacaccagcaaccagguggccguccuguaccagggcgugaacugcaccgaggugcccgucgccauccacgccgaccagcugacgcccaccuggcggguguacuccaccgggagcaacguguuccagacccgcgccggcugccucaucggggcggagcacgucaacaacuccuacgagugcgacauccccaucggcgccggcaucugcgccagcuaccagacgcagaccaacuccccgcggcgcgcccggagcguggcgucccagagcaucaucgccuacaccaugucccugggggccgagaacagcguggccuacuccaacaacagcaucgccauccccaccaacuucacgaucuccgucaccaccgagauccugcccgugagcaugaccaagacgagcguggacugcaccauguacaucugcggcgacuccaccgagugcagcaaccuccugcugcaguacggguccuucugcacccagcucaaccgcgcgcugacgggcaucgccgucgagcaggacaagaacacccaggagguguucgcccaggugaagcagaucuacaagacgcccccgaucaaggacuucgggggcuucaacuucagccagauccugcccgaccccuccaagcccagcaagcgguccuucaucgaggaccuccuguucaacaaggucacccuggccgacgccggcuucaucaagcaguacggggacugccucggcgacaucgcggcccgcgaccugaucugcgcccagaaguucaacgggcugaccgugcucccgccccugcugaccgacgagaugaucgcccaguacaccagcgcccuccuggcgggcaccaucacguccggguggaccuucggcgccggcgccgcccugcagauccccuucgcgaugcagauggccuaccgguucaacgggaucggcgugacccagaacguccucuacgagaaccagaagcugaucgccaaccaguucaacagcgccaucgggaagauccaggacucccugagcuccaccgccagcgcgcucggcaagcugcaggacguggugaaccagaacgcccaggcccugaacacgcucgucaagcagcuguccagcaacuucggggccaucuccagcgugcugaacgacauccucucccgccuggacccgcccgaggccgaggugcagaucgaccggcugaucaccggccgccuccagagccugcagaccuacgucacccagcagcugauccgggcggccgagauccgcgccagcgccaaccucgccgcgaccaagauguccgagugcgugcugggccagagcaagcggguggacuucugcgggaagggcuaccaccugauguccuucccccagagcgcgccccacggggucguguuccuccacgugacguacguccccgcccaggagaagaacuucaccaccgccccggccaucugccacgacggcaaggcccacuucccccgcgaggggguguucgucuccaacggcacccacugguucgugacgcagcggaacuucuacgagccccagaucaucaccaccgacaacaccuucgugagcggcaacugcgacgucgugaucgggaucgugaacaacacggucuacgacccccugcagccggagcuggacuccuucaaggaggagcucgacaaguacuucaagaaccacaccagccccgacguggaccugggcgacaucuccgggaucaacgccagcguggucaacauccagaaggagaucgaccgccugaacgagguggccaagaaccucaacgagucccugaucgaccugcaggagcucggcaaguacgagcaguacaucaaguggcccugguacaucuggcugggcuucaucgccgggcugaucgcgaucgugauggucaccaucaugcucugcugcaugaccagcugcugcuccugccugaagggcugcugcagcugcggguccugcugcaaguucgacgaggacgacagcgagccggugcugaagggcgugaagcuccacuacacgugaggacuaguuauaagacugacuagcccgaugggccucccaacgggcccuccuccccuccuugcaccgagauuaauaaaaaaaaaaaaaaaaaaaaaaaaaaaaaaaaaaaaaaaaaaaaaaaaaaaaaaaaaaaaaaaaugcaucccccccccccccccccccccccccccccccaaaggcucuuuucagagccaccagaauu

SEQ ID NO: 23322 - RNA, 4039 nt, Artificial Sequence
  SARS-CoV-2/Wuhan/WIV05/2019__EPI_ISL_402128 spike protein mRNA gc (1-1273)(K986P_V987P_Y453F_D614G)
aggagaaagcuuaccauguucguguuccugguccuccugccccuggugagcucccagugcgugaaccucaccacccgcacgcagcugccgcccgccuacaccaacagcuucacccggggcgucuacuaccccgacaagguguuccgcuccagcgugcugcacuccacccaggaccucuuccugcccuucuucagcaacgucacgugguuccacgccauccacguguccgggaccaacggcaccaagcgguucgacaacccggugcugcccuucaacgacggggucuacuucgcgagcaccgagaaguccaacaucauccgcggcuggaucuucgggacgacccucgacagcaagacccagucccugcugaucgugaacaacgccaccaacguggucaucaaggugugcgaguuccaguucugcaacgaccccuuccucggcguguacuaccacaagaacaacaagagcuggauggaguccgaguuccgggucuacagcuccgccaacaacugcacguucgaguacgugagccagcccuuccugauggaccuggagggcaagcaggggaacuucaagaaccuccgcgaguucguguucaagaacaucgacggcuacuucaagaucuacuccaagcacaccccgaucaaccugguccgggaccugccccagggguucagcgcccucgagccccugguggaccugcccaucggcaucaacaucacccgcuuccagacccuccuggcccugcaccgguccuaccucacgccgggggacagcagcuccggcuggaccgcgggcgccgccgccuacuacgugggguaccugcagccccgcaccuuccugcucaaguacaacgagaacggcaccaucacggacgcggucgacugcgcccuggacccccugagcgagaccaagugcacccucaaguccuucaccguggagaaggggaucuaccagacgagcaacuuccgggugcagcccaccgaguccaucguccgcuucccgaacaucaccaaccugugccccuucggcgagguguucaacgccacccgguucgccagcgucuacgccuggaaccgcaagcggaucuccaacugcguggcggacuacagcgugcuguacaacuccgccagcuucuccacguucaagugcuacggcgucagccccaccaagcucaacgaccugugcuucaccaacguguacgccgacuccuucgugauccgcggggacgagguccggcagaucgcccccggccagaccgggaagaucgccgacuacaacuacaagcugccggacgacuucacgggcugcgugaucgcguggaacagcaacaaccucgacuccaaggucgggggcaacuacaacuaccuguuccgccuguuccgcaagagcaaccucaagcccuucgagcgggacaucuccaccgagaucuaccaggccggcagcacccccugcaacgggguggagggcuucaacugcuacuucccccugcaguccuacggguuccagccgaccaacggcgugggguaccagcccuaccggguggucgugcugagcuucgagcuccugcacgcccccgccacggugugcggccccaagaaguccaccaaccuggucaagaacaagugcgugaacuucaacuucaacggccucaccgggaccggcgugcugaccgagagcaacaagaaguuccugccguuccagcaguucgggcgcgacaucgccgacacgaccgacgcgguccgcgacccccagacccuggagauccucgacaucacccccugcagcuucggcgggguguccgugaucacgccgggcaccaacaccagcaaccaggucgccgugcuguaccagggcgugaacugcaccgagguccccguggccauccacgccgaccagcugacgcccaccuggcggguguacuccaccgggagcaacgucuuccagacccgcgccggcugccucaucggggcggagcacgugaacaacuccuacgagugcgacauccccaucggcgccggcaucugcgccagcuaccagacgcagaccaacuccccgcggcgcgcccggagcguggcgucccagagcaucaucgccuacaccaugucccugggggccgagaacagcgucgccuacuccaacaacagcaucgccauccccaccaacuucacgaucuccgugaccaccgagauccugcccgugagcaugaccaagacgagcgucgacugcaccauguacaucugcggcgacuccaccgagugcagcaaccuccugcugcaguacggguccuucugcacccagcucaaccgcgcgcugacgggcaucgccguggagcaggacaagaacacccaggagguguucgcccaggucaagcagaucuacaagacgcccccgaucaaggacuucgggggcuucaacuucagccagauccugcccgaccccuccaagcccagcaagcgguccuucaucgaggaccuccuguucaacaaggugacccuggccgacgccggcuucaucaagcaguacggggacugccucggcgacaucgcggcccgcgaccugaucugcgcccagaaguucaacgggcugaccgugcucccgccccugcugaccgacgagaugaucgcccaguacaccagcgcccuccuggcgggcaccaucacguccggguggaccuucggcgccggcgccgcccugcagauccccuucgcgaugcagauggccuaccgguucaacgggaucggcgucacccagaacgugcucuacgagaaccagaagcugaucgccaaccaguucaacagcgccaucgggaagauccaggacucccugagcuccaccgccagcgcgcucggcaagcugcaggacguggucaaccagaacgcccaggcccugaacacgcucgugaagcagcuguccagcaacuucggggccaucuccagcgugcugaacgacauccucucccgccuggacccgcccgaggccgagguccagaucgaccggcugaucaccggccgccuccagagccugcagaccuacgugacccagcagcugauccgggcggccgagauccgcgccagcgccaaccucgccgcgaccaagauguccgagugcgugcugggccagagcaagcgggucgacuucugcgggaagggcuaccaccugauguccuucccccagagcgcgccccacggggugguguuccuccacgucacguacgugcccgcccaggagaagaacuucaccaccgccccggccaucugccacgacggcaaggcccacuucccccgcgagggggucuucguguccaacggcacccacugguucgugacgcagcggaacuucuacgagccccagaucaucaccaccgacaacaccuucgucagcggcaacugcgacguggugaucgggaucgucaacaacacgguguacgacccccugcagccggagcuggacuccuucaaggaggagcucgacaaguacuucaagaaccacaccagccccgacguggaccugggcgacaucuccgggaucaacgccagcgucgugaacauccagaaggagaucgaccgccugaacgagguggccaagaaccucaacgagucccugaucgaccugcaggagcucggcaaguacgagcaguacaucaaguggcccugguacaucuggcugggcuucaucgccgggcugaucgcgaucgucauggugaccaucaugcucugcugcaugaccagcugcugcuccugccugaagggcugcugcagcugcggguccugcugcaaguucgacgaggacgacagcgagccggugcugaagggcgucaagcuccacuacacgugaggacuaguuauaagacugacuagcccgaugggccucccaacgggcccuccuccccuccuugcaccgagauuaauaaaaaaaaaaaaaaaaaaaaaaaaaaaaaaaaaaaaaaaaaaaaaaaaaaaaaaaaaaaaaaaaugcaucccccccccccccccccccccccccccccccaaaggcucuuuucagagccaccagaauu

SEQ ID NO: 23323 - RNA, 4039 nt, Artificial Sequence
  SARS-CoV-2/Wuhan/WIV05/2019__EPI_ISL_402128 spike protein mRNA gc (1-1273)(K986P_V987P_D614G_I692V)
aggagaaagcuuaccauguucguguuccugguccuccugccccuggugagcucccagugcgugaaccucaccacccgcacgcagcugccgcccgccuacaccaacagcuucacccggggcgucuacuaccccgacaagguguuccgcuccagcgugcugcacuccacccaggaccucuuccugcccuucuucagcaacgucacgugguuccacgccauccacguguccgggaccaacggcaccaagcgguucgacaacccggugcugcccuucaacgacggggucuacuucgcgagcaccgagaaguccaacaucauccgcggcuggaucuucgggacgacccucgacagcaagacccagucccugcugaucgugaacaacgccaccaacguggucaucaaggugugcgaguuccaguucugcaacgaccccuuccucggcguguacuaccacaagaacaacaagagcuggauggaguccgaguuccgggucuacagcuccgccaacaacugcacguucgaguacgugagccagcccuuccugauggaccuggagggcaagcaggggaacuucaagaaccuccgcgaguucguguucaagaacaucgacggcuacuucaagaucuacuccaagcacaccccgaucaaccugguccgggaccugccccagggguucagcgcccucgagccccugguggaccugcccaucggcaucaacaucacccgcuuccagacccuccuggcccugcaccgguccuaccucacgccgggggacagcagcuccggcuggaccgcgggcgccgccgccuacuacgugggguaccugcagccccgcaccuuccugcucaaguacaacgagaacggcaccaucacggacgcggucgacugcgcccuggacccccugagcgagaccaagugcacccucaaguccuucaccguggagaaggggaucuaccagacgagcaacuuccgggugcagcccaccgaguccaucguccgcuucccgaacaucaccaaccugugccccuucggcgagguguucaacgccacccgguucgccagcgucuacgccuggaaccgcaagcggaucuccaacugcguggcggacuacagcgugcuguacaacuccgccagcuucuccacguucaagugcuacggcgucagccccaccaagcucaacgaccugugcuucaccaacguguacgccgacuccuucgugauccgcggggacgagguccggcagaucgcccccggccagaccgggaagaucgccgacuacaacuacaagcugccggacgacuucacgggcugcgugaucgcguggaacagcaacaaccucgacuccaaggucgggggcaacuacaacuaccuguaccgccuguuccgcaagagcaaccucaagcccuucgagcgggacaucuccaccgagaucuaccaggccggcagcacccccugcaacgggguggagggcuucaacugcuacuucccccugcaguccuacggguuccagccgaccaacggcgugggguaccagcccuaccggguggucgugcugagcuucgagcuccugcacgcccccgccacggugugcggccccaagaaguccaccaaccuggucaagaacaagugcgugaacuucaacuucaacggccucaccgggaccggcgugcugaccgagagcaacaagaaguuccugccguuccagcaguucgggcgcgacaucgccgacacgaccgacgcgguccgcgacccccagacccuggagauccucgacaucacccccugcagcuucggcgggguguccgugaucacgccgggcaccaacaccagcaaccaggucgccgugcuguaccagggcgugaacugcaccgagguccccguggccauccacgccgaccagcugacgcccaccuggcggguguacuccaccgggagcaacgucuuccagacccgcgccggcugccucaucggggcggagcacgugaacaacuccuacgagugcgacauccccaucggcgccggcaucugcgccagcuaccagacgcagaccaacuccccgcggcgcgcccggagcguggcgucccagagcgucaucgccuacaccaugucccugggggccgagaacagcguggccuacuccaacaacagcaucgccauccccaccaacuucacgaucuccgugaccaccgagauccugcccgucagcaugaccaagacgagcguggacugcaccauguacaucugcggcgacuccaccgagugcagcaaccuccugcugcaguacggguccuucugcacccagcucaaccgcgcgcugacgggcaucgccguggagcaggacaagaacacccaggaggucuucgcccaggugaagcagaucuacaagacgcccccgaucaaggacuucgggggcuucaacuucagccagauccugcccgaccccuccaagcccagcaagcgguccuucaucgaggaccuccuguucaacaaggugacccuggccgacgccggcuucaucaagcaguacggggacugccucggcgacaucgcggcccgcgaccugaucugcgcccagaaguucaacgggcugaccguccucccgccccugcugaccgacgagaugaucgcccaguacaccagcgcccuccuggcgggcaccaucacguccggguggaccuucggcgccggcgccgcccugcagauccccuucgcgaugcagauggccuaccgguucaacgggaucggcgugacccagaacgugcucuacgagaaccagaagcugaucgccaaccaguucaacagcgccaucgggaagauccaggacucccugagcuccaccgccagcgcgcucggcaagcugcaggacgucgugaaccagaacgcccaggcccugaacacgcucgugaagcagcuguccagcaacuucggggccaucuccagcguccugaacgacauccucucccgccuggacccgcccgaggccgaggugcagaucgaccggcugaucaccggccgccuccagagccugcagaccuacgugacccagcagcugauccgggcggccgagauccgcgccagcgccaaccucgccgcgaccaagauguccgagugcguccugggccagagcaagcggguggacuucugcgggaagggcuaccaccugauguccuucccccagagcgcgccccacgggguggucuuccuccacgugacguacguccccgcccaggagaagaacuucaccaccgccccggccaucugccacgacggcaaggcccacuucccccgcgaggggguguucguguccaacggcacccacugguucgucacgcagcggaacuucuacgagccccagaucaucaccaccgacaacaccuucgugagcggcaacugcgacguggucaucgggaucgugaacaacacgguguacgacccccugcagccggagcuggacuccuucaaggaggagcucgacaaguacuucaagaaccacaccagccccgacgucgaccugggcgacaucuccgggaucaacgccagcguggugaacauccagaaggagaucgaccgccugaacgaggucgccaagaaccucaacgagucccugaucgaccugcaggagcucggcaaguacgagcaguacaucaaguggcccugguacaucuggcugggcuucaucgccgggcugaucgcgaucgugauggugaccaucaugcucugcugcaugaccagcugcugcuccugccugaagggcugcugcagcugcggguccugcugcaaguucgacgaggacgacagcgagccgguccugaagggcgugaagcuccacuacacgugaggacuaguuauaagacugacuagcccgaugggccucccaacgggcccuccuccccuccuugcaccgagauuaauaaaaaaaaaaaaaaaaaaaaaaaaaaaaaaaaaaaaaaaaaaaaaaaaaaaaaaaaaaaaaaaaugcaucccccccccccccccccccccccccccccccaaaggcucuuuucagagccaccagaauu

SEQ ID NO: 23324 - RNA, 4039 nt, Artificial Sequence
  SARS-CoV-2/Wuhan/WIV05/2019__EPI_ISL_402128 spike protein mRNA gc (1-1273)(K986P_V987P_D614G_M1229I)
aggagaaagcuuaccauguucguguuccugguccuccugccccuggugagcucccagugcgugaaccucaccacccgcacgcagcugccgcccgccuacaccaacagcuucacccggggcgucuacuaccccgacaagguguuccgcuccagcgugcugcacuccacccaggaccucuuccugcccuucuucagcaacgucacgugguuccacgccauccacguguccgggaccaacggcaccaagcgguucgacaacccggugcugcccuucaacgacggggucuacuucgcgagcaccgagaaguccaacaucauccgcggcuggaucuucgggacgacccucgacagcaagacccagucccugcugaucgugaacaacgccaccaacguggucaucaaggugugcgaguuccaguucugcaacgaccccuuccucggcguguacuaccacaagaacaacaagagcuggauggaguccgaguuccgggucuacagcuccgccaacaacugcacguucgaguacgugagccagcccuuccugauggaccuggagggcaagcaggggaacuucaagaaccuccgcgaguucguguucaagaacaucgacggcuacuucaagaucuacuccaagcacaccccgaucaaccugguccgggaccugccccagggguucagcgcccucgagccccugguggaccugcccaucggcaucaacaucacccgcuuccagacccuccuggcccugcaccgguccuaccucacgccgggggacagcagcuccggcuggaccgcgggcgccgccgccuacuacgugggguaccugcagccccgcaccuuccugcucaaguacaacgagaacggcaccaucacggacgcggucgacugcgcccuggacccccugagcgagaccaagugcacccucaaguccuucaccguggagaaggggaucuaccagacgagcaacuuccgggugcagcccaccgaguccaucguccgcuucccgaacaucaccaaccugugccccuucggcgagguguucaacgccacccgguucgccagcgucuacgccuggaaccgcaagcggaucuccaacugcguggcggacuacagcgugcuguacaacuccgccagcuucuccacguucaagugcuacggcgucagccccaccaagcucaacgaccugugcuucaccaacguguacgccgacuccuucgugauccgcggggacgagguccggcagaucgcccccggccagaccgggaagaucgccgacuacaacuacaagcugccggacgacuucacgggcugcgugaucgcguggaacagcaacaaccucgacuccaaggucgggggcaacuacaacuaccuguaccgccuguuccgcaagagcaaccucaagcccuucgagcgggacaucuccaccgagaucuaccaggccggcagcacccccugcaacgggguggagggcuucaacugcuacuucccccugcaguccuacggguuccagccgaccaacggcgugggguaccagcccuaccggguggucgugcugagcuucgagcuccugcacgcccccgccacggugugcggccccaagaaguccaccaaccuggucaagaacaagugcgugaacuucaacuucaacggccucaccgggaccggcgugcugaccgagagcaacaagaaguuccugccguuccagcaguucgggcgcgacaucgccgacacgaccgacgcgguccgcgacccccagacccuggagauccucgacaucacccccugcagcuucggcgggguguccgugaucacgccgggcaccaacaccagcaaccaggucgccgugcuguaccagggcgugaacugcaccgagguccccguggccauccacgccgaccagcugacgcccaccuggcggguguacuccaccgggagcaacgucuuccagacccgcgccggcugccucaucggggcggagcacgugaacaacuccuacgagugcgacauccccaucggcgccggcaucugcgccagcuaccagacgcagaccaacuccccgcggcgcgcccggagcguggcgucccagagcaucaucgccuacaccaugucccugggggccgagaacagcgucgccuacuccaacaacagcaucgccauccccaccaacuucacgaucuccgugaccaccgagauccugcccgugagcaugaccaagacgagcgucgacugcaccauguacaucugcggcgacuccaccgagugcagcaaccuccugcugcaguacggguccuucugcacccagcucaaccgcgcgcugacgggcaucgccguggagcaggacaagaacacccaggagguguucgcccaggucaagcagaucuacaagacgcccccgaucaaggacuucgggggcuucaacuucagccagauccugcccgaccccuccaagcccagcaagcgguccuucaucgaggaccuccuguucaacaaggugacccuggccgacgccggcuucaucaagcaguacggggacugccucggcgacaucgcggcccgcgaccugaucugcgcccagaaguucaacgggcugaccgugcucccgccccugcugaccgacgagaugaucgcccaguacaccagcgcccuccuggcgggcaccaucacguccggguggaccuucggcgccggcgccgcccugcagauccccuucgcgaugcagauggccuaccgguucaacgggaucggcgucacccagaacgugcucuacgagaaccagaagcugaucgccaaccaguucaacagcgccaucgggaagauccaggacucccugagcuccaccgccagcgcgcucggcaagcugcaggacguggucaaccagaacgcccaggcccugaacacgcucgugaagcagcuguccagcaacuucggggccaucuccagcgugcugaacgacauccucucccgccuggacccgcccgaggccgagguccagaucgaccggcugaucaccggccgccuccagagccugcagaccuacgugacccagcagcugauccgggcggccgagauccgcgccagcgccaaccucgccgcgaccaagauguccgagugcgugcugggccagagcaagcgggucgacuucugcgggaagggcuaccaccugauguccuucccccagagcgcgccccacggggugguguuccuccacgucacguacgugcccgcccaggagaagaacuucaccaccgccccggccaucugccacgacggcaaggcccacuucccccgcgagggggucuucguguccaacggcacccacugguucgugacgcagcggaacuucuacgagccccagaucaucaccaccgacaacaccuucgucagcggcaacugcgacguggugaucgggaucgucaacaacacgguguacgacccccugcagccggagcuggacuccuucaaggaggagcucgacaaguacuucaagaaccacaccagccccgacguggaccugggcgacaucuccgggaucaacgccagcgucgugaacauccagaaggagaucgaccgccugaacgagguggccaagaaccucaacgagucccugaucgaccugcaggagcucggcaaguacgagcaguacaucaaguggcccugguacaucuggcugggcuucaucgccgggcugaucgcgaucgucaucgugaccaucaugcucugcugcaugaccagcugcugcuccugccugaagggcugcugcagcugcggguccugcugcaaguucgacgaggacgacagcgagccggugcugaagggcgucaagcuccacuacacgugaggacuaguuauaagacugacuagcccgaugggccucccaacgggcccuccuccccuccuugcaccgagauuaauaaaaaaaaaaaaaaaaaaaaaaaaaaaaaaaaaaaaaaaaaaaaaaaaaaaaaaaaaaaaaaaaugcaucccccccccccccccccccccccccccccccaaaggcucuuuucagagccaccagaauu

SEQ ID NO: 23325 - RNA, 4033 nt, Artificial Sequence
  SARS-CoV-2/Wuhan/WIV05/2019__EPI_ISL_402128 spike protein mRNA gc (1-1273)(K986P_V987P_H69del_V70del_A222V_Y453F_S477N_D614G_I692V)
aggagaaagcuuaccauguucguguuccugguccuccugccccuggugagcucccagugcgugaaccucaccacccgcacgcagcugccgcccgccuacaccaacagcuucacccggggcgucuacuaccccgacaagguguuccgcuccagcgugcugcacuccacccaggaccucuuccugcccuucuucagcaacgucacgugguuccacgccaucuccgggaccaacggcaccaagcgguucgacaacccggugcugcccuucaacgacgggguguacuucgcgagcaccgagaaguccaacaucauccgcggcuggaucuucgggacgacccucgacagcaagacccagucccugcugaucgucaacaacgccaccaacguggugaucaaggucugcgaguuccaguucugcaacgaccccuuccucggcguguacuaccacaagaacaacaagagcuggauggaguccgaguuccggguguacagcuccgccaacaacugcacguucgaguacgucagccagcccuuccugauggaccuggagggcaagcaggggaacuucaagaaccuccgcgaguucguguucaagaacaucgacggcuacuucaagaucuacuccaagcacaccccgaucaaccuggugcgggaccugccccagggguucagcguccucgagccccugguggaccugcccaucggcaucaacaucacccgcuuccagacccuccuggcccugcaccgguccuaccucacgccgggggacagcagcuccggcuggaccgccggcgcggccgccuacuacgugggguaccugcagccccgcaccuuccugcucaaguacaacgagaacggcaccaucacggacgccgucgacugcgcgcuggacccccugagcgagaccaagugcacccucaaguccuucaccguggagaaggggaucuaccagacgagcaacuuccgggugcagcccaccgaguccaucguccgcuucccgaacaucaccaaccugugccccuucggcgagguguucaacgccacccgguucgccagcgucuacgccuggaaccgcaagcggaucuccaacugcguggccgacuacagcgugcuguacaacuccgcgagcuucuccacguucaagugcuacggcgucagccccaccaagcucaacgaccugugcuucaccaacguguacgccgacuccuucgugauccgcggggacgagguccggcagaucgcccccggccagaccgggaagaucgccgacuacaacuacaagcugccggacgacuucacgggcugcgugaucgccuggaacagcaacaaccucgacuccaaggucgggggcaacuacaacuaccuguuccgccuguuccgcaagagcaaccucaagcccuucgagcgggacaucuccaccgagaucuaccaggcgggcaacacccccugcaacgggguggagggcuucaacugcuacuucccccugcagagcuacggguuccagccgaccaacggcgugggguaccagcccuaccggguggucgugcuguccuucgagcuccugcacgcccccgccacggugugcggccccaagaaguccaccaaccuggucaagaacaagugcgugaacuucaacuucaacggccucaccgggaccggcgugcugaccgagagcaacaagaaguuccugccguuccagcaguucgggcgcgacaucgccgacacgaccgacgccguccgcgacccccagacccuggagauccucgacaucacccccugcagcuucggcggggugagcgugaucacgccgggcaccaacaccuccaaccaggucgcggugcuguaccagggcgugaacugcaccgagguccccguggccauccacgccgaccagcugacgcccaccuggcggguguacagcaccggguccaacgucuuccagacccgcgccggcugccucaucggggccgagcacgugaacaacagcuacgagugcgacauccccaucggcgcgggcaucugcgccuccuaccagacgcagaccaacagcccgcggcgcgcccgguccguggccagccaguccgucaucgcguacaccaugagccugggggccgagaacuccguggccuacagcaacaacuccaucgccauccccaccaacuucacgaucagcgugaccaccgagauccugcccgucuccaugaccaagacgagcguggacugcaccauguacaucugcggcgacagcaccgagugcuccaaccuccugcugcaguacgggagcuucugcacccagcucaaccgcgcccugacgggcaucgcgguggagcaggacaagaacacccaggaggucuucgcccaggugaagcagaucuacaagacgcccccgaucaaggacuucgggggcuucaacuucucccagauccugcccgaccccagcaagcccuccaagcggagcuucaucgaggaccuccuguucaacaaggugacccuggccgacgccggcuucaucaagcaguacggggacugccucggcgacaucgccgcgcgcgaccugaucugcgcccagaaguucaacgggcugaccguccucccgccccugcugaccgacgagaugaucgcccaguacaccuccgcccuccuggccggcaccaucacgagcggguggaccuucggcgcgggcgccgcccugcagauccccuucgccaugcagauggcguaccgguucaacgggaucggcgugacccagaacgugcucuacgagaaccagaagcugaucgccaaccaguucaacuccgccaucgggaagauccaggacagccuguccagcaccgccuccgcccucggcaagcugcaggacgucgugaaccagaacgcgcaggcccugaacacgcucgugaagcagcugagcuccaacuucggggccaucagcuccguccugaacgacauccucagccgccuggacccgcccgaggccgaggugcagaucgaccggcugaucaccggccgccuccagucccugcagaccuacgugacccagcagcugauccgggccgcggagauccgcgccagcgccaaccucgccgccaccaagaugagcgagugcguccugggccaguccaagcggguggacuucugcgggaagggcuaccaccugaugagcuucccccaguccgcgccccacgggguggucuuccuccacgugacguacguccccgcccaggagaagaacuucaccaccgccccggccaucugccacgacggcaaggcgcacuucccccgcgaggggguguucgugagcaacggcacccacugguucgucacgcagcggaacuucuacgagccccagaucaucaccaccgacaacaccuucguguccggcaacugcgacguggucaucgggaucgugaacaacacgguguacgacccccugcagccggagcuggacagcuucaaggaggagcucgacaaguacuucaagaaccacaccucccccgacgucgaccugggcgacaucagcgggaucaacgccuccguggugaacauccagaaggagaucgaccgccugaacgaggucgccaagaaccucaacgagagccugaucgaccugcaggagcucggcaaguacgagcaguacaucaaguggcccugguacaucuggcugggcuucaucgccgggcugaucgccaucgugauggugaccaucaugcucugcugcaugaccuccugcugcagcugccugaagggcugcugcuccugcgggagcugcugcaaguucgacgaggacgacuccgagccgguccugaagggcgugaagcuccacuacacgugaggacuaguuauaagacugacuagcccgaugggccucccaacgggcccuccuccccuccuugcaccgagauuaauaaaaaaaaaaaaaaaaaaaaaaaaaaaaaaaaaaaaaaaaaaaaaaaaaaaaaaaaaaaaaaaaugcaucccccccccccccccccccccccccccccccaaaggcucuuuucagagccaccagaauu

SEQ ID NO: 23326 - RNA, 4033 nt, Artificial Sequence
  SARS-CoV-2/Wuhan/WIV05/2019__EPI_ISL_402128 spike protein mRNA gc (1-1273)(K986P_V987P_H69del_V70del_Y453F_D614G_I692V_M1229I)
aggagaaagcuuaccauguucguguuccugguccuccugccccuggugagcucccagugcgugaaccucaccacccgcacgcagcugccgcccgccuacaccaacagcuucacccggggcgucuacuaccccgacaagguguuccgcuccagcgugcugcacuccacccaggaccucuuccugcccuucuucagcaacgucacgugguuccacgccaucuccgggaccaacggcaccaagcgguucgacaacccggugcugcccuucaacgacgggguguacuucgcgagcaccgagaaguccaacaucauccgcggcuggaucuucgggacgacccucgacagcaagacccagucccugcugaucgucaacaacgccaccaacguggugaucaaggucugcgaguuccaguucugcaacgaccccuuccucggcguguacuaccacaagaacaacaagagcuggauggaguccgaguuccggguguacagcuccgccaacaacugcacguucgaguacgucagccagcccuuccugauggaccuggagggcaagcaggggaacuucaagaaccuccgcgaguucguguucaagaacaucgacggcuacuucaagaucuacuccaagcacaccccgaucaaccuggugcgggaccugccccagggguucagcgcccucgagccccuggucgaccugcccaucggcaucaacaucacccgcuuccagacccuccuggcccugcaccgguccuaccucacgccgggggacagcagcuccggcuggaccgcgggcgccgccgccuacuacgugggguaccugcagccccgcaccuuccugcucaaguacaacgagaacggcaccaucacggacgcgguggacugcgcccuggacccccugagcgagaccaagugcacccucaaguccuucaccgucgagaaggggaucuaccagacgagcaacuuccgggugcagcccaccgaguccaucgugcgcuucccgaacaucaccaaccugugccccuucggcgaggucuucaacgccacccgguucgccagcguguacgccuggaaccgcaagcggaucuccaacugcgucgcggacuacagcgugcuguacaacuccgccagcuucuccacguucaagugcuacggcgugagccccaccaagcucaacgaccugugcuucaccaacgucuacgccgacuccuucgugauccgcggggacgaggugcggcagaucgcccccggccagaccgggaagaucgccgacuacaacuacaagcugccggacgacuucacgggcugcgucaucgcguggaacagcaacaaccucgacuccaaggucgggggcaacuacaacuaccuguuccgccuguuccgcaagagcaaccucaagcccuucgagcgggacaucuccaccgagaucuaccaggccggcagcacccccugcaacgggguggagggcuucaacugcuacuucccccugcaguccuacggguuccagccgaccaacggcgugggguaccagcccuaccggguggugguccugagcuucgagcuccugcacgcccccgccacggugugcggccccaagaaguccaccaaccuggugaagaacaagugcgucaacuucaacuucaacggccucaccgggaccggcgugcugaccgagagcaacaagaaguuccugccguuccagcaguucgggcgcgacaucgccgacacgaccgacgcggugcgcgacccccagacccuggagauccucgacaucacccccugcagcuucggcggggucuccgugaucacgccgggcaccaacaccagcaaccagguggccguccuguaccagggcgugaacugcaccgaggugcccgucgccauccacgccgaccagcugacgcccaccuggcggguguacuccaccgggagcaacguguuccagacccgcgccggcugccucaucggggcggagcacgucaacaacuccuacgagugcgacauccccaucggcgccggcaucugcgccagcuaccagacgcagaccaacuccccgcggcgcgcccggagcguggcgucccagagcgugaucgccuacaccaugucccugggggccgagaacagcgucgccuacuccaacaacagcaucgccauccccaccaacuucacgaucuccgugaccaccgagauccugcccgugagcaugaccaagacgagcgucgacugcaccauguacaucugcggcgacuccaccgagugcagcaaccuccugcugcaguacggguccuucugcacccagcucaaccgcgcgcugacgggcaucgccguggagcaggacaagaacacccaggagguguucgcccaggucaagcagaucuacaagacgcccccgaucaaggacuucgggggcuucaacuucagccagauccugcccgaccccuccaagcccagcaagcgguccuucaucgaggaccuccuguucaacaaggugacccuggccgacgccggcuucaucaagcaguacggggacugccucggcgacaucgcggcccgcgaccugaucugcgcccagaaguucaacgggcugaccgugcucccgccccugcugaccgacgagaugaucgcccaguacaccagcgcccuccuggcgggcaccaucacguccggguggaccuucggcgccggcgccgcccugcagauccccuucgcgaugcagauggccuaccgguucaacgggaucggcgucacccagaacgugcucuacgagaaccagaagcugaucgccaaccaguucaacagcgccaucgggaagauccaggacucccugagcuccaccgccagcgcgcucggcaagcugcaggacguggucaaccagaacgcccaggcccugaacacgcucgugaagcagcuguccagcaacuucggggccaucuccagcgugcugaacgacauccucucccgccuggacccgcccgaggccgagguccagaucgaccggcugaucaccggccgccuccagagccugcagaccuacgugacccagcagcugauccgggcggccgagauccgcgccagcgccaaccucgccgcgaccaagauguccgagugcgugcugggccagagcaagcgggucgacuucugcgggaagggcuaccaccugauguccuucccccagagcgcgccccacggggugguguuccuccacgucacguacgugcccgcccaggagaagaacuucaccaccgccccggccaucugccacgacggcaaggcccacuucccccgcgagggggucuucguguccaacggcacccacugguucgugacgcagcggaacuucuacgagccccagaucaucaccaccgacaacaccuucgucagcggcaacugcgacguggugaucgggaucgucaacaacacgguguacgacccccugcagccggagcuggacuccuucaaggaggagcucgacaaguacuucaagaaccacaccagccccgacguggaccugggcgacaucuccgggaucaacgccagcgucgugaacauccagaaggagaucgaccgccugaacgagguggccaagaaccucaacgagucccugaucgaccugcaggagcucggcaaguacgagcaguacaucaaguggcccugguacaucuggcugggcuucaucgccgggcugaucgcgaucgucaucgugaccaucaugcucugcugcaugaccagcugcugcuccugccugaagggcugcugcagcugcggguccugcugcaaguucgacgaggacgacagcgagccggugcugaagggcgucaagcuccacuacacgugaggacuaguuauaagacugacuagcccgaugggccucccaacgggcccuccuccccuccuugcaccgagauuaauaaaaaaaaaaaaaaaaaaaaaaaaaaaaaaaaaaaaaaaaaaaaaaaaaaaaaaaaaaaaaaaaugcaucccccccccccccccccccccccccccccccaaaggcucuuuucagagccaccagaauu

SEQ ID NO: 23327 - RNA, 4030 nt, Artificial Sequence
  SARS-CoV-2/Wuhan/WIV05/2019__EPI_ISL_402128 spike protein mRNA gc (1-1273)(K986P_V987P_K986P_V987P_H69del_V70del_Y144del_N501Y_A570 D_D614G_P681H_T716I_S982A_D1118H)
aggagaaagcuuaccauguucguguuccugguccuccugccccuggugagcucccagugcgugaaccucaccacccgcacgcagcugccgcccgccuacaccaacagcuucacccggggcgucuacuaccccgacaagguguuccgcuccagcgugcugcacuccacccaggaccucuuccugcccuucuucagcaacgucacgugguuccacgccaucuccgggaccaacggcaccaagcgguucgacaacccggugcugcccuucaacgacgggguguacuucgcgagcaccgagaaguccaacaucauccgcggcuggaucuucgggacgacccucgacagcaagacccagucccugcugaucgucaacaacgccaccaacguggugaucaaggucugcgaguuccaguucugcaacgaccccuuccucggcguguaccacaagaacaacaagagcuggauggaguccgaguuccggguguacagcuccgccaacaacugcacguucgaguacgucagccagcccuuccugauggaccuggagggcaagcaggggaacuucaagaaccuccgcgaguucguguucaagaacaucgacggcuacuucaagaucuacuccaagcacaccccgaucaaccuggugcgggaccugccccagggguucagcgcccucgagccccuggucgaccugcccaucggcaucaacaucacccgcuuccagacccuccuggcccugcaccgguccuaccucacgccgggggacagcagcuccggcuggaccgcgggcgccgccgccuacuacgugggguaccugcagccccgcaccuuccugcucaaguacaacgagaacggcaccaucacggacgcgguggacugcgcccuggacccccugagcgagaccaagugcacccucaaguccuucaccgucgagaaggggaucuaccagacgagcaacuuccgggugcagcccaccgaguccaucgugcgcuucccgaacaucaccaaccugugccccuucggcgaggucuucaacgccacccgguucgccagcguguacgccuggaaccgcaagcggaucuccaacugcgucgcggacuacagcgugcuguacaacuccgccagcuucuccacguucaagugcuacggcgugagccccaccaagcucaacgaccugugcuucaccaacgucuacgccgacuccuucgugauccgcggggacgaggugcggcagaucgcccccggccagaccgggaagaucgccgacuacaacuacaagcugccggacgacuucacgggcugcgucaucgcguggaacagcaacaaccucgacuccaaggucgggggcaacuacaacuaccuguaccgccuguuccgcaagagcaaccucaagcccuucgagcgggacaucuccaccgagaucuaccaggccggcagcacccccugcaacgggguggagggcuucaacugcuacuucccccugcaguccuacggguuccagccgaccuacggcgugggguaccagcccuaccggguggugguccugagcuucgagcuccugcacgcccccgccacggugugcggccccaagaaguccaccaaccuggugaagaacaagugcgucaacuucaacuucaacggccucaccgggaccggcgugcugaccgagagcaacaagaaguuccugccguuccagcaguucgggcgcgacaucgacgacacgaccgacgccgugcgcgacccccagacccuggagauccucgacaucacccccugcagcuucggcggggucuccgugaucacgccgggcaccaacaccagcaaccagguggcgguccuguaccagggcgugaacugcaccgaggugcccgucgccauccacgccgaccagcugacgcccaccuggcggguguacuccaccgggagcaacguguuccagacccgcgccggcugccucaucggggccgagcacgucaacaacuccuacgagugcgacauccccaucggcgcgggcaucugcgccagcuaccagacgcagaccaacucccaccggcgcgcccggagcguggccucccagagcaucaucgcguacaccaugucccugggggccgagaacagcguggccuacuccaacaacagcaucgccaucccgaucaacuucaccaucuccgucacgaccgagauccugcccgugagcaugaccaagaccagcguggacugcacgauguacaucugcggcgacuccaccgagugcagcaaccuccugcugcaguacggguccuucugcacccagcucaaccgcgcccugaccggcaucgcggucgagcaggacaagaacacgcaggagguguucgcccaggugaagcagaucuacaagaccccgcccaucaaggacuucgggggcuucaacuucagccagauccugcccgaccccuccaagcccagcaagcgguccuucaucgaggaccuccuguucaacaaggucacccuggccgacgccggcuucaucaagcaguacggggacugccucggcgacaucgccgcgcgcgaccugaucugcgcccagaaguucaacgggcugaccgugcugcccccgcuccugacggacgagaugaucgcccaguacaccagcgcccuccuggccggcaccaucaccuccggguggacguucggcgcgggcgccgcccugcagauccccuucgccaugcagauggcguaccgguucaacgggaucggcgugacccagaacguccucuacgagaaccagaagcugaucgccaaccaguucaacagcgccaucgggaagauccaggacucccugagcuccaccgccagcgcccucggcaagcugcaggacguggugaaccagaacgcgcaggcccugaacacccucgucaagcagcuguccagcaacuucggggccaucuccagcgugcugaacgacauccucgcccgccuggacccgcccgaggccgaggugcagaucgaccggcugaucacgggccgccuccagucccugcagaccuacgucacccagcagcugauccgggcggccgagauccgcgccagcgccaaccucgccgcgaccaagaugagcgagugcgugcugggccaguccaagcggguggacuucugcgggaagggcuaccaccugaugagcuucccccaguccgcgccccacggggucguguuccuccacgugaccuacguccccgcccaggagaagaacuucacgaccgcccccgccaucugccacgacggcaaggcccacuucccgcgcgaggggguguucgucagcaacggcacccacugguucgugacccagcggaacuucuacgagccccagaucaucacgacccacaacaccuucguguccggcaacugcgacgucgugaucgggaucgugaacaacaccgucuacgacccccugcagcccgagcuggacagcuucaaggaggagcucgacaaguacuucaagaaccacacguccccggacguggaccugggcgacaucagcgggaucaacgccuccguggucaacauccagaaggagaucgaccgccugaacgagguggccaagaaccucaacgagagccugaucgaccugcaggagcucggcaaguacgagcaguacaucaaguggcccugguacaucuggcugggcuucaucgccgggcugaucgcgaucgugauggucaccaucaugcucugcugcaugaccuccugcugcagcugccugaagggcugcugcuccugcgggagcugcugcaaguucgacgaggacgacuccgagcccgugcugaagggcgugaagcuccacuacaccugaggacuaguuauaagacugacuagcccgaugggccucccaacgggcccuccuccccuccuugcaccgagauuaauaaaaaaaaaaaaaaaaaaaaaaaaaaaaaaaaaaaaaaaaaaaaaaaaaaaaaaaaaaaaaaaaugcaucccccccccccccccccccccccccccccccaaaggcucuuuucagagccaccagaauu

SEQ ID NO: 23328 - RNA, 4039 nt, Artificial Sequence
  SARS-CoV-2/Wuhan/WIV05/2019__EPI_ISL_402128 spike protein mRNA gc (1-1273)(K986P_V987P_K986P_V987P_K417N_E484K_N501Y_D614G)
aggagaaagcuuaccauguucguguuccugguccuccugccccuggugagcucccagugcgugaaccucaccacccgcacgcagcugccgcccgccuacaccaacagcuucacccggggcgucuacuaccccgacaagguguuccgcuccagcgugcugcacuccacccaggaccucuuccugcccuucuucagcaacgucacgugguuccacgccauccacguguccgggaccaacggcaccaagcgguucgacaacccggugcugcccuucaacgacggggucuacuucgcgagcaccgagaaguccaacaucauccgcggcuggaucuucgggacgacccucgacagcaagacccagucccugcugaucgugaacaacgccaccaacguggucaucaaggugugcgaguuccaguucugcaacgaccccuuccucggcguguacuaccacaagaacaacaagagcuggauggaguccgaguuccgggucuacagcuccgccaacaacugcacguucgaguacgugagccagcccuuccugauggaccuggagggcaagcaggggaacuucaagaaccuccgcgaguucguguucaagaacaucgacggcuacuucaagaucuacuccaagcacaccccgaucaaccugguccgggaccugccccagggguucagcgcccucgagccccugguggaccugcccaucggcaucaacaucacccgcuuccagacccuccuggcccugcaccgguccuaccucacgccgggggacagcagcuccggcuggaccgcgggcgccgccgccuacuacgugggguaccugcagccccgcaccuuccugcucaaguacaacgagaacggcaccaucacggacgcggucgacugcgcccuggacccccugagcgagaccaagugcacccucaaguccuucaccguggagaaggggaucuaccagacgagcaacuuccgggugcagcccaccgaguccaucguccgcuucccgaacaucaccaaccugugccccuucggcgagguguucaacgccacccgguucgccagcgucuacgccuggaaccgcaagcggaucuccaacugcguggcggacuacagcgugcuguacaacuccgccagcuucuccacguucaagugcuacggcgucagccccaccaagcucaacgaccugugcuucaccaacguguacgccgacuccuucgugauccgcggggacgagguccggcagaucgcccccggccagaccgggaacaucgccgacuacaacuacaagcugccggacgacuucacgggcugcgugaucgcguggaacagcaacaaccucgacuccaaggucgggggcaacuacaacuaccuguaccgccuguuccgcaagagcaaccucaagcccuucgagcgggacaucuccaccgagaucuaccaggccggcagcacccccugcaacggggugaagggcuucaacugcuacuucccccugcaguccuacggguuccagccgaccuacggcgugggguaccagcccuaccggguggucgugcugagcuucgagcuccugcacgcccccgccacggugugcggccccaagaaguccaccaaccuggucaagaacaagugcgugaacuucaacuucaacggccucaccgggaccggcgugcugaccgagagcaacaagaaguuccugccguuccagcaguucgggcgcgacaucgccgacacgaccgacgcgguccgcgacccccagacccuggagauccucgacaucacccccugcagcuucggcgggguguccgugaucacgccgggcaccaacaccagcaaccaggucgccgugcuguaccagggcgugaacugcaccgagguccccguggccauccacgccgaccagcugacgcccaccuggcggguguacuccaccgggagcaacgucuuccagacccgcgccggcugccucaucggggcggagcacgugaacaacuccuacgagugcgacauccccaucggcgccggcaucugcgccagcuaccagacgcagaccaacuccccgcggcgcgcccggagcguggcgucccagagcaucaucgccuacaccaugucccugggggccgagaacagcgucgccuacuccaacaacagcaucgccauccccaccaacuucacgaucuccgugaccaccgagauccugcccgugagcaugaccaagacgagcgucgacugcaccauguacaucugcggcgacuccaccgagugcagcaaccuccugcugcaguacggguccuucugcacccagcucaaccgcgcgcugacgggcaucgccguggagcaggacaagaacacccaggagguguucgcccaggucaagcagaucuacaagacgcccccgaucaaggacuucgggggcuucaacuucagccagauccugcccgaccccuccaagcccagcaagcgguccuucaucgaggaccuccuguucaacaaggugacccuggccgacgccggcuucaucaagcaguacggggacugccucggcgacaucgcggcccgcgaccugaucugcgcccagaaguucaacgggcugaccgugcucccgccccugcugaccgacgagaugaucgcccaguacaccagcgcccuccuggcgggcaccaucacguccggguggaccuucggcgccggcgccgcccugcagauccccuucgcgaugcagauggccuaccgguucaacgggaucggcgucacccagaacgugcucuacgagaaccagaagcugaucgccaaccaguucaacagcgccaucgggaagauccaggacucccugagcuccaccgccagcgcgcucggcaagcugcaggacguggucaaccagaacgcccaggcccugaacacgcucgugaagcagcuguccagcaacuucggggccaucuccagcgugcugaacgacauccucucccgccuggacccgcccgaggccgagguccagaucgaccggcugaucaccggccgccuccagagccugcagaccuacgugacccagcagcugauccgggcggccgagauccgcgccagcgccaaccucgccgcgaccaagauguccgagugcgugcugggccagagcaagcgggucgacuucugcgggaagggcuaccaccugauguccuucccccagagcgcgccccacggggugguguuccuccacgucacguacgugcccgcccaggagaagaacuucaccaccgccccggccaucugccacgacggcaaggcccacuucccccgcgagggggucuucguguccaacggcacccacugguucgugacgcagcggaacuucuacgagccccagaucaucaccaccgacaacaccuucgucagcggcaacugcgacguggugaucgggaucgucaacaacacgguguacgacccccugcagccggagcuggacuccuucaaggaggagcucgacaaguacuucaagaaccacaccagccccgacguggaccugggcgacaucuccgggaucaacgccagcgucgugaacauccagaaggagaucgaccgccugaacgagguggccaagaaccucaacgagucccugaucgaccugcaggagcucggcaaguacgagcaguacaucaaguggcccugguacaucuggcugggcuucaucgccgggcugaucgcgaucgucauggugaccaucaugcucugcugcaugaccagcugcugcuccugccugaagggcugcugcagcugcggguccugcugcaaguucgacgaggacgacagcgagccggugcugaagggcgucaagcuccacuacacgugaggacuaguuauaagacugacuagcccgaugggccucccaacgggcccuccuccccuccuugcaccgagauuaauaaaaaaaaaaaaaaaaaaaaaaaaaaaaaaaaaaaaaaaaaaaaaaaaaaaaaaaaaaaaaaaaugcaucccccccccccccccccccccccccccccccaaaggcucuuuucagagccaccagaauu

SEQ ID NO: 23329 - RNA, 4030 nt, Artificial Sequence
  SARS-CoV-2/Wuhan/WIV05/2019__EPI_ISL_402128 spike protein mRNA gc (1-1273)(K986P_V987P_K986P_V987P_L18F_D80A_D215G_L242del_A243del_ L244del_R246I_K417N_E484K_N501Y_D614G_A701V)
aggagaaagcuuaccauguucguguuccugguccuccugccccuggugagcucccagugcgugaacuucaccacccgcacgcagcucccgcccgccuacaccaacagcuucacccggggcgucuacuaccccgacaagguguuccgcuccagcgugcugcacuccacccaggaccuguuccuccccuucuucagcaacgucacgugguuccacgccauccacguguccgggaccaacggcaccaagcgguucgcgaacccggugcugcccuucaacgacggggucuacuucgccagcaccgagaaguccaacaucauccgcggcuggaucuucgggacgacccuggacagcaagacccagucccuccugaucgugaacaacgccaccaacguggucaucaaggugugcgaguuccaguucugcaacgaccccuuccugggcguguacuaccacaagaacaacaagagcuggauggaguccgaguuccgggucuacagcuccgccaacaacugcacguucgaguacgugagccagcccuuccucauggaccuggagggcaagcaggggaacuucaagaaccugcgcgaguucguguucaagaacaucgacggcuacuucaagaucuacuccaagcacaccccgaucaaccucguccgggggcugccccagggcuucagcgcccuggagccccucguggaccugcccaucgggaucaacaucacccgcuuccagacccugcacaucuccuaccucacgccgggcgacagcagcuccggcuggaccgcgggggccgccgccuacuacgugggcuaccugcagccccggaccuuccugcucaaguacaacgagaacgggaccaucacggacgcggucgacugcgcccuggacccccugagcgagaccaagugcacccucaaguccuucaccguggagaagggcaucuaccagacgagcaacuuccgcgugcagcccaccgaguccaucguccgguucccgaacaucaccaaccugugccccuucggcgagguguucaacgccacccgcuucgccagcgucuacgccuggaaccggaagcgcaucuccaacugcguggcggacuacagcgugcuguacaacuccgccagcuucuccacguucaagugcuacggggucagccccaccaagcucaacgaccugugcuucaccaacguguacgccgacuccuucgugauccggggcgacgagguccgccagaucgcccccgggcagaccggcaacaucgccgacuacaacuacaagcugccggacgacuucacggggugcgugaucgcguggaacagcaacaaccucgacuccaaggugggcggcaacuacaacuaccuguaccggcuguuccgcaagagcaaccucaagcccuucgagcgggacaucuccaccgagaucuaccaggccgggagcacccccugcaacggcgucaagggguucaacugcuacuucccccugcaguccuacggcuuccagccgaccuacggggugggcuaccagcccuaccgcguggucgugcugagcuucgagcuccugcacgcccccgccacggugugcggccccaagaaguccaccaaccuggucaagaacaagugcgugaacuucaacuucaacgggcucaccggcaccggggugcugaccgagagcaacaagaaguuccugccguuccagcaguucggccgggacaucgccgacacgaccgacgcgguccgcgacccccagacccucgagauccuggacaucacccccugcagcuucgggggcguguccgugaucacgccgggcaccaacaccagcaaccaggucgccgugcuguaccagggggugaacugcaccgagguccccguggccauccacgccgaccagcugacgcccaccuggcgcguguacuccaccggcagcaacgucuuccagacccgggccgggugccucaucggcgcggagcacgugaacaacuccuacgagugcgacauccccaucggcgccgggaucugcgccagcuaccagacgcagaccaacuccccgcgccgggcccgcagcguggcgucccagagcaucaucgccuacaccaugucccugggcgucgagaacagcguggccuacuccaacaacagcaucgccauccccaccaacuucacgaucuccgugaccaccgagauccugcccgucagcaugaccaagacgagcguggacugcaccauguacaucugcggggacuccaccgagugcagcaaccuccugcugcaguacggcuccuucugcacccagcucaaccgggcccugacggggaucgcgguggagcaggacaagaacacccaggaggucuucgcccaggugaagcagaucuacaagacgcccccgaucaaggacuucggcggcuucaacuucagccagauccugcccgaccccuccaagcccagcaagcgcuccuucaucgaggaccuccuguucaacaaggugacccuggccgacgccggguucaucaagcaguacggcgacugccucggggacaucgccgcgcgggaccugaucugcgcccagaaguucaacggccugaccguccucccgccccugcugaccgacgagaugaucgcccaguacaccagcgcccuccuggccgggaccaucacguccggcuggaccuucggcgcgggggccgcccugcagauccccuucgccaugcagauggcguaccgcuucaacggcaucggggugacccagaacgugcucuacgagaaccagaagcugaucgccaaccaguucaacagcgccaucggcaagauccaggacucccugagcuccaccgccagcgcccucgggaagcugcaggacgucgugaaccagaacgcgcaggcccugaacacgcucgugaagcagcuguccagcaacuucggcgccaucuccagcguccugaacgacauccucucccggcuggacccgcccgaggccgaggugcagaucgaccgccugaucaccggccggcuccagagccugcagaccuacgugacccagcagcugauccgcgccgcggagauccgggccagcgccaaccucgccgccaccaagauguccgagugcguccuggggcagagcaagcgcguggacuucugcggcaagggguaccaccugauguccuucccccagagcgcgccccacggcguggucuuccuccacgugacguacguccccgcccaggagaagaacuucaccaccgccccggccaucugccacgacgggaaggcgcacuucccccgggagggcguguucguguccaacggcacccacugguucgucacgcagcgcaacuucuacgagccccagaucaucaccaccgacaacaccuucgugagcgggaacugcgacguggucaucggcaucgugaacaacacgguguacgacccccugcagccggagcuggacuccuucaaggaggagcucgacaaguacuucaagaaccacaccagccccgacgucgaccugggggacaucuccggcaucaacgccagcguggugaacauccagaaggagaucgaccggcugaacgaggucgccaagaaccucaacgagucccugaucgaccugcaggagcucggcaaguacgagcaguacaucaaguggcccugguacaucuggcugggguucaucgccggccugaucgccaucgugauggugaccaucaugcucugcugcaugaccagcugcugcuccugccugaaggggugcugcagcugcggcuccugcugcaaguucgacgaggacgacagcgagccgguccugaagggggugaagcuccacuacacgugaggacuaguuauaagacugacuagcccgaugggccucccaacgggcccuccuccccuccuugcaccgagauuaauaaaaaaaaaaaaaaaaaaaaaaaaaaaaaaaaaaaaaaaaaaaaaaaaaaaaaaaaaaaaaaaaugcaucccccccccccccccccccccccccccccccaaaggcucuuuucagagccaccagaauu

SEQ ID NO: 23330 - RNA, 4039 nt, Artificial Sequence
  SARS-CoV-2/Wuhan/WIV05/2019__EPI_ISL_402128 spike protein mRNA gc (1-1273)(K986P_V987P_K986P_V987P_E484K_D614G)
aggagaaagcuuaccauguucguguuccugguccuccugccccuggugagcucccagugcgugaaccucaccacccgcacgcagcugccgcccgccuacaccaacagcuucacccggggcgucuacuaccccgacaagguguuccgcuccagcgugcugcacuccacccaggaccucuuccugcccuucuucagcaacgucacgugguuccacgccauccacguguccgggaccaacggcaccaagcgguucgacaacccggugcugcccuucaacgacggggucuacuucgcgagcaccgagaaguccaacaucauccgcggcuggaucuucgggacgacccucgacagcaagacccagucccugcugaucgugaacaacgccaccaacguggucaucaaggugugcgaguuccaguucugcaacgaccccuuccucggcguguacuaccacaagaacaacaagagcuggauggaguccgaguuccgggucuacagcuccgccaacaacugcacguucgaguacgugagccagcccuuccugauggaccuggagggcaagcaggggaacuucaagaaccuccgcgaguucguguucaagaacaucgacggcuacuucaagaucuacuccaagcacaccccgaucaaccugguccgggaccugccccagggguucagcgcccucgagccccugguggaccugcccaucggcaucaacaucacccgcuuccagacccuccuggcccugcaccgguccuaccucacgccgggggacagcagcuccggcuggaccgcgggcgccgccgccuacuacgugggguaccugcagccccgcaccuuccugcucaaguacaacgagaacggcaccaucacggacgcggucgacugcgcccuggacccccugagcgagaccaagugcacccucaaguccuucaccguggagaaggggaucuaccagacgagcaacuuccgggugcagcccaccgaguccaucguccgcuucccgaacaucaccaaccugugccccuucggcgagguguucaacgccacccgguucgccagcgucuacgccuggaaccgcaagcggaucuccaacugcguggcggacuacagcgugcuguacaacuccgccagcuucuccacguucaagugcuacggcgucagccccaccaagcucaacgaccugugcuucaccaacguguacgccgacuccuucgugauccgcggggacgagguccggcagaucgcccccggccagaccgggaagaucgccgacuacaacuacaagcugccggacgacuucacgggcugcgugaucgcguggaacagcaacaaccucgacuccaaggucgggggcaacuacaacuaccuguaccgccuguuccgcaagagcaaccucaagcccuucgagcgggacaucuccaccgagaucuaccaggccggcagcacccccugcaacggggugaagggcuucaacugcuacuucccccugcaguccuacggguuccagccgaccaacggcgugggguaccagcccuaccggguggucgugcugagcuucgagcuccugcacgcccccgccacggugugcggccccaagaaguccaccaaccuggucaagaacaagugcgugaacuucaacuucaacggccucaccgggaccggcgugcugaccgagagcaacaagaaguuccugccguuccagcaguucgggcgcgacaucgccgacacgaccgacgcgguccgcgacccccagacccuggagauccucgacaucacccccugcagcuucggcgggguguccgugaucacgccgggcaccaacaccagcaaccaggucgccgugcuguaccagggcgugaacugcaccgagguccccguggccauccacgccgaccagcugacgcccaccuggcggguguacuccaccgggagcaacgucuuccagacccgcgccggcugccucaucggggcggagcacgugaacaacuccuacgagugcgacauccccaucggcgccggcaucugcgccagcuaccagacgcagaccaacuccccgcggcgcgcccggagcguggcgucccagagcaucaucgccuacaccaugucccugggggccgagaacagcgucgccuacuccaacaacagcaucgccauccccaccaacuucacgaucuccgugaccaccgagauccugcccgugagcaugaccaagacgagcgucgacugcaccauguacaucugcggcgacuccaccgagugcagcaaccuccugcugcaguacggguccuucugcacccagcucaaccgcgcgcugacgggcaucgccguggagcaggacaagaacacccaggagguguucgcccaggucaagcagaucuacaagacgcccccgaucaaggacuucgggggcuucaacuucagccagauccugcccgaccccuccaagcccagcaagcgguccuucaucgaggaccuccuguucaacaaggugacccuggccgacgccggcuucaucaagcaguacggggacugccucggcgacaucgcggcccgcgaccugaucugcgcccagaaguucaacgggcugaccgugcucccgccccugcugaccgacgagaugaucgcccaguacaccagcgcccuccuggcgggcaccaucacguccggguggaccuucggcgccggcgccgcccugcagauccccuucgcgaugcagauggccuaccgguucaacgggaucggcgucacccagaacgugcucuacgagaaccagaagcugaucgccaaccaguucaacagcgccaucgggaagauccaggacucccugagcuccaccgccagcgcgcucggcaagcugcaggacguggucaaccagaacgcccaggcccugaacacgcucgugaagcagcuguccagcaacuucggggccaucuccagcgugcugaacgacauccucucccgccuggacccgcccgaggccgagguccagaucgaccggcugaucaccggccgccuccagagccugcagaccuacgugacccagcagcugauccgggcggccgagauccgcgccagcgccaaccucgccgcgaccaagauguccgagugcgugcugggccagagcaagcgggucgacuucugcgggaagggcuaccaccugauguccuucccccagagcgcgccccacggggugguguuccuccacgucacguacgugcccgcccaggagaagaacuucaccaccgccccggccaucugccacgacggcaaggcccacuucccccgcgagggggucuucguguccaacggcacccacugguucgugacgcagcggaacuucuacgagccccagaucaucaccaccgacaacaccuucgucagcggcaacugcgacguggugaucgggaucgucaacaacacgguguacgacccccugcagccggagcuggacuccuucaaggaggagcucgacaaguacuucaagaaccacaccagccccgacguggaccugggcgacaucuccgggaucaacgccagcgucgugaacauccagaaggagaucgaccgccugaacgagguggccaagaaccucaacgagucccugaucgaccugcaggagcucggcaaguacgagcaguacaucaaguggcccugguacaucuggcugggcuucaucgccgggcugaucgcgaucgucauggugaccaucaugcucugcugcaugaccagcugcugcuccugccugaagggcugcugcagcugcggguccugcugcaaguucgacgaggacgacagcgagccggugcugaagggcgucaagcuccacuacacgugaggacuaguuauaagacugacuagcccgaugggccucccaacgggcccuccuccccuccuugcaccgagauuaauaaaaaaaaaaaaaaaaaaaaaaaaaaaaaaaaaaaaaaaaaaaaaaaaaaaaaaaaaaaaaaaaugcaucccccccccccccccccccccccccccccccaaaggcucuuuucagagccaccagaauu

SEQ ID NO: 23331 - RNA, 4039 nt, Artificial Sequence
  SARS-CoV-2/Wuhan/WIV05/2019__EPI_ISL_402128 spike protein mRNA gc (1-1273)(K986P_V987P_K986P_V987P_L18F_T20N_P26S_D138Y_R190S_K417T _E484K_N501Y_D614G_H655Y_T1027I)
aggagaaagcuuaccauguucguguuccugguccuccugccccuggugagcucccagugcgugaacuucaccaaccgcacccagcucccgagcgccuacacgaacuccuucacccggggcgucuacuaccccgacaagguguuccgcagcuccgugcugcacagcacccaggaccuguuccuccccuucuucuccaacgucaccugguuccacgccauccacgugagcgggacgaacggcaccaagcgguucgacaaccccgugcugccguucaacgacggggucuacuucgcguccaccgagaaguccaacaucauccgcggcuggaucuucgggaccacgcuggacuccaagacccagagccuccugaucgugaacaacgccaccaacguggucaucaaggugugcgaguuccaguucugcaacuaccccuuccugggcguguacuaccacaagaacaacaaguccuggauggagagcgaguuccgggucuacuccagcgccaacaacugcaccuucgaguacgugucccagcccuuccucauggaccuggagggcaagcaggggaacuucaagaaccugagcgaguucguguucaagaacaucgacggcuacuucaagaucuacuccaagcacacgcccaucaaccucguccgcgaccugccgcagggguucagcgcccuggagccccucguggaccugcccaucggcaucaacaucacccgguuccagacccugcucgcccugcaccgcagcuaccugacccccggggacuccagcuccggcuggacggcgggcgccgccgccuacuacgugggguaccuccagccgcggaccuuccugcugaaguacaacgagaacggcaccaucaccgacgcggucgacugcgcccucgacccccugagcgagacgaagugcacccugaaguccuucaccguggagaaggggaucuaccagaccagcaacuuccgcgugcagcccacggaguccaucguccgguuccccaacaucaccaaccucugcccguucggcgagguguucaacgccacccgcuucgccagcgucuacgccuggaaccggaagcgcaucuccaacugcguggcggacuacagcgugcuguacaacuccgccagcuucuccaccuucaagugcuacggcgucagccccacgaagcugaacgaccucugcuucaccaacguguacgccgacuccuucgugauccgcggggacgagguccggcagaucgcccccggccagaccgggaccaucgccgacuacaacuacaagcugcccgacgacuucacgggcugcgugaucgcguggaacagcaacaaccuggacuccaaggucgggggcaacuacaacuaccucuaccggcuguuccgcaagagcaaccugaagccguucgagcgggacaucuccaccgagaucuaccaggccggcagcacccccugcaacggggugaagggcuucaacugcuacuucccccuccagagcuacggguuccagcccaccuacggcgugggguaccagccguaccgcguggucgugcuguccuucgagcugcuccacgcccccgccacggugugcggccccaagaaguccaccaaccuggucaagaacaagugcgugaacuucaacuucaacggccugaccgggaccggcgugcucaccgagagcaacaagaaguuccugcccuuccagcaguucgggcgggacaucgccgacacgaccgacgcgguccgcgacccgcagacccuggagauccuggacaucacccccugcagcuucggcgggguguccgugaucacgcccggcaccaacaccagcaaccaggucgccgugcucuaccagggcgugaacugcaccgaggucccgguggccauccacgccgaccagcugacgcccaccuggcgcguguacuccaccgggagcaacgucuuccagacccgggccggcugccugaucggggcggaguacgugaacaacuccuacgagugcgacauccccaucggcgccggcaucugcgccagcuaccagacgcagaccaacagcccccgccgggcccgcagcguggcgucccagagcaucaucgccuacaccaugucccucggggccgagaacagcgucgccuacuccaacaacagcaucgccaucccgaccaacuucacgaucagcgugaccaccgagauccugcccguguccaugaccaagacgagcgucgacugcaccauguacaucugcggcgacuccaccgagugcagcaaccugcuccugcaguacggguccuucugcacccagcugaaccgggcgcucacgggcaucgccguggagcaggacaagaacacccaggagguguucgcccaggucaagcagaucuacaagaccccgcccaucaaggacuucgggggcuucaacuucagccagauccugcccgaccccuccaagcccagcaagcgcuccuucaucgaggaccuccuguucaacaaggugacccuggccgacgccggcuucaucaagcaguacggggacugccugggcgacaucgcggcccgggaccucaucugcgcccagaaguucaacgggcugacggugcugcccccgcuccugaccgacgagaugaucgcccaguacaccagcgcccugcucgcgggcaccaucacguccggguggaccuucggcgccggcgccgcccugcagauccccuucgcgaugcagauggccuaccgcuucaacgggaucggcgucacccagaacgugcuguacgagaaccagaagcucaucgccaaccaguucaacagcgccaucgggaagauccaggacucccugagcuccaccgccagcgcgcugggcaagcuccaggacguggucaaccagaacgcccaggcccugaacacgcuggugaagcagcucuccagcaacuucggggccaucuccagcgugcugaacgacauccugagccggcucgacccgcccgaggccgagguccagaucgaccgccugaucaccggccggcugcagucccuccagaccuacgugacccagcagcugauccgcgcggccgagauccgggccagcgccaaccuggccgcgaucaagauguccgagugcgugcucggccagagcaagcgcgucgacuucugcgggaagggcuaccaccugauguccuucccccagagcgcgccccacggggugguguuccugcacgucaccuacgugcccgcccaggagaagaacuucacgaccgcccccgccaucugccacgacggcaaggcccacuucccgcgggagggggucuucguguccaacggcacccacugguucgugacccagcgcaacuucuacgagccccagaucaucacgaccgacaacaccuucgucagcggcaacugcgacguggugaucgggaucgucaacaacaccguguacgacccccuccagcccgagcuggacuccuucaaggaggagcuggacaaguacuucaagaaccacacgagcccggacguggaccucggcgacaucuccgggaucaacgccagcgucgugaacauccagaaggagaucgaccggcugaacgagguggccaagaaccugaacgagucccucaucgaccugcaggagcugggcaaguacgagcaguacaucaaguggcccugguacaucuggcucggcuucaucgccgggcugaucgcgaucgucauggugaccaucaugcugugcugcaugaccagcugcugcuccugccucaagggcugcugcagcugcggguccugcugcaaguucgacgaggacgacagcgagcccgugcugaagggcgucaagcugcacuacaccugaggacuaguuauaagacugacuagcccgaugggccucccaacgggcccuccuccccuccuugcaccgagauuaauaaaaaaaaaaaaaaaaaaaaaaaaaaaaaaaaaaaaaaaaaaaaaaaaaaaaaaaaaaaaaaaaugcaucccccccccccccccccccccccccccccccaaaggcucuuuucagagccaccagaauu

SEQ ID NO: 23332 - RNA, 4039 nt, Artificial Sequence
  SARS-CoV-2/Wuhan/WIV05/2019__EPI_ISL_402128 spike protein mRNA gc (1-1273)(K986P_V987P_K986P_V987P_S13I_W152C_L452R_D614G)
aggagaaagcuuaccauguucguguuccugguccuccugccccuggugagcauccagugcgugaaccucaccacccgcacgcagcugccgcccgccuacaccaacuccuucacccggggcgucuacuaccccgacaagguguuccgcagcuccgugcugcacagcacccaggaccucuuccugcccuucuucuccaacgucacgugguuccacgccauccacgugagcgggaccaacggcaccaagcgguucgacaacccggugcugcccuucaacgacggggucuacuucgcguccaccgagaaguccaacaucauccgcggcuggaucuucgggacgacccucgacagcaagacccagagccugcugaucgugaacaacgccaccaacguggucaucaaggugugcgaguuccaguucugcaacgaccccuuccucggcguguacuaccacaagaacaacaaguccugcauggagagcgaguuccgggucuacuccagcgccaacaacugcacguucgaguacgugucccagcccuuccugauggaccuggagggcaagcaggggaacuucaagaaccuccgcgaguucguguucaagaacaucgacggcuacuucaagaucuacagcaagcacaccccgaucaaccugguccgggaccugccccagggguucuccgcccucgagccccugguggaccugcccaucggcaucaacaucacccgcuuccagacccuccuggcccugcaccggagcuaccucacgccgggggacuccagcagcggcuggaccgcgggcgccgccgccuacuacgugggguaccugcagccccgcaccuuccugcucaaguacaacgagaacggcaccaucacggacgcggucgacugcgcccuggacccccuguccgagaccaagugcacccucaagagcuucaccguggagaaggggaucuaccagacguccaacuuccgggugcagcccaccgagagcaucguccgcuucccgaacaucaccaaccugugccccuucggcgagguguucaacgccacccgguucgccuccgucuacgccuggaaccgcaagcggaucagcaacugcguggcggacuacuccgugcuguacaacagcgccuccuucagcacguucaagugcuacggcgucucccccaccaagcucaacgaccugugcuucaccaacguguacgccgacagcuucgugauccgcggggacgagguccggcagaucgcccccggccagaccgggaagaucgccgacuacaacuacaagcugccggacgacuucacgggcugcgugaucgcguggaacuccaacaaccucgacagcaaggucgggggcaacuacaacuaccgcuaccggcuguuccgcaaguccaaccugaagcccuucgagcgggacaucagcaccgagaucuaccaggccggcuccacccccugcaacgggguggagggcuucaacugcuacuucccccuccagagcuacggguuccagccgaccaacggcgugggguaccagcccuaccgcguggucgugcuguccuucgagcugcuccacgcccccgccacggugugcggccccaagaaguccaccaaccuggucaagaacaagugcgugaacuucaacuucaacggccugaccgggaccggcgugcucaccgagagcaacaagaaguuccugccguuccagcaguucgggcgcgacaucgccgacacgaccgacgcgguccgggacccccagacccuggagauccuggacaucacccccugcagcuucggcggggugagcgugaucacgccgggcaccaacaccuccaaccaggucgccgugcucuaccagggcgugaacugcaccgagguccccguggccauccacgccgaccagcugacgcccaccuggcgcguguacagcaccggguccaacgucuuccagacccgggccggcugccugaucggggcggagcacgugaacaacagcuacgagugcgacauccccaucggcgccggcaucugcgccuccuaccagacgcagaccaacagcccgcgccgggcccgcuccguggcgagccaguccaucaucgccuacaccaugagccucggggccgagaacuccgucgccuacagcaacaacuccaucgccauccccaccaacuucacgaucagcgugaccaccgagauccugcccguguccaugaccaagacgagcgucgacugcaccauguacaucugcggcgacagcaccgagugcuccaaccugcuccugcaguacgggagcuucugcacccagcugaaccgggcgcucacgggcaucgccguggagcaggacaagaacacccaggagguguucgcccaggucaagcagaucuacaagacgcccccgaucaaggacuucgggggcuucaacuucucccagauccugcccgaccccagcaagcccuccaagcgcagcuucaucgaggaccuccuguucaacaaggugacccuggccgacgccggcuucaucaagcaguacggggacugccugggcgacaucgcggcccgggaccucaucugcgcccagaaguucaacgggcugaccgugcugccgccccuccugaccgacgagaugaucgcccaguacaccuccgcccugcucgcgggcaccaucacgagcggguggaccuucggcgccggcgccgcccugcagauccccuucgcgaugcagauggccuaccgcuucaacgggaucggcgucacccagaacgugcuguacgagaaccagaagcucaucgccaaccaguucaacuccgccaucgggaagauccaggacagccuguccagcaccgccuccgcgcugggcaagcuccaggacguggucaaccagaacgcccaggcccugaacacgcuggugaagcagcucagcuccaacuucggggccaucagcuccgugcugaacgacauccugagccggcucgacccgcccgaggccgagguccagaucgaccgccugaucaccggccggcugcagucccuccagaccuacgugacccagcagcugauccgcgcggccgagauccgggccagcgccaaccuggccgcgaccaagaugagcgagugcgugcucggccaguccaagcgcgucgacuucugcgggaagggcuaccaccugaugagcuucccccaguccgcgccccacggggugguguuccugcacgucacguacgugcccgcccaggagaagaacuucaccaccgccccggccaucugccacgacggcaaggcccacuucccccgggagggggucuucgugagcaacggcacccacugguucgugacgcagcgcaacuucuacgagccccagaucaucaccaccgacaacaccuucgucuccggcaacugcgacguggugaucgggaucgucaacaacacgguguacgacccccuccagccggagcuggacagcuucaaggaggagcuggacaaguacuucaagaaccacaccucccccgacguggaccucggcgacaucagcgggaucaacgccuccgucgugaacauccagaaggagaucgaccggcugaacgagguggccaagaaccugaacgagagccucaucgaccugcaggagcugggcaaguacgagcaguacaucaaguggcccugguacaucuggcucggcuucaucgccgggcugaucgcgaucgucauggugaccaucaugcugugcugcaugaccuccugcugcagcugccucaagggcugcugcuccugcgggagcugcugcaaguucgacgaggacgacuccgagccggugcugaagggcgucaagcugcacuacacgugaggacuaguuauaagacugacuagcccgaugggccucccaacgggcccuccuccccuccuugcaccgagauuaauaaaaaaaaaaaaaaaaaaaaaaaaaaaaaaaaaaaaaaaaaaaaaaaaaaaaaaaaaaaaaaaaugcaucccccccccccccccccccccccccccccccaaaggcucuuuucagagccaccagaauu

SEQ ID NO: 23333 - RNA, 4039 nt, Artificial Sequence
  SARS-CoV-2/Wuhan/WIV05/2019__EPI_ISL_402128 spike protein mRNA gc (1-1273)(K986P_V987P)
aggagaaagcuuaccauguucguguuccuggugcugcugccccuggugagcagccagugcgugaaccugaccacccggacccagcugccaccagccuacaccaacagcuucacccggggcgucuacuaccccgacaagguguuccggagcagcguccugcacagcacccaggaccuguuccugcccuucuucagcaacgugaccugguuccacgccauccacgugagcggcaccaacggcaccaagcgguucgacaaccccgugcugcccuucaacgacggcguguacuucgccagcaccgagaagagcaacaucauccggggcuggaucuucggcaccacccuggacagcaagacccagagccugcugaucgugaauaacgccaccaacguggugaucaaggugugcgaguuccaguucugcaacgaccccuuccugggcguguacuaccacaagaacaacaagagcuggauggagagcgaguuccggguguacagcagcgccaacaacugcaccuucgaguacgugagccagcccuuccugauggaccuggagggcaagcagggcaacuucaagaaccugcgggaguucguguucaagaacaucgacggcuacuucaagaucuacagcaagcacaccccaaucaaccuggugcgggaucugccccagggcuucucagcccuggagccccugguggaccugcccaucggcaucaacaucacccgguuccagacccugcuggcccugcaccggagcuaccugaccccaggcgacagcagcagcggguggacagcaggcgcggcugcuuacuacgugggcuaccugcagccccggaccuuccugcugaaguacaacgagaacggcaccaucaccgacgccguggacugcgcccuggacccucugagcgagaccaagugcacccugaagagcuucaccguggagaagggcaucuaccagaccagcaacuuccgggugcagcccaccgagagcaucgugcgguuccccaacaucaccaaccugugccccuucggcgagguguucaacgccacccgguucgccagcguguacgccuggaaccggaagcggaucagcaacugcguggccgacuacagcgugcuguacaacagcgccagcuucagcaccuucaagugcuacggcgugagccccaccaagcugaacgaccugugcuucaccaacguguacgccgacagcuucgugauccguggcgacgaggugcggcagaucgcacccggccagacaggcaagaucgccgacuacaacuacaagcugcccgacgacuucaccggcugcgugaucgccuggaacagcaacaaccucgacagcaaggugggcggcaacuacaacuaccuguaccggcuguuccggaagagcaaccugaagcccuucgagcgggacaucagcaccgagaucuaccaagccggcuccaccccuugcaacggcguggagggcuucaacugcuacuucccucugcagagcuacggcuuccagcccaccaacggcgugggcuaccagcccuaccgggugguggugcugagcuucgagcugcugcacgccccagccaccguguguggccccaagaagagcaccaaccuggugaagaacaagugcgugaacuucaacuucaacggccuuaccggcaccggcgugcugaccgagagcaacaagaaauuccugcccuuucagcaguucggccgggacaucgccgacaccaccgacgcugugcgggauccccagacccuggagauccuggacaucaccccuugcagcuucggcggcgugagcgugaucaccccaggcaccaacaccagcaaccagguggccgugcuguaccaggacgugaacugcaccgaggugcccguggccauccacgccgaccagcugacacccaccuggcgggucuacagcaccggcagcaacguguuccagacccgggccgguugccugaucggcgccgagcacgugaacaacagcuacgagugcgacauccccaucggcgccggcaucugugccagcuaccagacccagaccaauucaccccggagggcaaggagcguggccagccagagcaucaucgccuacaccaugagccugggcgccgagaacagcguggccuacagcaacaacagcaucgccauccccaccaacuucaccaucagcgugaccaccgagauucugcccgugagcaugaccaagaccagcguggacugcaccauguacaucugcggcgacagcaccgagugcagcaaccugcugcugcaguacggcagcuucugcacccagcugaaccgggcccugaccggcaucgccguggagcaggacaagaacacccaggagguguucgcccaggugaagcagaucuacaagaccccucccaucaaggacuucggcggcuucaacuucagccagauccugcccgaccccagcaagcccagcaagcggagcuucaucgaggaccugcuguucaacaaggugacccuagccgacgccggcuucaucaagcaguacggcgacugccucggcgacauagccgcccgggaccugaucugcgcccagaaguucaacggccugaccgugcugccuccccugcugaccgacgagaugaucgcccaguacaccagcgcccuguuagccggaaccaucaccagcggcuggacuuucggcgcuggagccgcucugcagauccccuucgccaugcagauggccuaccgguucaacggcaucggcgugacccagaacgugcuguacgagaaccagaagcugaucgccaaccaguucaacagcgccaucggcaagauccaggacagccugagcagcaccgcuagcgcccugggcaagcugcaggacguggugaaccagaacgcccaggcccugaacacccuggugaagcagcugagcagcaacuucggcgccaucagcagcgugcugaacgacauccugagccggcuggacccucccgaggccgaggugcagaucgaccggcugaucacuggccggcugcagagccugcagaccuacgugacccagcagcugauccgggccgccgagauucgggccagcgccaaccuggccgccaccaagaugagcgagugcgugcugggccagagcaagcggguggacuucugcggcaagggcuaccaccugaugagcuuuccccagagcgcaccccacggagugguguuccugcacgugaccuacgugcccgcccaggagaagaacuucaccaccgccccagccaucugccacgacggcaaggcccacuuuccccgggagggcguguucgugagcaacggcacccacugguucgugacccagcggaacuucuacgagccccagaucaucaccaccgacaacaccuucgugagcggcaacugcgacguggugaucggcaucgugaacaacaccguguacgauccccugcagcccgagcuggacagcuucaaggaggagcuggacaaguacuucaagaaucacaccagccccgacguggaccugggcgacaucagcggcaucaacgccagcguggugaacauccagaaggagaucgaucggcugaacgagguggccaagaaccugaacgagagccugaucgaccugcaggagcugggcaaguacgagcaguacaucaaguggcccugguacaucuggcugggcuucaucgccggccugaucgccaucgugauggugaccaucaugcugugcugcaugaccagcugcugcagcugccugaagggcuguugcagcugcggcagcugcugcaaguucgacgaggacgacagcgagcccgugcugaagggcgugaagcugcacuacaccugaggacuaguuauaagacugacuagcccgaugggccucccaacgggcccuccuccccuccuugcaccgagauuaauaaaaaaaaaaaaaaaaaaaaaaaaaaaaaaaaaaaaaaaaaaaaaaaaaaaaaaaaaaaaaaaaugcaucccccccccccccccccccccccccccccccaaaggcucuuuucagagccaccagaauu

SEQ ID NO: 23334 - RNA, 4039 nt, Artificial Sequence
  SARS-CoV-2/Wuhan/WIV05/2019__EPI_ISL_402128 spike protein mRNA gc (1-1273)(K986P_V987P_ D614G)
aggagaaagcuuaccauguucguguuccuggugcugcugccccuggugagcagccagugcgugaaccugaccacccggacccagcugccaccagccuacaccaacagcuucacccggggcgucuacuaccccgacaagguguuccggagcagcguccugcacagcacccaggaccuguuccugcccuucuucagcaacgugaccugguuccacgccauccacgugagcggcaccaacggcaccaagcgguucgacaaccccgugcugcccuucaacgacggcguguacuucgccagcaccgagaagagcaacaucauccggggcuggaucuucggcaccacccuggacagcaagacccagagccugcugaucgugaauaacgccaccaacguggugaucaaggugugcgaguuccaguucugcaacgaccccuuccugggcguguacuaccacaagaacaacaagagcuggauggagagcgaguuccggguguacagcagcgccaacaacugcaccuucgaguacgugagccagcccuuccugauggaccuggagggcaagcagggcaacuucaagaaccugcgggaguucguguucaagaacaucgacggcuacuucaagaucuacagcaagcacaccccaaucaaccuggugcgggaucugccccagggcuucucagcccuggagccccugguggaccugcccaucggcaucaacaucacccgguuccagacccugcuggcccugcaccggagcuaccugaccccaggcgacagcagcagcggguggacagcaggcgcggcugcuuacuacgugggcuaccugcagccccggaccuuccugcugaaguacaacgagaacggcaccaucaccgacgccguggacugcgcccuggacccucugagcgagaccaagugcacccugaagagcuucaccguggagaagggcaucuaccagaccagcaacuuccgggugcagcccaccgagagcaucgugcgguuccccaacaucaccaaccugugccccuucggcgagguguucaacgccacccgguucgccagcguguacgccuggaaccggaagcggaucagcaacugcguggccgacuacagcgugcuguacaacagcgccagcuucagcaccuucaagugcuacggcgugagccccaccaagcugaacgaccugugcuucaccaacguguacgccgacagcuucgugauccguggcgacgaggugcggcagaucgcacccggccagacaggcaagaucgccgacuacaacuacaagcugcccgacgacuucaccggcugcgugaucgccuggaacagcaacaaccucgacagcaaggugggcggcaacuacaacuaccuguaccggcuguuccggaagagcaaccugaagcccuucgagcgggacaucagcaccgagaucuaccaagccggcuccaccccuugcaacggcguggagggcuucaacugcuacuucccucugcagagcuacggcuuccagcccaccaacggcgugggcuaccagcccuaccgggugguggugcugagcuucgagcugcugcacgccccagccaccguguguggccccaagaagagcaccaaccuggugaagaacaagugcgugaacuucaacuucaacggccuuaccggcaccggcgugcugaccgagagcaacaagaaauuccugcccuuucagcaguucggccgggacaucgccgacaccaccgacgcugugcgggauccccagacccuggagauccuggacaucaccccuugcagcuucggcggcgugagcgugaucaccccaggcaccaacaccagcaaccagguggccgugcuguaccagggcgugaacugcaccgaggugcccguggccauccacgccgaccagcugacacccaccuggcgggucuacagcaccggcagcaacguguuccagacccgggccgguugccugaucggcgccgagcacgugaacaacagcuacgagugcgacauccccaucggcgccggcaucugugccagcuaccagacccagaccaauucaccccggagggcaaggagcguggccagccagagcaucaucgccuacaccaugagccugggcgccgagaacagcguggccuacagcaacaacagcaucgccauccccaccaacuucaccaucagcgugaccaccgagauucugcccgugagcaugaccaagaccagcguggacugcaccauguacaucugcggcgacagcaccgagugcagcaaccugcugcugcaguacggcagcuucugcacccagcugaaccgggcccugaccggcaucgccguggagcaggacaagaacacccaggagguguucgcccaggugaagcagaucuacaagaccccucccaucaaggacuucggcggcuucaacuucagccagauccugcccgaccccagcaagcccagcaagcggagcuucaucgaggaccugcuguucaacaaggugacccuagccgacgccggcuucaucaagcaguacggcgacugccucggcgacauagccgcccgggaccugaucugcgcccagaaguucaacggccugaccgugcugccuccccugcugaccgacgagaugaucgcccaguacaccagcgcccuguuagccggaaccaucaccagcggcuggacuuucggcgcuggagccgcucugcagauccccuucgccaugcagauggccuaccgguucaacggcaucggcgugacccagaacgugcuguacgagaaccagaagcugaucgccaaccaguucaacagcgccaucggcaagauccaggacagccugagcagcaccgcuagcgcccugggcaagcugcaggacguggugaaccagaacgcccaggcccugaacacccuggugaagcagcugagcagcaacuucggcgccaucagcagcgugcugaacgacauccugagccggcuggacccucccgaggccgaggugcagaucgaccggcugaucacuggccggcugcagagccugcagaccuacgugacccagcagcugauccgggccgccgagauucgggccagcgccaaccuggccgccaccaagaugagcgagugcgugcugggccagagcaagcggguggacuucugcggcaagggcuaccaccugaugagcuuuccccagagcgcaccccacggagugguguuccugcacgugaccuacgugcccgcccaggagaagaacuucaccaccgccccagccaucugccacgacggcaaggcccacuuuccccgggagggcguguucgugagcaacggcacccacugguucgugacccagcggaacuucuacgagccccagaucaucaccaccgacaacaccuucgugagcggcaacugcgacguggugaucggcaucgugaacaacaccguguacgauccccugcagcccgagcuggacagcuucaaggaggagcuggacaaguacuucaagaaucacaccagccccgacguggaccugggcgacaucagcggcaucaacgccagcguggugaacauccagaaggagaucgaucggcugaacgagguggccaagaaccugaacgagagccugaucgaccugcaggagcugggcaaguacgagcaguacaucaaguggcccugguacaucuggcugggcuucaucgccggccugaucgccaucgugauggugaccaucaugcugugcugcaugaccagcugcugcagcugccugaagggcuguugcagcugcggcagcugcugcaaguucgacgaggacgacagcgagcccgugcugaagggcgugaagcugcacuacaccugaggacuaguuauaagacugacuagcccgaugggccucccaacgggcccuccuccccuccuugcaccgagauuaauaaaaaaaaaaaaaaaaaaaaaaaaaaaaaaaaaaaaaaaaaaaaaaaaaaaaaaaaaaaaaaaaugcaucccccccccccccccccccccccccccccccaaaggcucuuuucagagccaccagaauu

SEQ ID NO: 23335 - RNA, 4039 nt, Artificial Sequence
  SARS-CoV-2/Wuhan/WIV05/2019__EPI_ISL_402128 spike protein mRNA gc (1-1273)(K986P_V987P_A222V_D614G)
aggagaaagcuuaccauguucguguuccuggugcugcugccccuggugagcagccagugcgugaaccugaccacccggacccagcugccaccagccuacaccaacagcuucacccggggcgucuacuaccccgacaagguguuccggagcagcguccugcacagcacccaggaccuguuccugcccuucuucagcaacgugaccugguuccacgccauccacgugagcggcaccaacggcaccaagcgguucgacaaccccgugcugcccuucaacgacggcguguacuucgccagcaccgagaagagcaacaucauccggggcuggaucuucggcaccacccuggacagcaagacccagagccugcugaucgugaauaacgccaccaacguggugaucaaggugugcgaguuccaguucugcaacgaccccuuccugggcguguacuaccacaagaacaacaagagcuggauggagagcgaguuccggguguacagcagcgccaacaacugcaccuucgaguacgugagccagcccuuccugauggaccuggagggcaagcagggcaacuucaagaaccugcgggaguucguguucaagaacaucgacggcuacuucaagaucuacagcaagcacaccccaaucaaccuggugcgggaucugccccagggcuucucagugcuggagccccugguggaccugcccaucggcaucaacaucacccgguuccagacccugcuggcccugcaccggagcuaccugaccccaggcgacagcagcagcggguggacagcaggcgcggcugcuuacuacgugggcuaccugcagccccggaccuuccugcugaaguacaacgagaacggcaccaucaccgacgccguggacugcgcccuggacccucugagcgagaccaagugcacccugaagagcuucaccguggagaagggcaucuaccagaccagcaacuuccgggugcagcccaccgagagcaucgugcgguuccccaacaucaccaaccugugccccuucggcgagguguucaacgccacccgguucgccagcguguacgccuggaaccggaagcggaucagcaacugcguggccgacuacagcgugcuguacaacagcgccagcuucagcaccuucaagugcuacggcgugagccccaccaagcugaacgaccugugcuucaccaacguguacgccgacagcuucgugauccguggcgacgaggugcggcagaucgcacccggccagacaggcaagaucgccgacuacaacuacaagcugcccgacgacuucaccggcugcgugaucgccuggaacagcaacaaccucgacagcaaggugggcggcaacuacaacuaccuguaccggcuguuccggaagagcaaccugaagcccuucgagcgggacaucagcaccgagaucuaccaagccggcuccaccccuugcaacggcguggagggcuucaacugcuacuucccucugcagagcuacggcuuccagcccaccaacggcgugggcuaccagcccuaccgggugguggugcugagcuucgagcugcugcacgccccagccaccguguguggccccaagaagagcaccaaccuggugaagaacaagugcgugaacuucaacuucaacggccuuaccggcaccggcgugcugaccgagagcaacaagaaauuccugcccuuucagcaguucggccgggacaucgccgacaccaccgacgcugugcgggauccccagacccuggagauccuggacaucaccccuugcagcuucggcggcgugagcgugaucaccccaggcaccaacaccagcaaccagguggccgugcuguaccagggcgugaacugcaccgaggugcccguggccauccacgccgaccagcugacacccaccuggcgggucuacagcaccggcagcaacguguuccagacccgggccgguugccugaucggcgccgagcacgugaacaacagcuacgagugcgacauccccaucggcgccggcaucugugccagcuaccagacccagaccaauucaccccggagggcaaggagcguggccagccagagcaucaucgccuacaccaugagccugggcgccgagaacagcguggccuacagcaacaacagcaucgccauccccaccaacuucaccaucagcgugaccaccgagauucugcccgugagcaugaccaagaccagcguggacugcaccauguacaucugcggcgacagcaccgagugcagcaaccugcugcugcaguacggcagcuucugcacccagcugaaccgggcccugaccggcaucgccguggagcaggacaagaacacccaggagguguucgcccaggugaagcagaucuacaagaccccucccaucaaggacuucggcggcuucaacuucagccagauccugcccgaccccagcaagcccagcaagcggagcuucaucgaggaccugcuguucaacaaggugacccuagccgacgccggcuucaucaagcaguacggcgacugccucggcgacauagccgcccgggaccugaucugcgcccagaaguucaacggccugaccgugcugccuccccugcugaccgacgagaugaucgcccaguacaccagcgcccuguuagccggaaccaucaccagcggcuggacuuucggcgcuggagccgcucugcagauccccuucgccaugcagauggccuaccgguucaacggcaucggcgugacccagaacgugcuguacgagaaccagaagcugaucgccaaccaguucaacagcgccaucggcaagauccaggacagccugagcagcaccgcuagcgcccugggcaagcugcaggacguggugaaccagaacgcccaggcccugaacacccuggugaagcagcugagcagcaacuucggcgccaucagcagcgugcugaacgacauccugagccggcuggacccucccgaggccgaggugcagaucgaccggcugaucacuggccggcugcagagccugcagaccuacgugacccagcagcugauccgggccgccgagauucgggccagcgccaaccuggccgccaccaagaugagcgagugcgugcugggccagagcaagcggguggacuucugcggcaagggcuaccaccugaugagcuuuccccagagcgcaccccacggagugguguuccugcacgugaccuacgugcccgcccaggagaagaacuucaccaccgccccagccaucugccacgacggcaaggcccacuuuccccgggagggcguguucgugagcaacggcacccacugguucgugacccagcggaacuucuacgagccccagaucaucaccaccgacaacaccuucgugagcggcaacugcgacguggugaucggcaucgugaacaacaccguguacgauccccugcagcccgagcuggacagcuucaaggaggagcuggacaaguacuucaagaaucacaccagccccgacguggaccugggcgacaucagcggcaucaacgccagcguggugaacauccagaaggagaucgaucggcugaacgagguggccaagaaccugaacgagagccugaucgaccugcaggagcugggcaaguacgagcaguacaucaaguggcccugguacaucuggcugggcuucaucgccggccugaucgccaucgugauggugaccaucaugcugugcugcaugaccagcugcugcagcugccugaagggcuguugcagcugcggcagcugcugcaaguucgacgaggacgacagcgagcccgugcugaagggcgugaagcugcacuacaccugaggacuaguuauaagacugacuagcccgaugggccucccaacgggcccuccuccccuccuugcaccgagauuaauaaaaaaaaaaaaaaaaaaaaaaaaaaaaaaaaaaaaaaaaaaaaaaaaaaaaaaaaaaaaaaaaugcaucccccccccccccccccccccccccccccccaaaggcucuuuucagagccaccagaauu

SEQ ID NO: 23336 - RNA, 4039 nt, Artificial Sequence
  SARS-CoV-2/Wuhan/WIV05/2019__EPI_ISL_402128 spike protein mRNA gc (1-1273)(K986P_V987P_N439K_D614G)
aggagaaagcuuaccauguucguguuccuggugcugcugccccuggugagcagccagugcgugaaccugaccacccggacccagcugccaccagccuacaccaacagcuucacccggggcgucuacuaccccgacaagguguuccggagcagcguccugcacagcacccaggaccuguuccugcccuucuucagcaacgugaccugguuccacgccauccacgugagcggcaccaacggcaccaagcgguucgacaaccccgugcugcccuucaacgacggcguguacuucgccagcaccgagaagagcaacaucauccggggcuggaucuucggcaccacccuggacagcaagacccagagccugcugaucgugaauaacgccaccaacguggugaucaaggugugcgaguuccaguucugcaacgaccccuuccugggcguguacuaccacaagaacaacaagagcuggauggagagcgaguuccggguguacagcagcgccaacaacugcaccuucgaguacgugagccagcccuuccugauggaccuggagggcaagcagggcaacuucaagaaccugcgggaguucguguucaagaacaucgacggcuacuucaagaucuacagcaagcacaccccaaucaaccuggugcgggaucugccccagggcuucucagcccuggagccccugguggaccugcccaucggcaucaacaucacccgguuccagacccugcuggcccugcaccggagcuaccugaccccaggcgacagcagcagcggguggacagcaggcgcggcugcuuacuacgugggcuaccugcagccccggaccuuccugcugaaguacaacgagaacggcaccaucaccgacgccguggacugcgcccuggacccucugagcgagaccaagugcacccugaagagcuucaccguggagaagggcaucuaccagaccagcaacuuccgggugcagcccaccgagagcaucgugcgguuccccaacaucaccaaccugugccccuucggcgagguguucaacgccacccgguucgccagcguguacgccuggaaccggaagcggaucagcaacugcguggccgacuacagcgugcuguacaacagcgccagcuucagcaccuucaagugcuacggcgugagccccaccaagcugaacgaccugugcuucaccaacguguacgccgacagcuucgugauccguggcgacgaggugcggcagaucgcacccggccagacaggcaagaucgccgacuacaacuacaagcugcccgacgacuucaccggcugcgugaucgccuggaacagcaagaaccucgacagcaaggugggcggcaacuacaacuaccuguaccggcuguuccggaagagcaaccugaagcccuucgagcgggacaucagcaccgagaucuaccaagccggcuccaccccuugcaacggcguggagggcuucaacugcuacuucccucugcagagcuacggcuuccagcccaccaacggcgugggcuaccagcccuaccgggugguggugcugagcuucgagcugcugcacgccccagccaccguguguggccccaagaagagcaccaaccuggugaagaacaagugcgugaacuucaacuucaacggccuuaccggcaccggcgugcugaccgagagcaacaagaaauuccugcccuuucagcaguucggccgggacaucgccgacaccaccgacgcugugcgggauccccagacccuggagauccuggacaucaccccuugcagcuucggcggcgugagcgugaucaccccaggcaccaacaccagcaaccagguggccgugcuguaccagggcgugaacugcaccgaggugcccguggccauccacgccgaccagcugacacccaccuggcgggucuacagcaccggcagcaacguguuccagacccgggccgguugccugaucggcgccgagcacgugaacaacagcuacgagugcgacauccccaucggcgccggcaucugugccagcuaccagacccagaccaauucaccccggagggcaaggagcguggccagccagagcaucaucgccuacaccaugagccugggcgccgagaacagcguggccuacagcaacaacagcaucgccauccccaccaacuucaccaucagcgugaccaccgagauucugcccgugagcaugaccaagaccagcguggacugcaccauguacaucugcggcgacagcaccgagugcagcaaccugcugcugcaguacggcagcuucugcacccagcugaaccgggcccugaccggcaucgccguggagcaggacaagaacacccaggagguguucgcccaggugaagcagaucuacaagaccccucccaucaaggacuucggcggcuucaacuucagccagauccugcccgaccccagcaagcccagcaagcggagcuucaucgaggaccugcuguucaacaaggugacccuagccgacgccggcuucaucaagcaguacggcgacugccucggcgacauagccgcccgggaccugaucugcgcccagaaguucaacggccugaccgugcugccuccccugcugaccgacgagaugaucgcccaguacaccagcgcccuguuagccggaaccaucaccagcggcuggacuuucggcgcuggagccgcucugcagauccccuucgccaugcagauggccuaccgguucaacggcaucggcgugacccagaacgugcuguacgagaaccagaagcugaucgccaaccaguucaacagcgccaucggcaagauccaggacagccugagcagcaccgcuagcgcccugggcaagcugcaggacguggugaaccagaacgcccaggcccugaacacccuggugaagcagcugagcagcaacuucggcgccaucagcagcgugcugaacgacauccugagccggcuggacccucccgaggccgaggugcagaucgaccggcugaucacuggccggcugcagagccugcagaccuacgugacccagcagcugauccgggccgccgagauucgggccagcgccaaccuggccgccaccaagaugagcgagugcgugcugggccagagcaagcggguggacuucugcggcaagggcuaccaccugaugagcuuuccccagagcgcaccccacggagugguguuccugcacgugaccuacgugcccgcccaggagaagaacuucaccaccgccccagccaucugccacgacggcaaggcccacuuuccccgggagggcguguucgugagcaacggcacccacugguucgugacccagcggaacuucuacgagccccagaucaucaccaccgacaacaccuucgugagcggcaacugcgacguggugaucggcaucgugaacaacaccguguacgauccccugcagcccgagcuggacagcuucaaggaggagcuggacaaguacuucaagaaucacaccagccccgacguggaccugggcgacaucagcggcaucaacgccagcguggugaacauccagaaggagaucgaucggcugaacgagguggccaagaaccugaacgagagccugaucgaccugcaggagcugggcaaguacgagcaguacaucaaguggcccugguacaucuggcugggcuucaucgccggccugaucgccaucgugauggugaccaucaugcugugcugcaugaccagcugcugcagcugccugaagggcuguugcagcugcggcagcugcugcaaguucgacgaggacgacagcgagcccgugcugaagggcgugaagcugcacuacaccugaggacuaguuauaagacugacuagcccgaugggccucccaacgggcccuccuccccuccuugcaccgagauuaauaaaaaaaaaaaaaaaaaaaaaaaaaaaaaaaaaaaaaaaaaaaaaaaaaaaaaaaaaaaaaaaaugcaucccccccccccccccccccccccccccccccaaaggcucuuuucagagccaccagaauu

SEQ ID NO: 23337 - RNA, 4039 nt, Artificial Sequence
  SARS-CoV-2/Wuhan/WIV05/2019__EPI_ISL_402128 spike protein mRNA gc (1-1273)(K986P_V987P_S477N_D614G)
aggagaaagcuuaccauguucguguuccuggugcugcugccccuggugagcagccagugcgugaaccugaccacccggacccagcugccaccagccuacaccaacagcuucacccggggcgucuacuaccccgacaagguguuccggagcagcguccugcacagcacccaggaccuguuccugcccuucuucagcaacgugaccugguuccacgccauccacgugagcggcaccaacggcaccaagcgguucgacaaccccgugcugcccuucaacgacggcguguacuucgccagcaccgagaagagcaacaucauccggggcuggaucuucggcaccacccuggacagcaagacccagagccugcugaucgugaauaacgccaccaacguggugaucaaggugugcgaguuccaguucugcaacgaccccuuccugggcguguacuaccacaagaacaacaagagcuggauggagagcgaguuccggguguacagcagcgccaacaacugcaccuucgaguacgugagccagcccuuccugauggaccuggagggcaagcagggcaacuucaagaaccugcgggaguucguguucaagaacaucgacggcuacuucaagaucuacagcaagcacaccccaaucaaccuggugcgggaucugccccagggcuucucagcccuggagccccugguggaccugcccaucggcaucaacaucacccgguuccagacccugcuggcccugcaccggagcuaccugaccccaggcgacagcagcagcggguggacagcaggcgcggcugcuuacuacgugggcuaccugcagccccggaccuuccugcugaaguacaacgagaacggcaccaucaccgacgccguggacugcgcccuggacccucugagcgagaccaagugcacccugaagagcuucaccguggagaagggcaucuaccagaccagcaacuuccgggugcagcccaccgagagcaucgugcgguuccccaacaucaccaaccugugccccuucggcgagguguucaacgccacccgguucgccagcguguacgccuggaaccggaagcggaucagcaacugcguggccgacuacagcgugcuguacaacagcgccagcuucagcaccuucaagugcuacggcgugagccccaccaagcugaacgaccugugcuucaccaacguguacgccgacagcuucgugauccguggcgacgaggugcggcagaucgcacccggccagacaggcaagaucgccgacuacaacuacaagcugcccgacgacuucaccggcugcgugaucgccuggaacagcaacaaccucgacagcaaggugggcggcaacuacaacuaccuguaccggcuguuccggaagagcaaccugaagcccuucgagcgggacaucagcaccgagaucuaccaagccggcaacaccccuugcaacggcguggagggcuucaacugcuacuucccucugcagagcuacggcuuccagcccaccaacggcgugggcuaccagcccuaccgggugguggugcugagcuucgagcugcugcacgccccagccaccguguguggccccaagaagagcaccaaccuggugaagaacaagugcgugaacuucaacuucaacggccuuaccggcaccggcgugcugaccgagagcaacaagaaauuccugcccuuucagcaguucggccgggacaucgccgacaccaccgacgcugugcgggauccccagacccuggagauccuggacaucaccccuugcagcuucggcggcgugagcgugaucaccccaggcaccaacaccagcaaccagguggccgugcuguaccagggcgugaacugcaccgaggugcccguggccauccacgccgaccagcugacacccaccuggcgggucuacagcaccggcagcaacguguuccagacccgggccgguugccugaucggcgccgagcacgugaacaacagcuacgagugcgacauccccaucggcgccggcaucugugccagcuaccagacccagaccaauucaccccggagggcaaggagcguggccagccagagcaucaucgccuacaccaugagccugggcgccgagaacagcguggccuacagcaacaacagcaucgccauccccaccaacuucaccaucagcgugaccaccgagauucugcccgugagcaugaccaagaccagcguggacugcaccauguacaucugcggcgacagcaccgagugcagcaaccugcugcugcaguacggcagcuucugcacccagcugaaccgggcccugaccggcaucgccguggagcaggacaagaacacccaggagguguucgcccaggugaagcagaucuacaagaccccucccaucaaggacuucggcggcuucaacuucagccagauccugcccgaccccagcaagcccagcaagcggagcuucaucgaggaccugcuguucaacaaggugacccuagccgacgccggcuucaucaagcaguacggcgacugccucggcgacauagccgcccgggaccugaucugcgcccagaaguucaacggccugaccgugcugccuccccugcugaccgacgagaugaucgcccaguacaccagcgcccuguuagccggaaccaucaccagcggcuggacuuucggcgcuggagccgcucugcagauccccuucgccaugcagauggccuaccgguucaacggcaucggcgugacccagaacgugcuguacgagaaccagaagcugaucgccaaccaguucaacagcgccaucggcaagauccaggacagccugagcagcaccgcuagcgcccugggcaagcugcaggacguggugaaccagaacgcccaggcccugaacacccuggugaagcagcugagcagcaacuucggcgccaucagcagcgugcugaacgacauccugagccggcuggacccucccgaggccgaggugcagaucgaccggcugaucacuggccggcugcagagccugcagaccuacgugacccagcagcugauccgggccgccgagauucgggccagcgccaaccuggccgccaccaagaugagcgagugcgugcugggccagagcaagcggguggacuucugcggcaagggcuaccaccugaugagcuuuccccagagcgcaccccacggagugguguuccugcacgugaccuacgugcccgcccaggagaagaacuucaccaccgccccagccaucugccacgacggcaaggcccacuuuccccgggagggcguguucgugagcaacggcacccacugguucgugacccagcggaacuucuacgagccccagaucaucaccaccgacaacaccuucgugagcggcaacugcgacguggugaucggcaucgugaacaacaccguguacgauccccugcagcccgagcuggacagcuucaaggaggagcuggacaaguacuucaagaaucacaccagccccgacguggaccugggcgacaucagcggcaucaacgccagcguggugaacauccagaaggagaucgaucggcugaacgagguggccaagaaccugaacgagagccugaucgaccugcaggagcugggcaaguacgagcaguacaucaaguggcccugguacaucuggcugggcuucaucgccggccugaucgccaucgugauggugaccaucaugcugugcugcaugaccagcugcugcagcugccugaagggcuguugcagcugcggcagcugcugcaaguucgacgaggacgacagcgagcccgugcugaagggcgugaagcugcacuacaccugaggacuaguuauaagacugacuagcccgaugggccucccaacgggcccuccuccccuccuugcaccgagauuaauaaaaaaaaaaaaaaaaaaaaaaaaaaaaaaaaaaaaaaaaaaaaaaaaaaaaaaaaaaaaaaaaugcaucccccccccccccccccccccccccccccccaaaggcucuuuucagagccaccagaauu

SEQ ID NO: 23338 - RNA, 4039 nt, Artificial Sequence
  SARS-CoV-2/Wuhan/WIV05/2019__EPI_ISL_402128 spike protein mRNA gc (1-1273)(K986P_V987P_N501Y_D614G)
aggagaaagcuuaccauguucguguuccuggugcugcugccccuggugagcagccagugcgugaaccugaccacccggacccagcugccaccagccuacaccaacagcuucacccggggcgucuacuaccccgacaagguguuccggagcagcguccugcacagcacccaggaccuguuccugcccuucuucagcaacgugaccugguuccacgccauccacgugagcggcaccaacggcaccaagcgguucgacaaccccgugcugcccuucaacgacggcguguacuucgccagcaccgagaagagcaacaucauccggggcuggaucuucggcaccacccuggacagcaagacccagagccugcugaucgugaauaacgccaccaacguggugaucaaggugugcgaguuccaguucugcaacgaccccuuccugggcguguacuaccacaagaacaacaagagcuggauggagagcgaguuccggguguacagcagcgccaacaacugcaccuucgaguacgugagccagcccuuccugauggaccuggagggcaagcagggcaacuucaagaaccugcgggaguucguguucaagaacaucgacggcuacuucaagaucuacagcaagcacaccccaaucaaccuggugcgggaucugccccagggcuucucagcccuggagccccugguggaccugcccaucggcaucaacaucacccgguuccagacccugcuggcccugcaccggagcuaccugaccccaggcgacagcagcagcggguggacagcaggcgcggcugcuuacuacgugggcuaccugcagccccggaccuuccugcugaaguacaacgagaacggcaccaucaccgacgccguggacugcgcccuggacccucugagcgagaccaagugcacccugaagagcuucaccguggagaagggcaucuaccagaccagcaacuuccgggugcagcccaccgagagcaucgugcgguuccccaacaucaccaaccugugccccuucggcgagguguucaacgccacccgguucgccagcguguacgccuggaaccggaagcggaucagcaacugcguggccgacuacagcgugcuguacaacagcgccagcuucagcaccuucaagugcuacggcgugagccccaccaagcugaacgaccugugcuucaccaacguguacgccgacagcuucgugauccguggcgacgaggugcggcagaucgcacccggccagacaggcaagaucgccgacuacaacuacaagcugcccgacgacuucaccggcugcgugaucgccuggaacagcaacaaccucgacagcaaggugggcggcaacuacaacuaccuguaccggcuguuccggaagagcaaccugaagcccuucgagcgggacaucagcaccgagaucuaccaagccggcuccaccccuugcaacggcguggagggcuucaacugcuacuucccucugcagagcuacggcuuccagcccaccuacggcgugggcuaccagcccuaccgggugguggugcugagcuucgagcugcugcacgccccagccaccguguguggccccaagaagagcaccaaccuggugaagaacaagugcgugaacuucaacuucaacggccuuaccggcaccggcgugcugaccgagagcaacaagaaauuccugcccuuucagcaguucggccgggacaucgccgacaccaccgacgcugugcgggauccccagacccuggagauccuggacaucaccccuugcagcuucggcggcgugagcgugaucaccccaggcaccaacaccagcaaccagguggccgugcuguaccagggcgugaacugcaccgaggugcccguggccauccacgccgaccagcugacacccaccuggcgggucuacagcaccggcagcaacguguuccagacccgggccgguugccugaucggcgccgagcacgugaacaacagcuacgagugcgacauccccaucggcgccggcaucugugccagcuaccagacccagaccaauucaccccggagggcaaggagcguggccagccagagcaucaucgccuacaccaugagccugggcgccgagaacagcguggccuacagcaacaacagcaucgccauccccaccaacuucaccaucagcgugaccaccgagauucugcccgugagcaugaccaagaccagcguggacugcaccauguacaucugcggcgacagcaccgagugcagcaaccugcugcugcaguacggcagcuucugcacccagcugaaccgggcccugaccggcaucgccguggagcaggacaagaacacccaggagguguucgcccaggugaagcagaucuacaagaccccucccaucaaggacuucggcggcuucaacuucagccagauccugcccgaccccagcaagcccagcaagcggagcuucaucgaggaccugcuguucaacaaggugacccuagccgacgccggcuucaucaagcaguacggcgacugccucggcgacauagccgcccgggaccugaucugcgcccagaaguucaacggccugaccgugcugccuccccugcugaccgacgagaugaucgcccaguacaccagcgcccuguuagccggaaccaucaccagcggcuggacuuucggcgcuggagccgcucugcagauccccuucgccaugcagauggccuaccgguucaacggcaucggcgugacccagaacgugcuguacgagaaccagaagcugaucgccaaccaguucaacagcgccaucggcaagauccaggacagccugagcagcaccgcuagcgcccugggcaagcugcaggacguggugaaccagaacgcccaggcccugaacacccuggugaagcagcugagcagcaacuucggcgccaucagcagcgugcugaacgacauccugagccggcuggacccucccgaggccgaggugcagaucgaccggcugaucacuggccggcugcagagccugcagaccuacgugacccagcagcugauccgggccgccgagauucgggccagcgccaaccuggccgccaccaagaugagcgagugcgugcugggccagagcaagcggguggacuucugcggcaagggcuaccaccugaugagcuuuccccagagcgcaccccacggagugguguuccugcacgugaccuacgugcccgcccaggagaagaacuucaccaccgccccagccaucugccacgacggcaaggcccacuuuccccgggagggcguguucgugagcaacggcacccacugguucgugacccagcggaacuucuacgagccccagaucaucaccaccgacaacaccuucgugagcggcaacugcgacguggugaucggcaucgugaacaacaccguguacgauccccugcagcccgagcuggacagcuucaaggaggagcuggacaaguacuucaagaaucacaccagccccgacguggaccugggcgacaucagcggcaucaacgccagcguggugaacauccagaaggagaucgaucggcugaacgagguggccaagaaccugaacgagagccugaucgaccugcaggagcugggcaaguacgagcaguacaucaaguggcccugguacaucuggcugggcuucaucgccggccugaucgccaucgugauggugaccaucaugcugugcugcaugaccagcugcugcagcugccugaagggcuguugcagcugcggcagcugcugcaaguucgacgaggacgacagcgagcccgugcugaagggcgugaagcugcacuacaccugaggacuaguuauaagacugacuagcccgaugggccucccaacgggcccuccuccccuccuugcaccgagauuaauaaaaaaaaaaaaaaaaaaaaaaaaaaaaaaaaaaaaaaaaaaaaaaaaaaaaaaaaaaaaaaaaugcaucccccccccccccccccccccccccccccccaaaggcucuuuucagagccaccagaauu

SEQ ID NO: 23339 - RNA, 4033 nt, Artificial Sequence
  SARS-CoV-2/Wuhan/WIV05/2019__EPI_ISL_402128 spike protein mRNA gc (1-1273)(K986P_V987P_H69del_V70del_D614G)
aggagaaagcuuaccauguucguguuccuggugcugcugccccuggugagcagccagugcgugaaccugaccacccggacccagcugccaccagccuacaccaacagcuucacccggggcgucuacuaccccgacaagguguuccggagcagcguccugcacagcacccaggaccuguuccugcccuucuucagcaacgugaccugguuccacgccaucagcggcaccaacggcaccaagcgguucgacaaccccgugcugcccuucaacgacggcguguacuucgccagcaccgagaagagcaacaucauccggggcuggaucuucggcaccacccuggacagcaagacccagagccugcugaucgugaauaacgccaccaacguggugaucaaggugugcgaguuccaguucugcaacgaccccuuccugggcguguacuaccacaagaacaacaagagcuggauggagagcgaguuccggguguacagcagcgccaacaacugcaccuucgaguacgugagccagcccuuccugauggaccuggagggcaagcagggcaacuucaagaaccugcgggaguucguguucaagaacaucgacggcuacuucaagaucuacagcaagcacaccccaaucaaccuggugcgggaucugccccagggcuucucagcccuggagccccugguggaccugcccaucggcaucaacaucacccgguuccagacccugcuggcccugcaccggagcuaccugaccccaggcgacagcagcagcggguggacagcaggcgcggcugcuuacuacgugggcuaccugcagccccggaccuuccugcugaaguacaacgagaacggcaccaucaccgacgccguggacugcgcccuggacccucugagcgagaccaagugcacccugaagagcuucaccguggagaagggcaucuaccagaccagcaacuuccgggugcagcccaccgagagcaucgugcgguuccccaacaucaccaaccugugccccuucggcgagguguucaacgccacccgguucgccagcguguacgccuggaaccggaagcggaucagcaacugcguggccgacuacagcgugcuguacaacagcgccagcuucagcaccuucaagugcuacggcgugagccccaccaagcugaacgaccugugcuucaccaacguguacgccgacagcuucgugauccguggcgacgaggugcggcagaucgcacccggccagacaggcaagaucgccgacuacaacuacaagcugcccgacgacuucaccggcugcgugaucgccuggaacagcaacaaccucgacagcaaggugggcggcaacuacaacuaccuguaccggcuguuccggaagagcaaccugaagcccuucgagcgggacaucagcaccgagaucuaccaagccggcuccaccccuugcaacggcguggagggcuucaacugcuacuucccucugcagagcuacggcuuccagcccaccaacggcgugggcuaccagcccuaccgggugguggugcugagcuucgagcugcugcacgccccagccaccguguguggccccaagaagagcaccaaccuggugaagaacaagugcgugaacuucaacuucaacggccuuaccggcaccggcgugcugaccgagagcaacaagaaauuccugcccuuucagcaguucggccgggacaucgccgacaccaccgacgcugugcgggauccccagacccuggagauccuggacaucaccccuugcagcuucggcggcgugagcgugaucaccccaggcaccaacaccagcaaccagguggccgugcuguaccagggcgugaacugcaccgaggugcccguggccauccacgccgaccagcugacacccaccuggcgggucuacagcaccggcagcaacguguuccagacccgggccgguugccugaucggcgccgagcacgugaacaacagcuacgagugcgacauccccaucggcgccggcaucugugccagcuaccagacccagaccaauucaccccggagggcaaggagcguggccagccagagcaucaucgccuacaccaugagccugggcgccgagaacagcguggccuacagcaacaacagcaucgccauccccaccaacuucaccaucagcgugaccaccgagauucugcccgugagcaugaccaagaccagcguggacugcaccauguacaucugcggcgacagcaccgagugcagcaaccugcugcugcaguacggcagcuucugcacccagcugaaccgggcccugaccggcaucgccguggagcaggacaagaacacccaggagguguucgcccaggugaagcagaucuacaagaccccucccaucaaggacuucggcggcuucaacuucagccagauccugcccgaccccagcaagcccagcaagcggagcuucaucgaggaccugcuguucaacaaggugacccuagccgacgccggcuucaucaagcaguacggcgacugccucggcgacauagccgcccgggaccugaucugcgcccagaaguucaacggccugaccgugcugccuccccugcugaccgacgagaugaucgcccaguacaccagcgcccuguuagccggaaccaucaccagcggcuggacuuucggcgcuggagccgcucugcagauccccuucgccaugcagauggccuaccgguucaacggcaucggcgugacccagaacgugcuguacgagaaccagaagcugaucgccaaccaguucaacagcgccaucggcaagauccaggacagccugagcagcaccgcuagcgcccugggcaagcugcaggacguggugaaccagaacgcccaggcccugaacacccuggugaagcagcugagcagcaacuucggcgccaucagcagcgugcugaacgacauccugagccggcuggacccucccgaggccgaggugcagaucgaccggcugaucacuggccggcugcagagccugcagaccuacgugacccagcagcugauccgggccgccgagauucgggccagcgccaaccuggccgccaccaagaugagcgagugcgugcugggccagagcaagcggguggacuucugcggcaagggcuaccaccugaugagcuuuccccagagcgcaccccacggagugguguuccugcacgugaccuacgugcccgcccaggagaagaacuucaccaccgccccagccaucugccacgacggcaaggcccacuuuccccgggagggcguguucgugagcaacggcacccacugguucgugacccagcggaacuucuacgagccccagaucaucaccaccgacaacaccuucgugagcggcaacugcgacguggugaucggcaucgugaacaacaccguguacgauccccugcagcccgagcuggacagcuucaaggaggagcuggacaaguacuucaagaaucacaccagccccgacguggaccugggcgacaucagcggcaucaacgccagcguggugaacauccagaaggagaucgaucggcugaacgagguggccaagaaccugaacgagagccugaucgaccugcaggagcugggcaaguacgagcaguacaucaaguggcccugguacaucuggcugggcuucaucgccggccugaucgccaucgugauggugaccaucaugcugugcugcaugaccagcugcugcagcugccugaagggcuguugcagcugcggcagcugcugcaaguucgacgaggacgacagcgagcccgugcugaagggcgugaagcugcacuacaccugaggacuaguuauaagacugacuagcccgaugggccucccaacgggcccuccuccccuccuugcaccgagauuaauaaaaaaaaaaaaaaaaaaaaaaaaaaaaaaaaaaaaaaaaaaaaaaaaaaaaaaaaaaaaaaaaugcaucccccccccccccccccccccccccccccccaaaggcucuuuucagagccaccagaauu

SEQ ID NO: 23340 - RNA, 4039 nt, Artificial Sequence
  SARS-CoV-2/Wuhan/WIV05/2019__EPI_ISL_402128 spike protein mRNA gc (1-1273)(K986P_V987P_Y453F_D614G)
aggagaaagcuuaccauguucguguuccuggugcugcugccccuggugagcagccagugcgugaaccugaccacccggacccagcugccaccagccuacaccaacagcuucacccggggcgucuacuaccccgacaagguguuccggagcagcguccugcacagcacccaggaccuguuccugcccuucuucagcaacgugaccugguuccacgccauccacgugagcggcaccaacggcaccaagcgguucgacaaccccgugcugcccuucaacgacggcguguacuucgccagcaccgagaagagcaacaucauccggggcuggaucuucggcaccacccuggacagcaagacccagagccugcugaucgugaauaacgccaccaacguggugaucaaggugugcgaguuccaguucugcaacgaccccuuccugggcguguacuaccacaagaacaacaagagcuggauggagagcgaguuccggguguacagcagcgccaacaacugcaccuucgaguacgugagccagcccuuccugauggaccuggagggcaagcagggcaacuucaagaaccugcgggaguucguguucaagaacaucgacggcuacuucaagaucuacagcaagcacaccccaaucaaccuggugcgggaucugccccagggcuucucagcccuggagccccugguggaccugcccaucggcaucaacaucacccgguuccagacccugcuggcccugcaccggagcuaccugaccccaggcgacagcagcagcggguggacagcaggcgcggcugcuuacuacgugggcuaccugcagccccggaccuuccugcugaaguacaacgagaacggcaccaucaccgacgccguggacugcgcccuggacccucugagcgagaccaagugcacccugaagagcuucaccguggagaagggcaucuaccagaccagcaacuuccgggugcagcccaccgagagcaucgugcgguuccccaacaucaccaaccugugccccuucggcgagguguucaacgccacccgguucgccagcguguacgccuggaaccggaagcggaucagcaacugcguggccgacuacagcgugcuguacaacagcgccagcuucagcaccuucaagugcuacggcgugagccccaccaagcugaacgaccugugcuucaccaacguguacgccgacagcuucgugauccguggcgacgaggugcggcagaucgcacccggccagacaggcaagaucgccgacuacaacuacaagcugcccgacgacuucaccggcugcgugaucgccuggaacagcaacaaccucgacagcaaggugggcggcaacuacaacuaccuguuccggcuguuccggaagagcaaccugaagcccuucgagcgggacaucagcaccgagaucuaccaagccggcuccaccccuugcaacggcguggagggcuucaacugcuacuucccucugcagagcuacggcuuccagcccaccaacggcgugggcuaccagcccuaccgggugguggugcugagcuucgagcugcugcacgccccagccaccguguguggccccaagaagagcaccaaccuggugaagaacaagugcgugaacuucaacuucaacggccuuaccggcaccggcgugcugaccgagagcaacaagaaauuccugcccuuucagcaguucggccgggacaucgccgacaccaccgacgcugugcgggauccccagacccuggagauccuggacaucaccccuugcagcuucggcggcgugagcgugaucaccccaggcaccaacaccagcaaccagguggccgugcuguaccagggcgugaacugcaccgaggugcccguggccauccacgccgaccagcugacacccaccuggcgggucuacagcaccggcagcaacguguuccagacccgggccgguugccugaucggcgccgagcacgugaacaacagcuacgagugcgacauccccaucggcgccggcaucugugccagcuaccagacccagaccaauucaccccggagggcaaggagcguggccagccagagcaucaucgccuacaccaugagccugggcgccgagaacagcguggccuacagcaacaacagcaucgccauccccaccaacuucaccaucagcgugaccaccgagauucugcccgugagcaugaccaagaccagcguggacugcaccauguacaucugcggcgacagcaccgagugcagcaaccugcugcugcaguacggcagcuucugcacccagcugaaccgggcccugaccggcaucgccguggagcaggacaagaacacccaggagguguucgcccaggugaagcagaucuacaagaccccucccaucaaggacuucggcggcuucaacuucagccagauccugcccgaccccagcaagcccagcaagcggagcuucaucgaggaccugcuguucaacaaggugacccuagccgacgccggcuucaucaagcaguacggcgacugccucggcgacauagccgcccgggaccugaucugcgcccagaaguucaacggccugaccgugcugccuccccugcugaccgacgagaugaucgcccaguacaccagcgcccuguuagccggaaccaucaccagcggcuggacuuucggcgcuggagccgcucugcagauccccuucgccaugcagauggccuaccgguucaacggcaucggcgugacccagaacgugcuguacgagaaccagaagcugaucgccaaccaguucaacagcgccaucggcaagauccaggacagccugagcagcaccgcuagcgcccugggcaagcugcaggacguggugaaccagaacgcccaggcccugaacacccuggugaagcagcugagcagcaacuucggcgccaucagcagcgugcugaacgacauccugagccggcuggacccucccgaggccgaggugcagaucgaccggcugaucacuggccggcugcagagccugcagaccuacgugacccagcagcugauccgggccgccgagauucgggccagcgccaaccuggccgccaccaagaugagcgagugcgugcugggccagagcaagcggguggacuucugcggcaagggcuaccaccugaugagcuuuccccagagcgcaccccacggagugguguuccugcacgugaccuacgugcccgcccaggagaagaacuucaccaccgccccagccaucugccacgacggcaaggcccacuuuccccgggagggcguguucgugagcaacggcacccacugguucgugacccagcggaacuucuacgagccccagaucaucaccaccgacaacaccuucgugagcggcaacugcgacguggugaucggcaucgugaacaacaccguguacgauccccugcagcccgagcuggacagcuucaaggaggagcuggacaaguacuucaagaaucacaccagccccgacguggaccugggcgacaucagcggcaucaacgccagcguggugaacauccagaaggagaucgaucggcugaacgagguggccaagaaccugaacgagagccugaucgaccugcaggagcugggcaaguacgagcaguacaucaaguggcccugguacaucuggcugggcuucaucgccggccugaucgccaucgugauggugaccaucaugcugugcugcaugaccagcugcugcagcugccugaagggcuguugcagcugcggcagcugcugcaaguucgacgaggacgacagcgagcccgugcugaagggcgugaagcugcacuacaccugaggacuaguuauaagacugacuagcccgaugggccucccaacgggcccuccuccccuccuugcaccgagauuaauaaaaaaaaaaaaaaaaaaaaaaaaaaaaaaaaaaaaaaaaaaaaaaaaaaaaaaaaaaaaaaaaugcaucccccccccccccccccccccccccccccccaaaggcucuuuucagagccaccagaauu

SEQ ID NO: 23341 - RNA, 4039 nt, Artificial Sequence
  SARS-CoV-2/Wuhan/WIV05/2019__EPI_ISL_402128 spike protein mRNA gc (1-1273)(K986P_V987P_D614G_I692V)
aggagaaagcuuaccauguucguguuccuggugcugcugccccuggugagcagccagugcgugaaccugaccacccggacccagcugccaccagccuacaccaacagcuucacccggggcgucuacuaccccgacaagguguuccggagcagcguccugcacagcacccaggaccuguuccugcccuucuucagcaacgugaccugguuccacgccauccacgugagcggcaccaacggcaccaagcgguucgacaaccccgugcugcccuucaacgacggcguguacuucgccagcaccgagaagagcaacaucauccggggcuggaucuucggcaccacccuggacagcaagacccagagccugcugaucgugaauaacgccaccaacguggugaucaaggugugcgaguuccaguucugcaacgaccccuuccugggcguguacuaccacaagaacaacaagagcuggauggagagcgaguuccggguguacagcagcgccaacaacugcaccuucgaguacgugagccagcccuuccugauggaccuggagggcaagcagggcaacuucaagaaccugcgggaguucguguucaagaacaucgacggcuacuucaagaucuacagcaagcacaccccaaucaaccuggugcgggaucugccccagggcuucucagcccuggagccccugguggaccugcccaucggcaucaacaucacccgguuccagacccugcuggcccugcaccggagcuaccugaccccaggcgacagcagcagcggguggacagcaggcgcggcugcuuacuacgugggcuaccugcagccccggaccuuccugcugaaguacaacgagaacggcaccaucaccgacgccguggacugcgcccuggacccucugagcgagaccaagugcacccugaagagcuucaccguggagaagggcaucuaccagaccagcaacuuccgggugcagcccaccgagagcaucgugcgguuccccaacaucaccaaccugugccccuucggcgagguguucaacgccacccgguucgccagcguguacgccuggaaccggaagcggaucagcaacugcguggccgacuacagcgugcuguacaacagcgccagcuucagcaccuucaagugcuacggcgugagccccaccaagcugaacgaccugugcuucaccaacguguacgccgacagcuucgugauccguggcgacgaggugcggcagaucgcacccggccagacaggcaagaucgccgacuacaacuacaagcugcccgacgacuucaccggcugcgugaucgccuggaacagcaacaaccucgacagcaaggugggcggcaacuacaacuaccuguaccggcuguuccggaagagcaaccugaagcccuucgagcgggacaucagcaccgagaucuaccaagccggcuccaccccuugcaacggcguggagggcuucaacugcuacuucccucugcagagcuacggcuuccagcccaccaacggcgugggcuaccagcccuaccgggugguggugcugagcuucgagcugcugcacgccccagccaccguguguggccccaagaagagcaccaaccuggugaagaacaagugcgugaacuucaacuucaacggccuuaccggcaccggcgugcugaccgagagcaacaagaaauuccugcccuuucagcaguucggccgggacaucgccgacaccaccgacgcugugcgggauccccagacccuggagauccuggacaucaccccuugcagcuucggcggcgugagcgugaucaccccaggcaccaacaccagcaaccagguggccgugcuguaccagggcgugaacugcaccgaggugcccguggccauccacgccgaccagcugacacccaccuggcgggucuacagcaccggcagcaacguguuccagacccgggccgguugccugaucggcgccgagcacgugaacaacagcuacgagugcgacauccccaucggcgccggcaucugugccagcuaccagacccagaccaauucaccccggagggcaaggagcguggccagccagagcgugaucgccuacaccaugagccugggcgccgagaacagcguggccuacagcaacaacagcaucgccauccccaccaacuucaccaucagcgugaccaccgagauucugcccgugagcaugaccaagaccagcguggacugcaccauguacaucugcggcgacagcaccgagugcagcaaccugcugcugcaguacggcagcuucugcacccagcugaaccgggcccugaccggcaucgccguggagcaggacaagaacacccaggagguguucgcccaggugaagcagaucuacaagaccccucccaucaaggacuucggcggcuucaacuucagccagauccugcccgaccccagcaagcccagcaagcggagcuucaucgaggaccugcuguucaacaaggugacccuagccgacgccggcuucaucaagcaguacggcgacugccucggcgacauagccgcccgggaccugaucugcgcccagaaguucaacggccugaccgugcugccuccccugcugaccgacgagaugaucgcccaguacaccagcgcccuguuagccggaaccaucaccagcggcuggacuuucggcgcuggagccgcucugcagauccccuucgccaugcagauggccuaccgguucaacggcaucggcgugacccagaacgugcuguacgagaaccagaagcugaucgccaaccaguucaacagcgccaucggcaagauccaggacagccugagcagcaccgcuagcgcccugggcaagcugcaggacguggugaaccagaacgcccaggcccugaacacccuggugaagcagcugagcagcaacuucggcgccaucagcagcgugcugaacgacauccugagccggcuggacccucccgaggccgaggugcagaucgaccggcugaucacuggccggcugcagagccugcagaccuacgugacccagcagcugauccgggccgccgagauucgggccagcgccaaccuggccgccaccaagaugagcgagugcgugcugggccagagcaagcggguggacuucugcggcaagggcuaccaccugaugagcuuuccccagagcgcaccccacggagugguguuccugcacgugaccuacgugcccgcccaggagaagaacuucaccaccgccccagccaucugccacgacggcaaggcccacuuuccccgggagggcguguucgugagcaacggcacccacugguucgugacccagcggaacuucuacgagccccagaucaucaccaccgacaacaccuucgugagcggcaacugcgacguggugaucggcaucgugaacaacaccguguacgauccccugcagcccgagcuggacagcuucaaggaggagcuggacaaguacuucaagaaucacaccagccccgacguggaccugggcgacaucagcggcaucaacgccagcguggugaacauccagaaggagaucgaucggcugaacgagguggccaagaaccugaacgagagccugaucgaccugcaggagcugggcaaguacgagcaguacaucaaguggcccugguacaucuggcugggcuucaucgccggccugaucgccaucgugauggugaccaucaugcugugcugcaugaccagcugcugcagcugccugaagggcuguugcagcugcggcagcugcugcaaguucgacgaggacgacagcgagcccgugcugaagggcgugaagcugcacuacaccugaggacuaguuauaagacugacuagcccgaugggccucccaacgggcccuccuccccuccuugcaccgagauuaauaaaaaaaaaaaaaaaaaaaaaaaaaaaaaaaaaaaaaaaaaaaaaaaaaaaaaaaaaaaaaaaaugcaucccccccccccccccccccccccccccccccaaaggcucuuuucagagccaccagaauu

SEQ ID NO: 23342 - RNA, 4039 nt, Artificial Sequence
  SARS-CoV-2/Wuhan/WIV05/2019__EPI_ISL_402128 spike protein mRNA gc (1-1273)(K986P_V987P_D614G_M1229I)
aggagaaagcuuaccauguucguguuccuggugcugcugccccuggugagcagccagugcgugaaccugaccacccggacccagcugccaccagccuacaccaacagcuucacccggggcgucuacuaccccgacaagguguuccggagcagcguccugcacagcacccaggaccuguuccugcccuucuucagcaacgugaccugguuccacgccauccacgugagcggcaccaacggcaccaagcgguucgacaaccccgugcugcccuucaacgacggcguguacuucgccagcaccgagaagagcaacaucauccggggcuggaucuucggcaccacccuggacagcaagacccagagccugcugaucgugaauaacgccaccaacguggugaucaaggugugcgaguuccaguucugcaacgaccccuuccugggcguguacuaccacaagaacaacaagagcuggauggagagcgaguuccggguguacagcagcgccaacaacugcaccuucgaguacgugagccagcccuuccugauggaccuggagggcaagcagggcaacuucaagaaccugcgggaguucguguucaagaacaucgacggcuacuucaagaucuacagcaagcacaccccaaucaaccuggugcgggaucugccccagggcuucucagcccuggagccccugguggaccugcccaucggcaucaacaucacccgguuccagacccugcuggcccugcaccggagcuaccugaccccaggcgacagcagcagcggguggacagcaggcgcggcugcuuacuacgugggcuaccugcagccccggaccuuccugcugaaguacaacgagaacggcaccaucaccgacgccguggacugcgcccuggacccucugagcgagaccaagugcacccugaagagcuucaccguggagaagggcaucuaccagaccagcaacuuccgggugcagcccaccgagagcaucgugcgguuccccaacaucaccaaccugugccccuucggcgagguguucaacgccacccgguucgccagcguguacgccuggaaccggaagcggaucagcaacugcguggccgacuacagcgugcuguacaacagcgccagcuucagcaccuucaagugcuacggcgugagccccaccaagcugaacgaccugugcuucaccaacguguacgccgacagcuucgugauccguggcgacgaggugcggcagaucgcacccggccagacaggcaagaucgccgacuacaacuacaagcugcccgacgacuucaccggcugcgugaucgccuggaacagcaacaaccucgacagcaaggugggcggcaacuacaacuaccuguaccggcuguuccggaagagcaaccugaagcccuucgagcgggacaucagcaccgagaucuaccaagccggcuccaccccuugcaacggcguggagggcuucaacugcuacuucccucugcagagcuacggcuuccagcccaccaacggcgugggcuaccagcccuaccgggugguggugcugagcuucgagcugcugcacgccccagccaccguguguggccccaagaagagcaccaaccuggugaagaacaagugcgugaacuucaacuucaacggccuuaccggcaccggcgugcugaccgagagcaacaagaaauuccugcccuuucagcaguucggccgggacaucgccgacaccaccgacgcugugcgggauccccagacccuggagauccuggacaucaccccuugcagcuucggcggcgugagcgugaucaccccaggcaccaacaccagcaaccagguggccgugcuguaccagggcgugaacugcaccgaggugcccguggccauccacgccgaccagcugacacccaccuggcgggucuacagcaccggcagcaacguguuccagacccgggccgguugccugaucggcgccgagcacgugaacaacagcuacgagugcgacauccccaucggcgccggcaucugugccagcuaccagacccagaccaauucaccccggagggcaaggagcguggccagccagagcaucaucgccuacaccaugagccugggcgccgagaacagcguggccuacagcaacaacagcaucgccauccccaccaacuucaccaucagcgugaccaccgagauucugcccgugagcaugaccaagaccagcguggacugcaccauguacaucugcggcgacagcaccgagugcagcaaccugcugcugcaguacggcagcuucugcacccagcugaaccgggcccugaccggcaucgccguggagcaggacaagaacacccaggagguguucgcccaggugaagcagaucuacaagaccccucccaucaaggacuucggcggcuucaacuucagccagauccugcccgaccccagcaagcccagcaagcggagcuucaucgaggaccugcuguucaacaaggugacccuagccgacgccggcuucaucaagcaguacggcgacugccucggcgacauagccgcccgggaccugaucugcgcccagaaguucaacggccugaccgugcugccuccccugcugaccgacgagaugaucgcccaguacaccagcgcccuguuagccggaaccaucaccagcggcuggacuuucggcgcuggagccgcucugcagauccccuucgccaugcagauggccuaccgguucaacggcaucggcgugacccagaacgugcuguacgagaaccagaagcugaucgccaaccaguucaacagcgccaucggcaagauccaggacagccugagcagcaccgcuagcgcccugggcaagcugcaggacguggugaaccagaacgcccaggcccugaacacccuggugaagcagcugagcagcaacuucggcgccaucagcagcgugcugaacgacauccugagccggcuggacccucccgaggccgaggugcagaucgaccggcugaucacuggccggcugcagagccugcagaccuacgugacccagcagcugauccgggccgccgagauucgggccagcgccaaccuggccgccaccaagaugagcgagugcgugcugggccagagcaagcggguggacuucugcggcaagggcuaccaccugaugagcuuuccccagagcgcaccccacggagugguguuccugcacgugaccuacgugcccgcccaggagaagaacuucaccaccgccccagccaucugccacgacggcaaggcccacuuuccccgggagggcguguucgugagcaacggcacccacugguucgugacccagcggaacuucuacgagccccagaucaucaccaccgacaacaccuucgugagcggcaacugcgacguggugaucggcaucgugaacaacaccguguacgauccccugcagcccgagcuggacagcuucaaggaggagcuggacaaguacuucaagaaucacaccagccccgacguggaccugggcgacaucagcggcaucaacgccagcguggugaacauccagaaggagaucgaucggcugaacgagguggccaagaaccugaacgagagccugaucgaccugcaggagcugggcaaguacgagcaguacaucaaguggcccugguacaucuggcugggcuucaucgccggccugaucgccaucgugaucgugaccaucaugcugugcugcaugaccagcugcugcagcugccugaagggcuguugcagcugcggcagcugcugcaaguucgacgaggacgacagcgagcccgugcugaagggcgugaagcugcacuacaccugaggacuaguuauaagacugacuagcccgaugggccucccaacgggcccuccuccccuccuugcaccgagauuaauaaaaaaaaaaaaaaaaaaaaaaaaaaaaaaaaaaaaaaaaaaaaaaaaaaaaaaaaaaaaaaaaugcaucccccccccccccccccccccccccccccccaaaggcucuuuucagagccaccagaauu

SEQ ID NO: 23343 - RNA, 4033 nt, Artificial Sequence
  SARS-CoV-2/Wuhan/WIV05/2019__EPI_ISL_402128 spike protein mRNA gc (1-1273)(K986P_V987P_H69del_V70del_A222V_Y453F_S477N_D614G_I692V)
aggagaaagcuuaccauguucguguuccuggugcugcugccccuggugagcagccagugcgugaaccugaccacccggacccagcugccaccagccuacaccaacagcuucacccggggcgucuacuaccccgacaagguguuccggagcagcguccugcacagcacccaggaccuguuccugcccuucuucagcaacgugaccugguuccacgccaucagcggcaccaacggcaccaagcgguucgacaaccccgugcugcccuucaacgacggcguguacuucgccagcaccgagaagagcaacaucauccggggcuggaucuucggcaccacccuggacagcaagacccagagccugcugaucgugaauaacgccaccaacguggugaucaaggugugcgaguuccaguucugcaacgaccccuuccugggcguguacuaccacaagaacaacaagagcuggauggagagcgaguuccggguguacagcagcgccaacaacugcaccuucgaguacgugagccagcccuuccugauggaccuggagggcaagcagggcaacuucaagaaccugcgggaguucguguucaagaacaucgacggcuacuucaagaucuacagcaagcacaccccaaucaaccuggugcgggaucugccccagggcuucucagugcuggagccccugguggaccugcccaucggcaucaacaucacccgguuccagacccugcuggcccugcaccggagcuaccugaccccaggcgacagcagcagcggguggacagcaggcgcggcugcuuacuacgugggcuaccugcagccccggaccuuccugcugaaguacaacgagaacggcaccaucaccgacgccguggacugcgcccuggacccucugagcgagaccaagugcacccugaagagcuucaccguggagaagggcaucuaccagaccagcaacuuccgggugcagcccaccgagagcaucgugcgguuccccaacaucaccaaccugugccccuucggcgagguguucaacgccacccgguucgccagcguguacgccuggaaccggaagcggaucagcaacugcguggccgacuacagcgugcuguacaacagcgccagcuucagcaccuucaagugcuacggcgugagccccaccaagcugaacgaccugugcuucaccaacguguacgccgacagcuucgugauccguggcgacgaggugcggcagaucgcacccggccagacaggcaagaucgccgacuacaacuacaagcugcccgacgacuucaccggcugcgugaucgccuggaacagcaacaaccucgacagcaaggugggcggcaacuacaacuaccuguuccggcuguuccggaagagcaaccugaagcccuucgagcgggacaucagcaccgagaucuaccaagccggcaacaccccuugcaacggcguggagggcuucaacugcuacuucccucugcagagcuacggcuuccagcccaccaacggcgugggcuaccagcccuaccgggugguggugcugagcuucgagcugcugcacgccccagccaccguguguggccccaagaagagcaccaaccuggugaagaacaagugcgugaacuucaacuucaacggccuuaccggcaccggcgugcugaccgagagcaacaagaaauuccugcccuuucagcaguucggccgggacaucgccgacaccaccgacgcugugcgggauccccagacccuggagauccuggacaucaccccuugcagcuucggcggcgugagcgugaucaccccaggcaccaacaccagcaaccagguggccgugcuguaccagggcgugaacugcaccgaggugcccguggccauccacgccgaccagcugacacccaccuggcgggucuacagcaccggcagcaacguguuccagacccgggccgguugccugaucggcgccgagcacgugaacaacagcuacgagugcgacauccccaucggcgccggcaucugugccagcuaccagacccagaccaauucaccccggagggcaaggagcguggccagccagagcgugaucgccuacaccaugagccugggcgccgagaacagcguggccuacagcaacaacagcaucgccauccccaccaacuucaccaucagcgugaccaccgagauucugcccgugagcaugaccaagaccagcguggacugcaccauguacaucugcggcgacagcaccgagugcagcaaccugcugcugcaguacggcagcuucugcacccagcugaaccgggcccugaccggcaucgccguggagcaggacaagaacacccaggagguguucgcccaggugaagcagaucuacaagaccccucccaucaaggacuucggcggcuucaacuucagccagauccugcccgaccccagcaagcccagcaagcggagcuucaucgaggaccugcuguucaacaaggugacccuagccgacgccggcuucaucaagcaguacggcgacugccucggcgacauagccgcccgggaccugaucugcgcccagaaguucaacggccugaccgugcugccuccccugcugaccgacgagaugaucgcccaguacaccagcgcccuguuagccggaaccaucaccagcggcuggacuuucggcgcuggagccgcucugcagauccccuucgccaugcagauggccuaccgguucaacggcaucggcgugacccagaacgugcuguacgagaaccagaagcugaucgccaaccaguucaacagcgccaucggcaagauccaggacagccugagcagcaccgcuagcgcccugggcaagcugcaggacguggugaaccagaacgcccaggcccugaacacccuggugaagcagcugagcagcaacuucggcgccaucagcagcgugcugaacgacauccugagccggcuggacccucccgaggccgaggugcagaucgaccggcugaucacuggccggcugcagagccugcagaccuacgugacccagcagcugauccgggccgccgagauucgggccagcgccaaccuggccgccaccaagaugagcgagugcgugcugggccagagcaagcggguggacuucugcggcaagggcuaccaccugaugagcuuuccccagagcgcaccccacggagugguguuccugcacgugaccuacgugcccgcccaggagaagaacuucaccaccgccccagccaucugccacgacggcaaggcccacuuuccccgggagggcguguucgugagcaacggcacccacugguucgugacccagcggaacuucuacgagccccagaucaucaccaccgacaacaccuucgugagcggcaacugcgacguggugaucggcaucgugaacaacaccguguacgauccccugcagcccgagcuggacagcuucaaggaggagcuggacaaguacuucaagaaucacaccagccccgacguggaccugggcgacaucagcggcaucaacgccagcguggugaacauccagaaggagaucgaucggcugaacgagguggccaagaaccugaacgagagccugaucgaccugcaggagcugggcaaguacgagcaguacaucaaguggcccugguacaucuggcugggcuucaucgccggccugaucgccaucgugauggugaccaucaugcugugcugcaugaccagcugcugcagcugccugaagggcuguugcagcugcggcagcugcugcaaguucgacgaggacgacagcgagcccgugcugaagggcgugaagcugcacuacaccugaggacuaguuauaagacugacuagcccgaugggccucccaacgggcccuccuccccuccuugcaccgagauuaauaaaaaaaaaaaaaaaaaaaaaaaaaaaaaaaaaaaaaaaaaaaaaaaaaaaaaaaaaaaaaaaaugcaucccccccccccccccccccccccccccccccaaaggcucuuuucagagccaccagaauu

SEQ ID NO: 23344 - RNA, 4033 nt, Artificial Sequence
  SARS-CoV-2/Wuhan/WIV05/2019__EPI_ISL_402128 spike protein mRNA gc (1-1273)(K986P_V987P_H69del_V70del_Y453F_D614G_I692V_M1229I)
aggagaaagcuuaccauguucguguuccuggugcugcugccccuggugagcagccagugcgugaaccugaccacccggacccagcugccaccagccuacaccaacagcuucacccggggcgucuacuaccccgacaagguguuccggagcagcguccugcacagcacccaggaccuguuccugcccuucuucagcaacgugaccugguuccacgccaucagcggcaccaacggcaccaagcgguucgacaaccccgugcugcccuucaacgacggcguguacuucgccagcaccgagaagagcaacaucauccggggcuggaucuucggcaccacccuggacagcaagacccagagccugcugaucgugaauaacgccaccaacguggugaucaaggugugcgaguuccaguucugcaacgaccccuuccugggcguguacuaccacaagaacaacaagagcuggauggagagcgaguuccggguguacagcagcgccaacaacugcaccuucgaguacgugagccagcccuuccugauggaccuggagggcaagcagggcaacuucaagaaccugcgggaguucguguucaagaacaucgacggcuacuucaagaucuacagcaagcacaccccaaucaaccuggugcgggaucugccccagggcuucucagcccuggagccccugguggaccugcccaucggcaucaacaucacccgguuccagacccugcuggcccugcaccggagcuaccugaccccaggcgacagcagcagcggguggacagcaggcgcggcugcuuacuacgugggcuaccugcagccccggaccuuccugcugaaguacaacgagaacggcaccaucaccgacgccguggacugcgcccuggacccucugagcgagaccaagugcacccugaagagcuucaccguggagaagggcaucuaccagaccagcaacuuccgggugcagcccaccgagagcaucgugcgguuccccaacaucaccaaccugugccccuucggcgagguguucaacgccacccgguucgccagcguguacgccuggaaccggaagcggaucagcaacugcguggccgacuacagcgugcuguacaacagcgccagcuucagcaccuucaagugcuacggcgugagccccaccaagcugaacgaccugugcuucaccaacguguacgccgacagcuucgugauccguggcgacgaggugcggcagaucgcacccggccagacaggcaagaucgccgacuacaacuacaagcugcccgacgacuucaccggcugcgugaucgccuggaacagcaacaaccucgacagcaaggugggcggcaacuacaacuaccuguuccggcuguuccggaagagcaaccugaagcccuucgagcgggacaucagcaccgagaucuaccaagccggcuccaccccuugcaacggcguggagggcuucaacugcuacuucccucugcagagcuacggcuuccagcccaccaacggcgugggcuaccagcccuaccgggugguggugcugagcuucgagcugcugcacgccccagccaccguguguggccccaagaagagcaccaaccuggugaagaacaagugcgugaacuucaacuucaacggccuuaccggcaccggcgugcugaccgagagcaacaagaaauuccugcccuuucagcaguucggccgggacaucgccgacaccaccgacgcugugcgggauccccagacccuggagauccuggacaucaccccuugcagcuucggcggcgugagcgugaucaccccaggcaccaacaccagcaaccagguggccgugcuguaccagggcgugaacugcaccgaggugcccguggccauccacgccgaccagcugacacccaccuggcgggucuacagcaccggcagcaacguguuccagacccgggccgguugccugaucggcgccgagcacgugaacaacagcuacgagugcgacauccccaucggcgccggcaucugugccagcuaccagacccagaccaauucaccccggagggcaaggagcguggccagccagagcgugaucgccuacaccaugagccugggcgccgagaacagcguggccuacagcaacaacagcaucgccauccccaccaacuucaccaucagcgugaccaccgagauucugcccgugagcaugaccaagaccagcguggacugcaccauguacaucugcggcgacagcaccgagugcagcaaccugcugcugcaguacggcagcuucugcacccagcugaaccgggcccugaccggcaucgccguggagcaggacaagaacacccaggagguguucgcccaggugaagcagaucuacaagaccccucccaucaaggacuucggcggcuucaacuucagccagauccugcccgaccccagcaagcccagcaagcggagcuucaucgaggaccugcuguucaacaaggugacccuagccgacgccggcuucaucaagcaguacggcgacugccucggcgacauagccgcccgggaccugaucugcgcccagaaguucaacggccugaccgugcugccuccccugcugaccgacgagaugaucgcccaguacaccagcgcccuguuagccggaaccaucaccagcggcuggacuuucggcgcuggagccgcucugcagauccccuucgccaugcagauggccuaccgguucaacggcaucggcgugacccagaacgugcuguacgagaaccagaagcugaucgccaaccaguucaacagcgccaucggcaagauccaggacagccugagcagcaccgcuagcgcccugggcaagcugcaggacguggugaaccagaacgcccaggcccugaacacccuggugaagcagcugagcagcaacuucggcgccaucagcagcgugcugaacgacauccugagccggcuggacccucccgaggccgaggugcagaucgaccggcugaucacuggccggcugcagagccugcagaccuacgugacccagcagcugauccgggccgccgagauucgggccagcgccaaccuggccgccaccaagaugagcgagugcgugcugggccagagcaagcggguggacuucugcggcaagggcuaccaccugaugagcuuuccccagagcgcaccccacggagugguguuccugcacgugaccuacgugcccgcccaggagaagaacuucaccaccgccccagccaucugccacgacggcaaggcccacuuuccccgggagggcguguucgugagcaacggcacccacugguucgugacccagcggaacuucuacgagccccagaucaucaccaccgacaacaccuucgugagcggcaacugcgacguggugaucggcaucgugaacaacaccguguacgauccccugcagcccgagcuggacagcuucaaggaggagcuggacaaguacuucaagaaucacaccagccccgacguggaccugggcgacaucagcggcaucaacgccagcguggugaacauccagaaggagaucgaucggcugaacgagguggccaagaaccugaacgagagccugaucgaccugcaggagcugggcaaguacgagcaguacaucaaguggcccugguacaucuggcugggcuucaucgccggccugaucgccaucgugaucgugaccaucaugcugugcugcaugaccagcugcugcagcugccugaagggcuguugcagcugcggcagcugcugcaaguucgacgaggacgacagcgagcccgugcugaagggcgugaagcugcacuacaccugaggacuaguuauaagacugacuagcccgaugggccucccaacgggcccuccuccccuccuugcaccgagauuaauaaaaaaaaaaaaaaaaaaaaaaaaaaaaaaaaaaaaaaaaaaaaaaaaaaaaaaaaaaaaaaaaugcaucccccccccccccccccccccccccccccccaaaggcucuuuucagagccaccagaauu

SEQ ID NO: 23345 - RNA, 4030 nt, Artificial Sequence
  SARS-CoV-2/Wuhan/WIV05/2019__EPI_ISL_402128 spike protein mRNA gc (1-1273)(K986P_V987P_K986P_V987P_H69del_V70del_Y144del_N501Y_A570 D_D614G_P681H_T716I_S982A_D1118H)
aggagaaagcuuaccauguucguguuccuggugcugcugccccuggugagcagccagugcgugaaccugaccacccggacccagcugccaccagccuacaccaacagcuucacccggggcgucuacuaccccgacaagguguuccggagcagcguccugcacagcacccaggaccuguuccugcccuucuucagcaacgugaccugguuccacgccaucagcggcaccaacggcaccaagcgguucgacaaccccgugcugcccuucaacgacggcguguacuucgccagcaccgagaagagcaacaucauccggggcuggaucuucggcaccacccuggacagcaagacccagagccugcugaucgugaauaacgccaccaacguggugaucaaggugugcgaguuccaguucugcaacgaccccuuccugggcguguaccacaagaacaacaagagcuggauggagagcgaguuccggguguacagcagcgccaacaacugcaccuucgaguacgugagccagcccuuccugauggaccuggagggcaagcagggcaacuucaagaaccugcgggaguucguguucaagaacaucgacggcuacuucaagaucuacagcaagcacaccccaaucaaccuggugcgggaucugccccagggcuucucagcccuggagccccugguggaccugcccaucggcaucaacaucacccgguuccagacccugcuggcccugcaccggagcuaccugaccccaggcgacagcagcagcggguggacagcaggcgcggcugcuuacuacgugggcuaccugcagccccggaccuuccugcugaaguacaacgagaacggcaccaucaccgacgccguggacugcgcccuggacccucugagcgagaccaagugcacccugaagagcuucaccguggagaagggcaucuaccagaccagcaacuuccgggugcagcccaccgagagcaucgugcgguuccccaacaucaccaaccugugccccuucggcgagguguucaacgccacccgguucgccagcguguacgccuggaaccggaagcggaucagcaacugcguggccgacuacagcgugcuguacaacagcgccagcuucagcaccuucaagugcuacggcgugagccccaccaagcugaacgaccugugcuucaccaacguguacgccgacagcuucgugauccguggcgacgaggugcggcagaucgcacccggccagacaggcaagaucgccgacuacaacuacaagcugcccgacgacuucaccggcugcgugaucgccuggaacagcaacaaccucgacagcaaggugggcggcaacuacaacuaccuguaccggcuguuccggaagagcaaccugaagcccuucgagcgggacaucagcaccgagaucuaccaagccggcuccaccccuugcaacggcguggagggcuucaacugcuacuucccucugcagagcuacggcuuccagcccaccuacggcgugggcuaccagcccuaccgggugguggugcugagcuucgagcugcugcacgccccagccaccguguguggccccaagaagagcaccaaccuggugaagaacaagugcgugaacuucaacuucaacggccuuaccggcaccggcgugcugaccgagagcaacaagaaauuccugcccuuucagcaguucggccgggacaucgacgacaccaccgacgcugugcgggauccccagacccuggagauccuggacaucaccccuugcagcuucggcggcgugagcgugaucaccccaggcaccaacaccagcaaccagguggccgugcuguaccagggcgugaacugcaccgaggugcccguggccauccacgccgaccagcugacacccaccuggcgggucuacagcaccggcagcaacguguuccagacccgggccgguugccugaucggcgccgagcacgugaacaacagcuacgagugcgacauccccaucggcgccggcaucugugccagcuaccagacccagaccaauucacaccggagggcaaggagcguggccagccagagcaucaucgccuacaccaugagccugggcgccgagaacagcguggccuacagcaacaacagcaucgccauccccaucaacuucaccaucagcgugaccaccgagauucugcccgugagcaugaccaagaccagcguggacugcaccauguacaucugcggcgacagcaccgagugcagcaaccugcugcugcaguacggcagcuucugcacccagcugaaccgggcccugaccggcaucgccguggagcaggacaagaacacccaggagguguucgcccaggugaagcagaucuacaagaccccucccaucaaggacuucggcggcuucaacuucagccagauccugcccgaccccagcaagcccagcaagcggagcuucaucgaggaccugcuguucaacaaggugacccuagccgacgccggcuucaucaagcaguacggcgacugccucggcgacauagccgcccgggaccugaucugcgcccagaaguucaacggccugaccgugcugccuccccugcugaccgacgagaugaucgcccaguacaccagcgcccuguuagccggaaccaucaccagcggcuggacuuucggcgcuggagccgcucugcagauccccuucgccaugcagauggccuaccgguucaacggcaucggcgugacccagaacgugcuguacgagaaccagaagcugaucgccaaccaguucaacagcgccaucggcaagauccaggacagccugagcagcaccgcuagcgcccugggcaagcugcaggacguggugaaccagaacgcccaggcccugaacacccuggugaagcagcugagcagcaacuucggcgccaucagcagcgugcugaacgacauccuggcccggcuggacccucccgaggccgaggugcagaucgaccggcugaucacuggccggcugcagagccugcagaccuacgugacccagcagcugauccgggccgccgagauucgggccagcgccaaccuggccgccaccaagaugagcgagugcgugcugggccagagcaagcggguggacuucugcggcaagggcuaccaccugaugagcuuuccccagagcgcaccccacggagugguguuccugcacgugaccuacgugcccgcccaggagaagaacuucaccaccgccccagccaucugccacgacggcaaggcccacuuuccccgggagggcguguucgugagcaacggcacccacugguucgugacccagcggaacuucuacgagccccagaucaucaccacccacaacaccuucgugagcggcaacugcgacguggugaucggcaucgugaacaacaccguguacgauccccugcagcccgagcuggacagcuucaaggaggagcuggacaaguacuucaagaaucacaccagccccgacguggaccugggcgacaucagcggcaucaacgccagcguggugaacauccagaaggagaucgaucggcugaacgagguggccaagaaccugaacgagagccugaucgaccugcaggagcugggcaaguacgagcaguacaucaaguggcccugguacaucuggcugggcuucaucgccggccugaucgccaucgugauggugaccaucaugcugugcugcaugaccagcugcugcagcugccugaagggcuguugcagcugcggcagcugcugcaaguucgacgaggacgacagcgagcccgugcugaagggcgugaagcugcacuacaccugaggacuaguuauaagacugacuagcccgaugggccucccaacgggcccuccuccccuccuugcaccgagauuaauaaaaaaaaaaaaaaaaaaaaaaaaaaaaaaaaaaaaaaaaaaaaaaaaaaaaaaaaaaaaaaaaugcaucccccccccccccccccccccccccccccccaaaggcucuuuucagagccaccagaauu

SEQ ID NO: 23346 - RNA, 4039 nt, Artificial Sequence
  SARS-CoV-2/Wuhan/WIV05/2019__EPI_ISL_402128 spike protein mRNA gc (1-1273)(K986P_V987P_K986P_V987P_K417N_E484K_N501Y_D614G)
aggagaaagcuuaccauguucguguuccuggugcugcugccccuggugagcagccagugcgugaaccugaccacccggacccagcugccaccagccuacaccaacagcuucacccggggcgucuacuaccccgacaagguguuccggagcagcguccugcacagcacccaggaccuguuccugcccuucuucagcaacgugaccugguuccacgccauccacgugagcggcaccaacggcaccaagcgguucgacaaccccgugcugcccuucaacgacggcguguacuucgccagcaccgagaagagcaacaucauccggggcuggaucuucggcaccacccuggacagcaagacccagagccugcugaucgugaauaacgccaccaacguggugaucaaggugugcgaguuccaguucugcaacgaccccuuccugggcguguacuaccacaagaacaacaagagcuggauggagagcgaguuccggguguacagcagcgccaacaacugcaccuucgaguacgugagccagcccuuccugauggaccuggagggcaagcagggcaacuucaagaaccugcgggaguucguguucaagaacaucgacggcuacuucaagaucuacagcaagcacaccccaaucaaccuggugcgggaucugccccagggcuucucagcccuggagccccugguggaccugcccaucggcaucaacaucacccgguuccagacccugcuggcccugcaccggagcuaccugaccccaggcgacagcagcagcggguggacagcaggcgcggcugcuuacuacgugggcuaccugcagccccggaccuuccugcugaaguacaacgagaacggcaccaucaccgacgccguggacugcgcccuggacccucugagcgagaccaagugcacccugaagagcuucaccguggagaagggcaucuaccagaccagcaacuuccgggugcagcccaccgagagcaucgugcgguuccccaacaucaccaaccugugccccuucggcgagguguucaacgccacccgguucgccagcguguacgccuggaaccggaagcggaucagcaacugcguggccgacuacagcgugcuguacaacagcgccagcuucagcaccuucaagugcuacggcgugagccccaccaagcugaacgaccugugcuucaccaacguguacgccgacagcuucgugauccguggcgacgaggugcggcagaucgcacccggccagacaggcaacaucgccgacuacaacuacaagcugcccgacgacuucaccggcugcgugaucgccuggaacagcaacaaccucgacagcaaggugggcggcaacuacaacuaccuguaccggcuguuccggaagagcaaccugaagcccuucgagcgggacaucagcaccgagaucuaccaagccggcuccaccccuugcaacggcgugaagggcuucaacugcuacuucccucugcagagcuacggcuuccagcccaccuacggcgugggcuaccagcccuaccgggugguggugcugagcuucgagcugcugcacgccccagccaccguguguggccccaagaagagcaccaaccuggugaagaacaagugcgugaacuucaacuucaacggccuuaccggcaccggcgugcugaccgagagcaacaagaaauuccugcccuuucagcaguucggccgggacaucgccgacaccaccgacgcugugcgggauccccagacccuggagauccuggacaucaccccuugcagcuucggcggcgugagcgugaucaccccaggcaccaacaccagcaaccagguggccgugcuguaccagggcgugaacugcaccgaggugcccguggccauccacgccgaccagcugacacccaccuggcgggucuacagcaccggcagcaacguguuccagacccgggccgguugccugaucggcgccgagcacgugaacaacagcuacgagugcgacauccccaucggcgccggcaucugugccagcuaccagacccagaccaauucaccccggagggcaaggagcguggccagccagagcaucaucgccuacaccaugagccugggcgccgagaacagcguggccuacagcaacaacagcaucgccauccccaccaacuucaccaucagcgugaccaccgagauucugcccgugagcaugaccaagaccagcguggacugcaccauguacaucugcggcgacagcaccgagugcagcaaccugcugcugcaguacggcagcuucugcacccagcugaaccgggcccugaccggcaucgccguggagcaggacaagaacacccaggagguguucgcccaggugaagcagaucuacaagaccccucccaucaaggacuucggcggcuucaacuucagccagauccugcccgaccccagcaagcccagcaagcggagcuucaucgaggaccugcuguucaacaaggugacccuagccgacgccggcuucaucaagcaguacggcgacugccucggcgacauagccgcccgggaccugaucugcgcccagaaguucaacggccugaccgugcugccuccccugcugaccgacgagaugaucgcccaguacaccagcgcccuguuagccggaaccaucaccagcggcuggacuuucggcgcuggagccgcucugcagauccccuucgccaugcagauggccuaccgguucaacggcaucggcgugacccagaacgugcuguacgagaaccagaagcugaucgccaaccaguucaacagcgccaucggcaagauccaggacagccugagcagcaccgcuagcgcccugggcaagcugcaggacguggugaaccagaacgcccaggcccugaacacccuggugaagcagcugagcagcaacuucggcgccaucagcagcgugcugaacgacauccugagccggcuggacccucccgaggccgaggugcagaucgaccggcugaucacuggccggcugcagagccugcagaccuacgugacccagcagcugauccgggccgccgagauucgggccagcgccaaccuggccgccaccaagaugagcgagugcgugcugggccagagcaagcggguggacuucugcggcaagggcuaccaccugaugagcuuuccccagagcgcaccccacggagugguguuccugcacgugaccuacgugcccgcccaggagaagaacuucaccaccgccccagccaucugccacgacggcaaggcccacuuuccccgggagggcguguucgugagcaacggcacccacugguucgugacccagcggaacuucuacgagccccagaucaucaccaccgacaacaccuucgugagcggcaacugcgacguggugaucggcaucgugaacaacaccguguacgauccccugcagcccgagcuggacagcuucaaggaggagcuggacaaguacuucaagaaucacaccagccccgacguggaccugggcgacaucagcggcaucaacgccagcguggugaacauccagaaggagaucgaucggcugaacgagguggccaagaaccugaacgagagccugaucgaccugcaggagcugggcaaguacgagcaguacaucaaguggcccugguacaucuggcugggcuucaucgccggccugaucgccaucgugauggugaccaucaugcugugcugcaugaccagcugcugcagcugccugaagggcuguugcagcugcggcagcugcugcaaguucgacgaggacgacagcgagcccgugcugaagggcgugaagcugcacuacaccugaggacuaguuauaagacugacuagcccgaugggccucccaacgggcccuccuccccuccuugcaccgagauuaauaaaaaaaaaaaaaaaaaaaaaaaaaaaaaaaaaaaaaaaaaaaaaaaaaaaaaaaaaaaaaaaaugcaucccccccccccccccccccccccccccccccaaaggcucuuuucagagccaccagaauu

SEQ ID NO: 23347 - RNA, 4030 nt, Artificial Sequence
  SARS-CoV-2/Wuhan/WIV05/2019__EPI_ISL_402128 spike protein mRNA gc (1-1273)(K986P_V987P_K986P_V987P_L18F_D80A_D215G_L242del_A243del_ L244del_R246I_K417N_E484K_N501Y_D614G_A701V)
aggagaaagcuuaccauguucguguuccuggugcugcugccccuggugagcagccagugcgugaacuucaccacccggacccagcugccaccagccuacaccaacagcuucacccggggcgucuacuaccccgacaagguguuccggagcagcguccugcacagcacccaggaccuguuccugcccuucuucagcaacgugaccugguuccacgccauccacgugagcggcaccaacggcaccaagcgguucgccaaccccgugcugcccuucaacgacggcguguacuucgccagcaccgagaagagcaacaucauccggggcuggaucuucggcaccacccuggacagcaagacccagagccugcugaucgugaauaacgccaccaacguggugaucaaggugugcgaguuccaguucugcaacgaccccuuccugggcguguacuaccacaagaacaacaagagcuggauggagagcgaguuccggguguacagcagcgccaacaacugcaccuucgaguacgugagccagcccuuccugauggaccuggagggcaagcagggcaacuucaagaaccugcgggaguucguguucaagaacaucgacggcuacuucaagaucuacagcaagcacaccccaaucaaccuggugcggggccugccccagggcuucucagcccuggagccccugguggaccugcccaucggcaucaacaucacccgguuccagacccugcacaucagcuaccugaccccaggcgacagcagcagcggguggacagcaggcgcggcugcuuacuacgugggcuaccugcagccccggaccuuccugcugaaguacaacgagaacggcaccaucaccgacgccguggacugcgcccuggacccucugagcgagaccaagugcacccugaagagcuucaccguggagaagggcaucuaccagaccagcaacuuccgggugcagcccaccgagagcaucgugcgguuccccaacaucaccaaccugugccccuucggcgagguguucaacgccacccgguucgccagcguguacgccuggaaccggaagcggaucagcaacugcguggccgacuacagcgugcuguacaacagcgccagcuucagcaccuucaagugcuacggcgugagccccaccaagcugaacgaccugugcuucaccaacguguacgccgacagcuucgugauccguggcgacgaggugcggcagaucgcacccggccagacaggcaacaucgccgacuacaacuacaagcugcccgacgacuucaccggcugcgugaucgccuggaacagcaacaaccucgacagcaaggugggcggcaacuacaacuaccuguaccggcuguuccggaagagcaaccugaagcccuucgagcgggacaucagcaccgagaucuaccaagccggcuccaccccuugcaacggcgugaagggcuucaacugcuacuucccucugcagagcuacggcuuccagcccaccuacggcgugggcuaccagcccuaccgggugguggugcugagcuucgagcugcugcacgccccagccaccguguguggccccaagaagagcaccaaccuggugaagaacaagugcgugaacuucaacuucaacggccuuaccggcaccggcgugcugaccgagagcaacaagaaauuccugcccuuucagcaguucggccgggacaucgccgacaccaccgacgcugugcgggauccccagacccuggagauccuggacaucaccccuugcagcuucggcggcgugagcgugaucaccccaggcaccaacaccagcaaccagguggccgugcuguaccagggcgugaacugcaccgaggugcccguggccauccacgccgaccagcugacacccaccuggcgggucuacagcaccggcagcaacguguuccagacccgggccgguugccugaucggcgccgagcacgugaacaacagcuacgagugcgacauccccaucggcgccggcaucugugccagcuaccagacccagaccaauucaccccggagggcaaggagcguggccagccagagcaucaucgccuacaccaugagccugggcguggagaacagcguggccuacagcaacaacagcaucgccauccccaccaacuucaccaucagcgugaccaccgagauucugcccgugagcaugaccaagaccagcguggacugcaccauguacaucugcggcgacagcaccgagugcagcaaccugcugcugcaguacggcagcuucugcacccagcugaaccgggcccugaccggcaucgccguggagcaggacaagaacacccaggagguguucgcccaggugaagcagaucuacaagaccccucccaucaaggacuucggcggcuucaacuucagccagauccugcccgaccccagcaagcccagcaagcggagcuucaucgaggaccugcuguucaacaaggugacccuagccgacgccggcuucaucaagcaguacggcgacugccucggcgacauagccgcccgggaccugaucugcgcccagaaguucaacggccugaccgugcugccuccccugcugaccgacgagaugaucgcccaguacaccagcgcccuguuagccggaaccaucaccagcggcuggacuuucggcgcuggagccgcucugcagauccccuucgccaugcagauggccuaccgguucaacggcaucggcgugacccagaacgugcuguacgagaaccagaagcugaucgccaaccaguucaacagcgccaucggcaagauccaggacagccugagcagcaccgcuagcgcccugggcaagcugcaggacguggugaaccagaacgcccaggcccugaacacccuggugaagcagcugagcagcaacuucggcgccaucagcagcgugcugaacgacauccugagccggcuggacccucccgaggccgaggugcagaucgaccggcugaucacuggccggcugcagagccugcagaccuacgugacccagcagcugauccgggccgccgagauucgggccagcgccaaccuggccgccaccaagaugagcgagugcgugcugggccagagcaagcggguggacuucugcggcaagggcuaccaccugaugagcuuuccccagagcgcaccccacggagugguguuccugcacgugaccuacgugcccgcccaggagaagaacuucaccaccgccccagccaucugccacgacggcaaggcccacuuuccccgggagggcguguucgugagcaacggcacccacugguucgugacccagcggaacuucuacgagccccagaucaucaccaccgacaacaccuucgugagcggcaacugcgacguggugaucggcaucgugaacaacaccguguacgauccccugcagcccgagcuggacagcuucaaggaggagcuggacaaguacuucaagaaucacaccagccccgacguggaccugggcgacaucagcggcaucaacgccagcguggugaacauccagaaggagaucgaucggcugaacgagguggccaagaaccugaacgagagccugaucgaccugcaggagcugggcaaguacgagcaguacaucaaguggcccugguacaucuggcugggcuucaucgccggccugaucgccaucgugauggugaccaucaugcugugcugcaugaccagcugcugcagcugccugaagggcuguugcagcugcggcagcugcugcaaguucgacgaggacgacagcgagcccgugcugaagggcgugaagcugcacuacaccugaggacuaguuauaagacugacuagcccgaugggccucccaacgggcccuccuccccuccuugcaccgagauuaauaaaaaaaaaaaaaaaaaaaaaaaaaaaaaaaaaaaaaaaaaaaaaaaaaaaaaaaaaaaaaaaaugcaucccccccccccccccccccccccccccccccaaaggcucuuuucagagccaccagaauu

SEQ ID NO: 23348 - RNA, 4039 nt, Artificial Sequence
  SARS-CoV-2/Wuhan/WIV05/2019__EPI_ISL_402128 spike protein mRNA gc (1-1273)(K986P_V987P_K986P_V987P_E484K_D614G)
aggagaaagcuuaccauguucguguuccuggugcugcugccccuggugagcagccagugcgugaaccugaccacccggacccagcugccaccagccuacaccaacagcuucacccggggcgucuacuaccccgacaagguguuccggagcagcguccugcacagcacccaggaccuguuccugcccuucuucagcaacgugaccugguuccacgccauccacgugagcggcaccaacggcaccaagcgguucgacaaccccgugcugcccuucaacgacggcguguacuucgccagcaccgagaagagcaacaucauccggggcuggaucuucggcaccacccuggacagcaagacccagagccugcugaucgugaauaacgccaccaacguggugaucaaggugugcgaguuccaguucugcaacgaccccuuccugggcguguacuaccacaagaacaacaagagcuggauggagagcgaguuccggguguacagcagcgccaacaacugcaccuucgaguacgugagccagcccuuccugauggaccuggagggcaagcagggcaacuucaagaaccugcgggaguucguguucaagaacaucgacggcuacuucaagaucuacagcaagcacaccccaaucaaccuggugcgggaucugccccagggcuucucagcccuggagccccugguggaccugcccaucggcaucaacaucacccgguuccagacccugcuggcccugcaccggagcuaccugaccccaggcgacagcagcagcggguggacagcaggcgcggcugcuuacuacgugggcuaccugcagccccggaccuuccugcugaaguacaacgagaacggcaccaucaccgacgccguggacugcgcccuggacccucugagcgagaccaagugcacccugaagagcuucaccguggagaagggcaucuaccagaccagcaacuuccgggugcagcccaccgagagcaucgugcgguuccccaacaucaccaaccugugccccuucggcgagguguucaacgccacccgguucgccagcguguacgccuggaaccggaagcggaucagcaacugcguggccgacuacagcgugcuguacaacagcgccagcuucagcaccuucaagugcuacggcgugagccccaccaagcugaacgaccugugcuucaccaacguguacgccgacagcuucgugauccguggcgacgaggugcggcagaucgcacccggccagacaggcaagaucgccgacuacaacuacaagcugcccgacgacuucaccggcugcgugaucgccuggaacagcaacaaccucgacagcaaggugggcggcaacuacaacuaccuguaccggcuguuccggaagagcaaccugaagcccuucgagcgggacaucagcaccgagaucuaccaagccggcuccaccccuugcaacggcgugaagggcuucaacugcuacuucccucugcagagcuacggcuuccagcccaccaacggcgugggcuaccagcccuaccgggugguggugcugagcuucgagcugcugcacgccccagccaccguguguggccccaagaagagcaccaaccuggugaagaacaagugcgugaacuucaacuucaacggccuuaccggcaccggcgugcugaccgagagcaacaagaaauuccugcccuuucagcaguucggccgggacaucgccgacaccaccgacgcugugcgggauccccagacccuggagauccuggacaucaccccuugcagcuucggcggcgugagcgugaucaccccaggcaccaacaccagcaaccagguggccgugcuguaccagggcgugaacugcaccgaggugcccguggccauccacgccgaccagcugacacccaccuggcgggucuacagcaccggcagcaacguguuccagacccgggccgguugccugaucggcgccgagcacgugaacaacagcuacgagugcgacauccccaucggcgccggcaucugugccagcuaccagacccagaccaauucaccccggagggcaaggagcguggccagccagagcaucaucgccuacaccaugagccugggcgccgagaacagcguggccuacagcaacaacagcaucgccauccccaccaacuucaccaucagcgugaccaccgagauucugcccgugagcaugaccaagaccagcguggacugcaccauguacaucugcggcgacagcaccgagugcagcaaccugcugcugcaguacggcagcuucugcacccagcugaaccgggcccugaccggcaucgccguggagcaggacaagaacacccaggagguguucgcccaggugaagcagaucuacaagaccccucccaucaaggacuucggcggcuucaacuucagccagauccugcccgaccccagcaagcccagcaagcggagcuucaucgaggaccugcuguucaacaaggugacccuagccgacgccggcuucaucaagcaguacggcgacugccucggcgacauagccgcccgggaccugaucugcgcccagaaguucaacggccugaccgugcugccuccccugcugaccgacgagaugaucgcccaguacaccagcgcccuguuagccggaaccaucaccagcggcuggacuuucggcgcuggagccgcucugcagauccccuucgccaugcagauggccuaccgguucaacggcaucggcgugacccagaacgugcuguacgagaaccagaagcugaucgccaaccaguucaacagcgccaucggcaagauccaggacagccugagcagcaccgcuagcgcccugggcaagcugcaggacguggugaaccagaacgcccaggcccugaacacccuggugaagcagcugagcagcaacuucggcgccaucagcagcgugcugaacgacauccugagccggcuggacccucccgaggccgaggugcagaucgaccggcugaucacuggccggcugcagagccugcagaccuacgugacccagcagcugauccgggccgccgagauucgggccagcgccaaccuggccgccaccaagaugagcgagugcgugcugggccagagcaagcggguggacuucugcggcaagggcuaccaccugaugagcuuuccccagagcgcaccccacggagugguguuccugcacgugaccuacgugcccgcccaggagaagaacuucaccaccgccccagccaucugccacgacggcaaggcccacuuuccccgggagggcguguucgugagcaacggcacccacugguucgugacccagcggaacuucuacgagccccagaucaucaccaccgacaacaccuucgugagcggcaacugcgacguggugaucggcaucgugaacaacaccguguacgauccccugcagcccgagcuggacagcuucaaggaggagcuggacaaguacuucaagaaucacaccagccccgacguggaccugggcgacaucagcggcaucaacgccagcguggugaacauccagaaggagaucgaucggcugaacgagguggccaagaaccugaacgagagccugaucgaccugcaggagcugggcaaguacgagcaguacaucaaguggcccugguacaucuggcugggcuucaucgccggccugaucgccaucgugauggugaccaucaugcugugcugcaugaccagcugcugcagcugccugaagggcuguugcagcugcggcagcugcugcaaguucgacgaggacgacagcgagcccgugcugaagggcgugaagcugcacuacaccugaggacuaguuauaagacugacuagcccgaugggccucccaacgggcccuccuccccuccuugcaccgagauuaauaaaaaaaaaaaaaaaaaaaaaaaaaaaaaaaaaaaaaaaaaaaaaaaaaaaaaaaaaaaaaaaaugcaucccccccccccccccccccccccccccccccaaaggcucuuuucagagccaccagaauu

SEQ ID NO: 23349 - RNA, 4039 nt, Artificial Sequence
  SARS-CoV-2/Wuhan/WIV05/2019__EPI_ISL_402128 spike protein mRNA gc (1-1273)(K986P_V987P_K986P_V987P_L18F_T20N_P26S_D138Y_R190S_K417T _E484K_N501Y_D614G_H655Y_T1027I)
aggagaaagcuuaccauguucguguuccuggugcugcugccccuggugagcagccagugcgugaacuucaccaaccggacccagcugccaagcgccuacaccaacagcuucacccggggcgucuacuaccccgacaagguguuccggagcagcguccugcacagcacccaggaccuguuccugcccuucuucagcaacgugaccugguuccacgccauccacgugagcggcaccaacggcaccaagcgguucgacaaccccgugcugcccuucaacgacggcguguacuucgccagcaccgagaagagcaacaucauccggggcuggaucuucggcaccacccuggacagcaagacccagagccugcugaucgugaauaacgccaccaacguggugaucaaggugugcgaguuccaguucugcaacuaccccuuccugggcguguacuaccacaagaacaacaagagcuggauggagagcgaguuccggguguacagcagcgccaacaacugcaccuucgaguacgugagccagcccuuccugauggaccuggagggcaagcagggcaacuucaagaaccugagcgaguucguguucaagaacaucgacggcuacuucaagaucuacagcaagcacaccccaaucaaccuggugcgggaucugccccagggcuucucagcccuggagccccugguggaccugcccaucggcaucaacaucacccgguuccagacccugcuggcccugcaccggagcuaccugaccccaggcgacagcagcagcggguggacagcaggcgcggcugcuuacuacgugggcuaccugcagccccggaccuuccugcugaaguacaacgagaacggcaccaucaccgacgccguggacugcgcccuggacccucugagcgagaccaagugcacccugaagagcuucaccguggagaagggcaucuaccagaccagcaacuuccgggugcagcccaccgagagcaucgugcgguuccccaacaucaccaaccugugccccuucggcgagguguucaacgccacccgguucgccagcguguacgccuggaaccggaagcggaucagcaacugcguggccgacuacagcgugcuguacaacagcgccagcuucagcaccuucaagugcuacggcgugagccccaccaagcugaacgaccugugcuucaccaacguguacgccgacagcuucgugauccguggcgacgaggugcggcagaucgcacccggccagacaggcaccaucgccgacuacaacuacaagcugcccgacgacuucaccggcugcgugaucgccuggaacagcaacaaccucgacagcaaggugggcggcaacuacaacuaccuguaccggcuguuccggaagagcaaccugaagcccuucgagcgggacaucagcaccgagaucuaccaagccggcuccaccccuugcaacggcgugaagggcuucaacugcuacuucccucugcagagcuacggcuuccagcccaccuacggcgugggcuaccagcccuaccgggugguggugcugagcuucgagcugcugcacgccccagccaccguguguggccccaagaagagcaccaaccuggugaagaacaagugcgugaacuucaacuucaacggccuuaccggcaccggcgugcugaccgagagcaacaagaaauuccugcccuuucagcaguucggccgggacaucgccgacaccaccgacgcugugcgggauccccagacccuggagauccuggacaucaccccuugcagcuucggcggcgugagcgugaucaccccaggcaccaacaccagcaaccagguggccgugcuguaccagggcgugaacugcaccgaggugcccguggccauccacgccgaccagcugacacccaccuggcgggucuacagcaccggcagcaacguguuccagacccgggccgguugccugaucggcgccgaguacgugaacaacagcuacgagugcgacauccccaucggcgccggcaucugugccagcuaccagacccagaccaauucaccccggagggcaaggagcguggccagccagagcaucaucgccuacaccaugagccugggcgccgagaacagcguggccuacagcaacaacagcaucgccauccccaccaacuucaccaucagcgugaccaccgagauucugcccgugagcaugaccaagaccagcguggacugcaccauguacaucugcggcgacagcaccgagugcagcaaccugcugcugcaguacggcagcuucugcacccagcugaaccgggcccugaccggcaucgccguggagcaggacaagaacacccaggagguguucgcccaggugaagcagaucuacaagaccccucccaucaaggacuucggcggcuucaacuucagccagauccugcccgaccccagcaagcccagcaagcggagcuucaucgaggaccugcuguucaacaaggugacccuagccgacgccggcuucaucaagcaguacggcgacugccucggcgacauagccgcccgggaccugaucugcgcccagaaguucaacggccugaccgugcugccuccccugcugaccgacgagaugaucgcccaguacaccagcgcccuguuagccggaaccaucaccagcggcuggacuuucggcgcuggagccgcucugcagauccccuucgccaugcagauggccuaccgguucaacggcaucggcgugacccagaacgugcuguacgagaaccagaagcugaucgccaaccaguucaacagcgccaucggcaagauccaggacagccugagcagcaccgcuagcgcccugggcaagcugcaggacguggugaaccagaacgcccaggcccugaacacccuggugaagcagcugagcagcaacuucggcgccaucagcagcgugcugaacgacauccugagccggcuggacccucccgaggccgaggugcagaucgaccggcugaucacuggccggcugcagagccugcagaccuacgugacccagcagcugauccgggccgccgagauucgggccagcgccaaccuggccgccaucaagaugagcgagugcgugcugggccagagcaagcggguggacuucugcggcaagggcuaccaccugaugagcuuuccccagagcgcaccccacggagugguguuccugcacgugaccuacgugcccgcccaggagaagaacuucaccaccgccccagccaucugccacgacggcaaggcccacuuuccccgggagggcguguucgugagcaacggcacccacugguucgugacccagcggaacuucuacgagccccagaucaucaccaccgacaacaccuucgugagcggcaacugcgacguggugaucggcaucgugaacaacaccguguacgauccccugcagcccgagcuggacagcuucaaggaggagcuggacaaguacuucaagaaucacaccagccccgacguggaccugggcgacaucagcggcaucaacgccagcguggugaacauccagaaggagaucgaucggcugaacgagguggccaagaaccugaacgagagccugaucgaccugcaggagcugggcaaguacgagcaguacaucaaguggcccugguacaucuggcugggcuucaucgccggccugaucgccaucgugauggugaccaucaugcugugcugcaugaccagcugcugcagcugccugaagggcuguugcagcugcggcagcugcugcaaguucgacgaggacgacagcgagcccgugcugaagggcgugaagcugcacuacaccugaggacuaguuauaagacugacuagcccgaugggccucccaacgggcccuccuccccuccuugcaccgagauuaauaaaaaaaaaaaaaaaaaaaaaaaaaaaaaaaaaaaaaaaaaaaaaaaaaaaaaaaaaaaaaaaaugcaucccccccccccccccccccccccccccccccaaaggcucuuuucagagccaccagaauu

SEQ ID NO: 23350 - RNA, 4039 nt, Artificial Sequence
  SARS-CoV-2/Wuhan/WIV05/2019__EPI_ISL_402128 spike protein mRNA gc (1-1273)(K986P_V987P_K986P_V987P_S13I_W152C_L452R_D614G)
aggagaaagcuuaccauguucguguuccuggugcugcugccccuggugagcauccagugcgugaaccugaccacccggacccagcugccaccagccuacaccaacagcuucacccggggcgucuacuaccccgacaagguguuccggagcagcguccugcacagcacccaggaccuguuccugcccuucuucagcaacgugaccugguuccacgccauccacgugagcggcaccaacggcaccaagcgguucgacaaccccgugcugcccuucaacgacggcguguacuucgccagcaccgagaagagcaacaucauccggggcuggaucuucggcaccacccuggacagcaagacccagagccugcugaucgugaauaacgccaccaacguggugaucaaggugugcgaguuccaguucugcaacgaccccuuccugggcguguacuaccacaagaacaacaagagcugcauggagagcgaguuccggguguacagcagcgccaacaacugcaccuucgaguacgugagccagcccuuccugauggaccuggagggcaagcagggcaacuucaagaaccugcgggaguucguguucaagaacaucgacggcuacuucaagaucuacagcaagcacaccccaaucaaccuggugcgggaucugccccagggcuucucagcccuggagccccugguggaccugcccaucggcaucaacaucacccgguuccagacccugcuggcccugcaccggagcuaccugaccccaggcgacagcagcagcggguggacagcaggcgcggcugcuuacuacgugggcuaccugcagccccggaccuuccugcugaaguacaacgagaacggcaccaucaccgacgccguggacugcgcccuggacccucugagcgagaccaagugcacccugaagagcuucaccguggagaagggcaucuaccagaccagcaacuuccgggugcagcccaccgagagcaucgugcgguuccccaacaucaccaaccugugccccuucggcgagguguucaacgccacccgguucgccagcguguacgccuggaaccggaagcggaucagcaacugcguggccgacuacagcgugcuguacaacagcgccagcuucagcaccuucaagugcuacggcgugagccccaccaagcugaacgaccugugcuucaccaacguguacgccgacagcuucgugauccguggcgacgaggugcggcagaucgcacccggccagacaggcaagaucgccgacuacaacuacaagcugcccgacgacuucaccggcugcgugaucgccuggaacagcaacaaccucgacagcaaggugggcggcaacuacaacuaccgcuaccggcuguuccggaagagcaaccugaagcccuucgagcgggacaucagcaccgagaucuaccaagccggcuccaccccuugcaacggcguggagggcuucaacugcuacuucccucugcagagcuacggcuuccagcccaccaacggcgugggcuaccagcccuaccgggugguggugcugagcuucgagcugcugcacgccccagccaccguguguggccccaagaagagcaccaaccuggugaagaacaagugcgugaacuucaacuucaacggccuuaccggcaccggcgugcugaccgagagcaacaagaaauuccugcccuuucagcaguucggccgggacaucgccgacaccaccgacgcugugcgggauccccagacccuggagauccuggacaucaccccuugcagcuucggcggcgugagcgugaucaccccaggcaccaacaccagcaaccagguggccgugcuguaccagggcgugaacugcaccgaggugcccguggccauccacgccgaccagcugacacccaccuggcgggucuacagcaccggcagcaacguguuccagacccgggccgguugccugaucggcgccgagcacgugaacaacagcuacgagugcgacauccccaucggcgccggcaucugugccagcuaccagacccagaccaauucaccccggagggcaaggagcguggccagccagagcaucaucgccuacaccaugagccugggcgccgagaacagcguggccuacagcaacaacagcaucgccauccccaccaacuucaccaucagcgugaccaccgagauucugcccgugagcaugaccaagaccagcguggacugcaccauguacaucugcggcgacagcaccgagugcagcaaccugcugcugcaguacggcagcuucugcacccagcugaaccgggcccugaccggcaucgccguggagcaggacaagaacacccaggagguguucgcccaggugaagcagaucuacaagaccccucccaucaaggacuucggcggcuucaacuucagccagauccugcccgaccccagcaagcccagcaagcggagcuucaucgaggaccugcuguucaacaaggugacccuagccgacgccggcuucaucaagcaguacggcgacugccucggcgacauagccgcccgggaccugaucugcgcccagaaguucaacggccugaccgugcugccuccccugcugaccgacgagaugaucgcccaguacaccagcgcccuguuagccggaaccaucaccagcggcuggacuuucggcgcuggagccgcucugcagauccccuucgccaugcagauggccuaccgguucaacggcaucggcgugacccagaacgugcuguacgagaaccagaagcugaucgccaaccaguucaacagcgccaucggcaagauccaggacagccugagcagcaccgcuagcgcccugggcaagcugcaggacguggugaaccagaacgcccaggcccugaacacccuggugaagcagcugagcagcaacuucggcgccaucagcagcgugcugaacgacauccugagccggcuggacccucccgaggccgaggugcagaucgaccggcugaucacuggccggcugcagagccugcagaccuacgugacccagcagcugauccgggccgccgagauucgggccagcgccaaccuggccgccaccaagaugagcgagugcgugcugggccagagcaagcggguggacuucugcggcaagggcuaccaccugaugagcuuuccccagagcgcaccccacggagugguguuccugcacgugaccuacgugcccgcccaggagaagaacuucaccaccgccccagccaucugccacgacggcaaggcccacuuuccccgggagggcguguucgugagcaacggcacccacugguucgugacccagcggaacuucuacgagccccagaucaucaccaccgacaacaccuucgugagcggcaacugcgacguggugaucggcaucgugaacaacaccguguacgauccccugcagcccgagcuggacagcuucaaggaggagcuggacaaguacuucaagaaucacaccagccccgacguggaccugggcgacaucagcggcaucaacgccagcguggugaacauccagaaggagaucgaucggcugaacgagguggccaagaaccugaacgagagccugaucgaccugcaggagcugggcaaguacgagcaguacaucaaguggcccugguacaucuggcugggcuucaucgccggccugaucgccaucgugauggugaccaucaugcugugcugcaugaccagcugcugcagcugccugaagggcuguugcagcugcggcagcugcugcaaguucgacgaggacgacagcgagcccgugcugaagggcgugaagcugcacuacaccugaggacuaguuauaagacugacuagcccgaugggccucccaacgggcccuccuccccuccuugcaccgagauuaauaaaaaaaaaaaaaaaaaaaaaaaaaaaaaaaaaaaaaaaaaaaaaaaaaaaaaaaaaaaaaaaaugcaucccccccccccccccccccccccccccccccaaaggcucuuuucagagccaccagaauu

SEQ ID NO: 23351 - RNA, 4039 nt, Artificial Sequence
  SARS-CoV-2/Wuhan/WIV05/2019__EPI_ISL_402128 spike protein mRNA gc (1-1273)(K986P_V987P)
aggagaaagcuuaccauguucguguuccuggugcugcugccccuggugagcagccagugcgugaaccugaccacccggacccagcugcccccugccuacaccaacagcuucacccggggcguguacuaccccgacaagguguuccggagcagcgugcugcacagcacccaggaccuguuccugcccuucuucagcaacgugaccugguuccacgccauccacgugagcggcaccaacggcaccaagcgguucgacaacccagugcugcccuucaacgacggcguguacuucgccagcaccgagaagucaaacaucauccggggcuggaucuucggcaccacccuggacagcaagacacagagccugcugaucgugaacaacgccaccaacguggugaucaaggugugcgaguuucaguucugcaacgaccccuuccugggcguguacuaccacaagaacaacaagagcuggauggagagcgaguuccgggucuacagcagcgcuaacaauugcaccuucgaguacgugagccagcccuuccugauggaccucgagggcaagcagggcaacuucaagaaccugcgggaguucguguucaagaacaucgauggcuacuucaagaucuacagcaagcacacccccaucaaccuggugcgggaccugccccagggauucagcgcccuggagccucugguggaccugcccaucggcaucaacaucaccagguuccagacccugcuggcccugcaccggagcuaccugacccccggcgacagcagcagcggcuggaccgccggcgccgccgcauacuacgugggcuaccugcagccacggaccuuccugcugaaguacaacgagaacggcaccaucaccgacgccguggacugcgcccuggacccccugagcgagaccaagugcacccuaaagagcuucaccguggagaagggcaucuaccagaccagcaacuuccgggugcagcccacugagagcaucgugcgguuccccaacauuaccaaccugugucccuucggcgagguguucaacgccacccgguucgccagcguguacgccuggaaccggaagcggaucagcaacugcguggccgacuacagcgugcuguacaacagcgccagcuucagcaccuucaagugcuacggcgugagcccuaccaagcugaacgaccugugcuucaccaacguguacgcugacagcuucgugauccggggcgacgaggugcggcagaucgcccccggccagaccggcaagaucgccgacuacaacuacaagcugcccgacgacuucaccggcugcgugaucgccuggaacagcaacaaccuggacagcaaggugggcggcaacuacaacuaccuguaccggcuguuccguaagagcaaccugaagccauucgagcgggacaucagcaccgagaucuaccaggccggcagcacccccugcaacgguguggagggcuuuaacugcuacuucccccugcagagcuacggcuuccagcccaccaacggcgugggcuaccagcccuaccgggugguggugcugagcuucgagcugcugcacgcccccgccaccgugugcggcccuaaaaagagcaccaaccuggugaagaacaagugcgugaacuucaauuucaacggccugaccggcaccggcgugcugaccgagagcaacaagaaguuccugcccuuccagcaguucggccgggauaucgccgacaccaccgacgcagugcgggacccccagacccuggagauccuggacaucaccccaugcagcuucggcggcgugagcgucaucacccccggcacaaacaccagcaaccagguggccgugcuguaccaggacgugaacugcaccgaggugcccguggccauccacgccgaccagcugacccccaccuggcggguguacagcaccggaagcaacguguuccagacccgggccggcugccugaucggcgccgagcacgugaacaacuccuacgagugcgacauccccaucggcgcuggcaucugcgccagcuaccagacccagaccaacagcccccggcgggcccggagcguggccagccagagcaucaucgccuacaccaugagcuuaggcgccgagaacagcguggccuacagcaacaacagcaucgcgaucccuaccaacuucaccaucagcgugaccaccgagauacugcccgugagcaugaccaagaccagcguggacuguaccauguacaucugcggcgacagcaccgagugcagcaaccugcugcugcaguacggcagcuucugcacccagcugaaccgggcccugaccggcaucgccguggagcaggacaagaacacccaagagguguucgcccaggugaagcagaucuacaagacucccccaaucaaggacuucggcggcuucaacuucagccagauccugcccgaccccagcaagcccagcaagcggagcuucaucgaggaccugcuguucaacaaggugacccuggccgacgccggcuucaucaagcaguacggcgauugccugggcgacaucgccgcucgggaccugaucugcgcccagaaguucaacgggcugaccgugcugcccccucugcugaccgacgagaugaucgcccaguacaccagcgcccugcuugccggcaccaucaccagcggcuggaccuucggcgccggcgcagcccugcagauccccuucgccaugcagauggccuaccgguucaacggcaucggcgugacccagaacgugcuguacgagaaccagaagcugaucgccaaccaguucaacagcgccaucggcaagauccaggacagccugagcagcaccgccagcgcccugggcaagcugcaggacguggugaaccagaacgcucaggcccugaacacccuggugaagcagcugagcagcaacuucggcgccaucagcucagugcugaaugacauccugagcaggcuggaucccccagaggccgaggugcagaucgaccggcugaucaccggccggcugcagagccugcagaccuacgugacccagcagcugauccgggccgccgagauccgggccagcgccaaccuggcagccaccaagaugagcgagugcgugcugggccagagcaagcggguggacuuuugcggcaagggcuaccaccugaugagcuucccccagagcgcuccccacggcgugguguuccuccacgugacauacguccccgcccaggagaagaacuucaccaccgcccccgccauuugccacgacggcaaggcccacuucccccgggagggcguguucgugagcaacggaacccacugguucgugacccagcggaacuucuacgagccucagaucaucaccaccgacaacaccuucgugagcggcaacugcgacguggugaucggcaucgugaacaacaccguguacgacccccugcagcccgagcuggacagcuucaaggaggagcuggacaaguacuucaagaaccacaccagcccagacguggaccugggcgacaucagcggcaucaacgccagcguggugaacauccagaaggagaucgaccggcugaacgagguggccaagaaccugaacgagagccugaucgaccugcaggagcugggcaaguacgagcaguacaucaaguggcccugguacaucuggcugggcuucaucgccggccugaucgccaucgugauggugaccaucaugcugugcugcaugaccagcugcuguagcugccugaagggcugcugcagcugcggcagcugcugcaaguucgacgaggacgacagcgagcccgugcugaagggcgugaagcugcacuacaccugaggacuaguuauaagacugacuagcccgaugggccucccaacgggcccuccuccccuccuugcaccgagauuaauaaaaaaaaaaaaaaaaaaaaaaaaaaaaaaaaaaaaaaaaaaaaaaaaaaaaaaaaaaaaaaaaugcaucccccccccccccccccccccccccccccccaaaggcucuuuucagagccaccagaauu

SEQ ID NO: 23352 - RNA, 4039 nt, Artificial Sequence
  SARS-CoV-2/Wuhan/WIV05/2019__EPI_ISL_402128 spike protein mRNA gc (1-1273)(K986P_V987P_ D614G)
aggagaaagcuuaccauguucguguuccuggugcugcugccccuggugagcagccagugcgugaaccugaccacccggacccagcugcccccugccuacaccaacagcuucacccggggcguguacuaccccgacaagguguuccggagcagcgugcugcacagcacccaggaccuguuccugcccuucuucagcaacgugaccugguuccacgccauccacgugagcggcaccaacggcaccaagcgguucgacaacccagugcugcccuucaacgacggcguguacuucgccagcaccgagaagucaaacaucauccggggcuggaucuucggcaccacccuggacagcaagacacagagccugcugaucgugaacaacgccaccaacguggugaucaaggugugcgaguuucaguucugcaacgaccccuuccugggcguguacuaccacaagaacaacaagagcuggauggagagcgaguuccgggucuacagcagcgcuaacaauugcaccuucgaguacgugagccagcccuuccugauggaccucgagggcaagcagggcaacuucaagaaccugcgggaguucguguucaagaacaucgauggcuacuucaagaucuacagcaagcacacccccaucaaccuggugcgggaccugccccagggauucagcgcccuggagccucugguggaccugcccaucggcaucaacaucaccagguuccagacccugcuggcccugcaccggagcuaccugacccccggcgacagcagcagcggcuggaccgccggcgccgccgcauacuacgugggcuaccugcagccacggaccuuccugcugaaguacaacgagaacggcaccaucaccgacgccguggacugcgcccuggacccccugagcgagaccaagugcacccuaaagagcuucaccguggagaagggcaucuaccagaccagcaacuuccgggugcagcccacugagagcaucgugcgguuccccaacauuaccaaccugugucccuucggcgagguguucaacgccacccgguucgccagcguguacgccuggaaccggaagcggaucagcaacugcguggccgacuacagcgugcuguacaacagcgccagcuucagcaccuucaagugcuacggcgugagcccuaccaagcugaacgaccugugcuucaccaacguguacgcugacagcuucgugauccggggcgacgaggugcggcagaucgcccccggccagaccggcaagaucgccgacuacaacuacaagcugcccgacgacuucaccggcugcgugaucgccuggaacagcaacaaccuggacagcaaggugggcggcaacuacaacuaccuguaccggcuguuccguaagagcaaccugaagccauucgagcgggacaucagcaccgagaucuaccaggccggcagcacccccugcaacgguguggagggcuuuaacugcuacuucccccugcagagcuacggcuuccagcccaccaacggcgugggcuaccagcccuaccgggugguggugcugagcuucgagcugcugcacgcccccgccaccgugugcggcccuaaaaagagcaccaaccuggugaagaacaagugcgugaacuucaauuucaacggccugaccggcaccggcgugcugaccgagagcaacaagaaguuccugcccuuccagcaguucggccgggauaucgccgacaccaccgacgcagugcgggacccccagacccuggagauccuggacaucaccccaugcagcuucggcggcgugagcgucaucacccccggcacaaacaccagcaaccagguggccgugcuguaccagggagugaacugcaccgaggugcccguggccauccacgccgaccagcugacccccaccuggcggguguacagcaccggcagcaacguguuccagacccgggccggcugccugaucggcgccgagcacgugaacaacuccuacgagugcgacauccccaucggcgcuggcaucugcgccagcuaccagacccagaccaacagcccccggcgggcccggagcguggccagccagagcaucaucgccuacaccaugagcuuaggcgccgagaacagcguggccuacagcaacaacagcaucgcgaucccuaccaacuucaccaucagcgugaccaccgagauacugcccgugagcaugaccaagaccagcguggacuguaccauguacaucugcggcgacagcaccgagugcagcaaccugcugcugcaguacggcagcuucugcacccagcugaaccgggcccugaccggcaucgccguggagcaggacaagaacacccaagagguguucgcccaggugaagcagaucuacaagacucccccaaucaaggacuucggcggcuucaacuucagccagauccugcccgaccccagcaagcccagcaagcggagcuucaucgaggaccugcuguucaacaaggugacccuggccgacgccggcuucaucaagcaguacggcgacugccugggggauaucgccgcucgggaccugaucugcgcccagaaguucaacggccugaccgugcugcccccucugcugaccgacgagaugaucgcccaguacaccagcgcccugcuugccggcaccaucaccagcggcuggaccuucggcgccggcgcagcccugcagauccccuucgccaugcagauggccuaccgguucaacggcaucggcgugacccagaacgugcuguacgagaaccagaagcugaucgccaaccaguucaacagcgccaucggcaagauccaggacagccugagcagcaccgccagcgcccugggcaagcugcaggacguggugaaccagaacgcucaggcccugaacacccuggugaagcagcugagcagcaacuucggcgccaucagcucagugcugaaugacauccugagcaggcuggaucccccagaggccgaggugcagaucgaccggcugaucaccggccggcugcagagccugcagaccuacgugacccagcagcugauccgggccgccgagauccgggccagcgccaaccuggcagccaccaagaugagcgagugcgugcugggccagagcaagcggguggacuuuugcggcaagggcuaccaccugaugagcuucccccagagcgcuccccacggcgugguguuccuccacgugacauacguccccgcccaggagaagaacuucaccaccgcccccgccauuugccacgacggcaaggcccacuucccccgggagggaguguucgugagcaacggcacccacugguucgugacccagcggaacuucuacgagccucagaucaucaccaccgacaacaccuucgugagcggcaacugcgacguggugaucggcaucgugaacaacaccguguacgacccccugcagcccgagcuggacagcuucaaggaggagcuggacaaguacuucaagaaccacaccagcccagacguggaccugggcgacaucagcggcaucaacgccagcguggugaacauccagaaggagaucgaccggcugaacgagguggccaagaaccugaacgagagccugaucgaccugcaggagcugggcaaguacgagcaguacaucaaguggcccugguacaucuggcugggcuucaucgccggccugaucgccaucgugauggugaccaucaugcugugcugcaugaccagcugcuguagcugccugaagggcugcugcagcugcggcagcugcugcaaguucgacgaggacgacagcgagcccgugcugaagggcgugaagcugcacuacaccugaggacuaguuauaagacugacuagcccgaugggccucccaacgggcccuccuccccuccuugcaccgagauuaauaaaaaaaaaaaaaaaaaaaaaaaaaaaaaaaaaaaaaaaaaaaaaaaaaaaaaaaaaaaaaaaaugcaucccccccccccccccccccccccccccccccaaaggcucuuuucagagccaccagaauu

SEQ ID NO: 23353 - RNA, 4039 nt, Artificial Sequence
  SARS-CoV-2/Wuhan/WIV05/2019__EPI_ISL_402128 spike protein mRNA gc (1-1273)(K986P_V987P_A222V_D614G)
aggagaaagcuuaccauguucguguuccuggugcugcugccccuggugagcagccagugcgugaaccugaccacccggacccagcugcccccugccuacaccaacagcuucacccggggcguguacuaccccgacaagguguuccggagcagcgugcugcacagcacccaggaccuguuccugcccuucuucagcaacgugaccugguuccacgccauccacgugagcggcaccaacggcaccaagcgguucgacaacccagugcugcccuucaacgacggcguguacuucgccagcaccgagaagucaaacaucauccggggcuggaucuucggcaccacccuggacagcaagacacagagccugcugaucgugaacaacgccaccaacguggugaucaaggugugcgaguuucaguucugcaacgaccccuuccugggcguguacuaccacaagaacaacaagagcuggauggagagcgaguuccgggucuacagcagcgcuaacaauugcaccuucgaguacgugagccagcccuuccugauggaccucgagggcaagcagggcaacuucaagaaccugcgggaguucguguucaagaacaucgauggcuacuucaagaucuacagcaagcacacccccaucaaccuggugcgggaccugccccagggauucagcgugcuggagccucugguggaccugcccaucggcaucaacaucaccagguuccagacccugcuggcccugcaccggagcuaccugacccccggcgacagcagcagcggcuggaccgccggcgccgccgccuacuacgugggcuaccugcagccacggaccuuccugcugaaguacaacgagaacggcaccaucaccgacgcaguggacugcgcccuggacccccugagcgagaccaagugcacccuaaagagcuucaccguggagaagggcaucuaccagaccagcaacuuccgggugcagcccacugagagcaucgugcgguuccccaacauuaccaaccugugucccuucggcgagguguucaacgccacccgguucgccagcguguacgccuggaaccggaagcggaucagcaacugcguggccgacuacagcgugcuguacaacagcgccagcuucagcaccuucaagugcuacggcgugagcccuaccaagcugaacgaccugugcuucaccaacguguacgccgacagcuucgugauccggggcgacgaggugcggcagaucgcucccggccagaccggcaagaucgccgacuacaacuacaagcugcccgacgacuucaccggcugcgugaucgccuggaacagcaacaaccuggacagcaaggugggcggcaacuacaacuaccuguaccggcuguuccguaagagcaaccugaagccauucgagcgggacaucagcaccgagaucuaccaggccggcagcacccccugcaacgguguggagggcuuuaacugcuacuucccccugcagagcuacggcuuccagcccaccaacggcgugggcuaccagcccuaccgggugguggugcugagcuucgagcugcugcacgcccccgccaccgugugcggcccuaaaaagagcaccaaccuggugaagaacaagugcgugaacuucaauuucaacggccugaccggcaccggcgugcugaccgagagcaacaagaaguuccugcccuuccagcaguucggccgggauaucgccgacaccaccgacgccgugcgggacccccagacccuggagauccuggacaucaccccaugcagcuucggcggcgucagcgugaucacccccggcacaaacaccagcaaccagguggcagugcuguaccagggagugaacugcaccgaggugcccguggccauccacgccgaccagcugacccccaccuggcggguguacagcaccggcagcaacguguuccagacccgggccggcugccugaucggcgccgagcacgugaacaacuccuacgagugcgacauccccaucggcgccggcaucugcgcuagcuaccagacccagaccaacagcccccggcgggcccggagcguggccagccagagcaucaucgccuacaccaugagcuuaggcgccgagaacagcguggccuacagcaacaacagcaucgccaucccuaccaacuucaccaucagcgugaccaccgagauacugcccgugagcaugaccaagaccagcguggacuguaccauguacaucugcggcgacagcaccgagugcagcaaccugcugcugcaguacggcagcuucugcacccagcugaaccgggcgcugaccggcaucgccguggagcaggacaagaacacccaagagguguucgcccaggugaagcagaucuacaagacucccccaaucaaggacuucggcggcuucaacuucagccagauccugcccgaccccagcaagcccagcaagcggagcuucaucgaggaccugcuguucaacaaggugacccuggccgacgccggcuucaucaagcaguacggcgacugccugggggauaucgccgcccgggaccugaucugcgcucagaaguucaacggccugaccgugcugcccccucugcugaccgacgagaugaucgcccaguacaccagcgcccugcuugccggcaccaucaccagcggcuggaccuucggcgccggcgccgcacugcagauccccuucgccaugcagauggccuaccgguucaacggcaucggcgugacccagaacgugcuguacgagaaccagaagcugaucgccaaccaguucaacagcgccaucggcaagauccaggacagccugagcagcaccgccagcgcccugggcaagcugcaggacguggugaaccagaacgcccaggcucugaacacccuggugaagcagcugagcagcaacuucggcgccaucagcucagugcugaaugacauccugagcaggcuggaucccccagaggccgaggugcagaucgaccggcugaucaccggccggcugcagagccugcagaccuacgugacccagcagcugauccgggccgccgagauccgggccagcgccaaccuggccgcaaccaagaugagcgagugcgugcugggccagagcaagcggguggacuuuugcggcaagggcuaccaccugaugagcuucccccagagcgcuccccacggcgugguguuccuccacgucacauacgugcccgcccaggagaagaacuucaccaccgcccccgccauuugccacgacggcaaggcccacuucccccgggagggaguguucgugagcaacggcacccacugguucgugacccagcggaacuucuacgagccucagaucaucaccaccgacaacaccuucgugagcggcaacugcgacguggugaucggcaucgugaacaacaccguguacgacccccugcagcccgagcuggacagcuucaaggaggagcuggacaaguacuucaagaaccacaccagcccagacguggaccugggcgacaucagcggcaucaacgccagcguggugaacauccagaaggagaucgaccggcugaacgagguggccaagaaccugaacgagagccugaucgaccugcaggagcugggcaaguacgagcaguacaucaaguggcccugguacaucuggcugggcuucaucgccggccugaucgccaucgugauggugaccaucaugcugugcugcaugaccagcugcuguagcugccugaagggcugcugcagcugcggcagcugcugcaaguucgacgaggacgacagcgagcccgugcugaagggcgugaagcugcacuacaccugaggacuaguuauaagacugacuagcccgaugggccucccaacgggcccuccuccccuccuugcaccgagauuaauaaaaaaaaaaaaaaaaaaaaaaaaaaaaaaaaaaaaaaaaaaaaaaaaaaaaaaaaaaaaaaaaugcaucccccccccccccccccccccccccccccccaaaggcucuuuucagagccaccagaauu

SEQ ID NO: 23354 - RNA, 4039 nt, Artificial Sequence
  SARS-CoV-2/Wuhan/WIV05/2019__EPI_ISL_402128 spike protein mRNA gc (1-1273)(K986P_V987P_N439K_D614G)
aggagaaagcuuaccauguucguguuccuggugcugcugccccuggugagcagccagugcgugaaccugaccacccggacccagcugcccccugccuacaccaacagcuucacccggggcguguacuaccccgacaagguguuccggagcagcgugcugcacagcacccaggaccuguuccugcccuucuucagcaacgugaccugguuccacgccauccacgugagcggcaccaacggcaccaagcgguucgacaacccagugcugcccuucaacgacggcguguacuucgccagcaccgagaagucaaacaucauccggggcuggaucuucggcaccacccuggacagcaagacacagagccugcugaucgugaacaacgccaccaacguggugaucaaggugugcgaguuucaguucugcaacgaccccuuccugggcguguacuaccacaagaacaacaagagcuggauggagagcgaguuccgggucuacagcagcgcuaacaauugcaccuucgaguacgugagccagcccuuccugauggaccucgagggcaagcagggcaacuucaagaaccugcgggaguucguguucaagaacaucgauggcuacuucaagaucuacagcaagcacacccccaucaaccuggugcgggaccugccccagggauucagcgcccuggagccucugguggaccugcccaucggcaucaacaucaccagguuccagacccugcuggcccugcaccggagcuaccugacccccggcgacagcagcagcggcuggaccgccggcgccgccgcauacuacgugggcuaccugcagccacggaccuuccugcugaaguacaacgagaacggcaccaucaccgacgccguggacugcgcccuggacccccugagcgagaccaagugcacccuaaagagcuucaccguggagaagggcaucuaccagaccagcaacuuccgggugcagcccacugagagcaucgugcgguuccccaacauuaccaaccugugucccuucggcgagguguucaacgccacccgguucgccagcguguacgccuggaaccggaagcggaucagcaacugcguggccgacuacagcgugcuguacaacagcgccagcuucagcaccuucaagugcuacggcgugagcccuaccaagcugaacgaccugugcuucaccaacguguacgcugacagcuucgugauccggggcgacgaggugcggcagaucgcccccggccagaccggcaagaucgccgacuacaacuacaagcugcccgacgacuucaccggcugcgugaucgccuggaacagcaagaaccuggacagcaaggugggcggcaacuacaacuaccuguaccggcuguuccguaagagcaaccugaagccauucgagcgggacaucagcaccgagaucuaccaggccggcagcacccccugcaacgguguggagggcuuuaacugcuacuucccccugcagagcuacggcuuccagcccaccaacggcgugggcuaccagcccuaccgggugguggugcugagcuucgagcugcugcacgcccccgccaccgugugcggcccuaaaaagagcaccaaccuggugaagaacaagugcgugaacuucaacuucaauggccugaccggcaccggcgugcugaccgagagcaacaagaaguuccugcccuuccagcaguucggccgggauaucgccgacaccaccgacgcagugcgggacccccagacccuggagauccuggacaucaccccaugcagcuucggcggcgugagcgucaucacccccggcacaaacaccagcaaccagguggccgugcuguaccagggagugaacugcaccgaggugcccguggccauccacgccgaccagcugacccccaccuggcggguguacagcaccggcagcaacguguuccagacccgggccggcugccugaucggcgccgagcacgugaacaacuccuacgagugcgacauccccaucggcgcuggcaucugcgccagcuaccagacccagaccaacagcccccggcgggcccggagcguggccagccagagcaucaucgccuacaccaugagcuuaggcgccgagaacagcguggccuacagcaacaacagcaucgcgaucccuaccaacuucaccaucagcgugaccaccgagauacugcccgugagcaugaccaagaccagcguggacuguaccauguacaucugcggcgacagcaccgagugcagcaaccugcugcugcaguacggcagcuucugcacccagcugaaccgggcccugaccggcaucgccguggagcaggacaagaacacccaagagguguucgcccaggugaagcagaucuacaagacucccccaaucaaggacuucggcggcuucaacuucagccagauccugcccgaccccagcaagcccagcaagcggagcuucaucgaggaccugcuguucaacaaggugacccuggccgacgccggcuucaucaagcaguacggcgacugccugggggauaucgccgcucgggaccugaucugcgcccagaaguucaacggccugaccgugcugcccccucugcugaccgacgagaugaucgcccaguacaccagcgcccugcuugccggcaccaucaccagcggcuggaccuucggcgccggcgcagcccugcagauccccuucgccaugcagauggccuaccgguucaacggcaucggcgugacccagaacgugcuguacgagaaccagaagcugaucgccaaccaguucaacagcgccaucggcaagauccaggacagccugagcagcaccgccagcgcccugggcaagcugcaggacguggugaaccagaacgcucaggcccugaacacccuggugaagcagcugagcagcaacuucggcgccaucagcucagugcugaacgacauccugagcaggcuggaucccccagaggccgaggugcagaucgaccggcugaucaccggccggcugcagagccugcagaccuacgugacccagcagcugauccgggccgccgagauccgggccagcgccaaucuggcagccaccaagaugagcgagugcgugcugggccagagcaagcggguggacuuuugcggcaagggcuaccaccugaugagcuucccccagagcgcuccccacggcgugguguuccuccacgugacauacguccccgcccaggagaagaacuucaccaccgcccccgccauuugccacgacggcaaggcccacuucccccgggagggaguguucgugagcaacggcacccacugguucgugacccagcggaacuucuacgagccucagaucaucaccaccgacaacaccuucgugagcggcaacugcgacguggugaucggcaucgugaacaacaccguguacgacccccugcagcccgagcuggacagcuucaaggaggagcuggacaaguacuucaagaaccacaccagcccagacguggaccugggcgacaucagcggcaucaacgccagcguggugaacauccagaaggagaucgaccggcugaacgagguggccaagaaccugaacgagagccugaucgaccugcaggagcugggcaaguacgagcaguacaucaaguggcccugguacaucuggcugggcuucaucgccggccugaucgccaucgugauggugaccaucaugcugugcugcaugaccagcugcuguagcugccugaagggcugcugcagcugcggcagcugcugcaaguucgacgaggacgacagcgagcccgugcugaagggcgugaagcugcacuacaccugaggacuaguuauaagacugacuagcccgaugggccucccaacgggcccuccuccccuccuugcaccgagauuaauaaaaaaaaaaaaaaaaaaaaaaaaaaaaaaaaaaaaaaaaaaaaaaaaaaaaaaaaaaaaaaaaugcaucccccccccccccccccccccccccccccccaaaggcucuuuucagagccaccagaauu

SEQ ID NO: 23355 - RNA, 4039 nt, Artificial Sequence
  SARS-CoV-2/Wuhan/WIV05/2019__EPI_ISL_402128 spike protein mRNA gc (1-1273)(K986P_V987P_S477N_D614G)
aggagaaagcuuaccauguucguguuccuggugcugcugccccuggugagcagccagugcgugaaccugaccacccggacccagcugcccccugccuacaccaacagcuucacccggggcguguacuaccccgacaagguguuccggagcagcgugcugcacagcacccaggaccuguuccugcccuucuucagcaacgugaccugguuccacgccauccacgugagcggcaccaacggcaccaagcgguucgacaacccagugcugcccuucaacgacggcguguacuucgccagcaccgagaagucaaacaucauccggggcuggaucuucggcaccacccuggacagcaagacacagagccugcugaucgugaacaacgccaccaacguggugaucaaggugugcgaguuucaguucugcaacgaccccuuccugggcguguacuaccacaagaacaacaagagcuggauggagagcgaguuccgggucuacagcagcgcuaacaauugcaccuucgaguacgugagccagcccuuccugauggaccucgagggcaagcagggcaacuucaagaaccugcgggaguucguguucaagaacaucgauggcuacuucaagaucuacagcaagcacacccccaucaaccuggugcgggaccugccccagggauucagcgcccuggagccucugguggaccugcccaucggcaucaacaucaccagguuccagacccugcuggcccugcaccggagcuaccugacccccggcgacagcagcagcggcuggaccgccggcgccgccgcauacuacgugggcuaccugcagccacggaccuuccugcugaaguacaacgagaacggcaccaucaccgacgccguggacugcgcccuggacccccugagcgagaccaagugcacccuaaagagcuucaccguggagaagggcaucuaccagaccagcaacuuccgggugcagcccacugagagcaucgugcgguuccccaacauuaccaaccugugucccuucggcgagguguucaacgccacccgguucgccagcguguacgccuggaaccggaagcggaucagcaacugcguggccgacuacagcgugcuguacaacagcgccagcuucagcaccuucaagugcuacggcgugagcccuaccaagcugaacgaccugugcuucaccaacguguacgcugacagcuucgugauccggggcgacgaggugcggcagaucgcccccggccagaccggcaagaucgccgacuacaacuacaagcugcccgacgacuucaccggcugcgugaucgccuggaacagcaacaaccuggacagcaaggugggcggcaacuacaacuaccuguaccggcuguuccguaagagcaaccugaagccauucgagcgggacaucagcaccgagaucuaccaggccggcaacacccccugcaacgguguggagggcuuuaacugcuacuucccccugcagagcuacggcuuccagcccaccaacggcgugggcuaccagcccuaccgggugguggugcugagcuucgagcugcugcacgcccccgccaccgugugcggcccuaaaaagagcaccaaccuggugaagaacaagugcgugaauuucaacuucaacggccugaccggcaccggcgugcugaccgagagcaacaagaaguuccugcccuuccagcaguucggccgggauaucgccgacaccaccgacgcagugcgggacccccagacccuggagauccuggacaucaccccaugcagcuucggcggcgugagcgucaucacccccggcacaaacaccagcaaccagguggccgugcuguaccagggagugaacugcaccgaggugcccguggccauccacgccgaccagcugacccccaccuggcggguguacagcaccggcagcaacguguuccagacccgggccggcugccugaucggcgccgagcacgugaacaacagcuacgagugcgacauccccaucggcgcuggcaucugcgccuccuaccagacccagaccaacagcccccggcgggcccggagcguggccagccagagcaucaucgccuacaccaugagcuuaggcgccgagaacagcguggccuacagcaacaacagcaucgcgaucccuaccaacuucaccaucagcgugaccaccgagauacugcccgugagcaugaccaagaccagcguggacuguaccauguacaucugcggcgacagcaccgagugcagcaaccugcugcugcaguacggcagcuucugcacccagcugaaccgggcccugaccggcaucgccguggagcaggacaagaacacccaagagguguucgcccaggugaagcagaucuacaagacucccccaaucaaggacuucggcggcuucaacuucagccagauccugcccgaccccagcaagcccagcaagcggagcuucaucgaggaccugcuguucaacaaggugacccuggccgacgccggcuucaucaagcaguacggcgacugccugggggauaucgccgcucgggaccugaucugcgcccagaaguucaacggccugaccgugcugcccccucugcugaccgacgagaugaucgcccaguacaccagcgcccugcuugccggcaccaucaccagcggcuggaccuucggcgccggcgcagcccugcagauccccuucgccaugcagauggccuaccgguucaacggcaucggcgugacccagaacgugcuguacgagaaccagaagcugaucgccaaccaguucaacagcgccaucggcaagauccaggacagccugagcagcaccgccagcgcccugggcaagcugcaggacguggugaaccagaacgcucaggcccugaacacccuggugaagcagcugagcagcaauuucggcgccaucagcagcgugcugaacgacauccugucaaggcuggaucccccagaggccgaggugcagaucgaccggcugaucaccggccggcugcagagccugcagaccuacgugacccagcagcugauccgggccgccgagauccgggccagcgccaaccuggcagccaccaagaugagcgagugcgugcugggccagagcaagcggguggacuuuugcggcaagggcuaccaccugaugagcuucccccagagcgcuccccacggcgugguguuccuccacgugacauacguccccgcccaggagaagaacuucaccaccgcccccgccauuugccacgacggcaaggcccacuucccccgggagggaguguucgugagcaacggcacccacugguucgugacccagcggaacuucuacgagccucagaucaucaccaccgacaacaccuucgugagcggcaacugcgacguggugaucggcaucgugaacaacaccguguacgacccccugcagcccgagcuggacagcuucaaggaggagcuggacaaguacuucaagaaccacaccagcccagacguggaccugggcgacaucagcggcaucaacgccagcguggugaacauccagaaggagaucgaccggcugaacgagguggccaagaaccugaacgagagccugaucgaccugcaggagcugggcaaguacgagcaguacaucaaguggcccugguacaucuggcugggcuucaucgccggccugaucgccaucgugauggugaccaucaugcugugcugcaugaccagcugcuguagcugccugaagggcugcugcagcugcggcagcugcugcaaguucgacgaggacgacagcgagcccgugcugaagggcgugaagcugcacuacaccugaggacuaguuauaagacugacuagcccgaugggccucccaacgggcccuccuccccuccuugcaccgagauuaauaaaaaaaaaaaaaaaaaaaaaaaaaaaaaaaaaaaaaaaaaaaaaaaaaaaaaaaaaaaaaaaaugcaucccccccccccccccccccccccccccccccaaaggcucuuuucagagccaccagaauu

SEQ ID NO: 23356 - RNA, 4039 nt, Artificial Sequence
  SARS-CoV-2/Wuhan/WIV05/2019__EPI_ISL_402128 spike protein mRNA gc (1-1273)(K986P_V987P_N501Y_D614G)
aggagaaagcuuaccauguucguguuccuggugcugcugccccuggugagcagccagugcgugaaccugaccacccggacccagcugcccccugccuacaccaacagcuucacccggggcguguacuaccccgacaagguguuccggagcagcgugcugcacagcacccaggaccuguuccugcccuucuucagcaacgugaccugguuccacgccauccacgugagcggcaccaacggcaccaagcgguucgacaacccagugcugcccuucaacgacggcguguacuucgccagcaccgagaagucaaacaucauccggggcuggaucuucggcaccacccuggacagcaagacacagagccugcugaucgugaacaacgccaccaacguggugaucaaggugugcgaguuucaguucugcaacgaccccuuccugggcguguacuaccacaagaacaacaagagcuggauggagagcgaguuccgggucuacagcagcgcuaacaauugcaccuucgaguacgugagccagcccuuccugauggaccucgagggcaagcagggcaacuucaagaaccugcgggaguucguguucaagaacaucgauggcuacuucaagaucuacagcaagcacacccccaucaaccuggugcgggaccugccccagggauucagcgcccuggagccucugguggaccugcccaucggcaucaacaucaccagguuccagacccugcuggcccugcaccggagcuaccugacccccggcgacagcagcagcggcuggaccgccggcgccgccgcauacuacgugggcuaccugcagccacggaccuuccugcugaaguacaacgagaacggcaccaucaccgacgccguggacugcgcccuggacccccugagcgagaccaagugcacccuaaagagcuucaccguggagaagggcaucuaccagaccagcaacuuccgggugcagcccacugagagcaucgugcgguuccccaacauuaccaaccugugucccuucggcgagguguucaacgccacccgguucgccagcguguacgccuggaaccggaagcggaucagcaacugcguggccgacuacagcgugcuguacaacagcgccagcuucagcaccuucaagugcuacggcgugagcccuaccaagcugaacgaccugugcuucaccaacguguacgcugacagcuucgugauccggggcgacgaggugcggcagaucgcccccggccagaccggcaagaucgccgacuacaacuacaagcugcccgacgacuucaccggcugcgugaucgccuggaacagcaacaaccuggacagcaaggugggcggcaacuacaacuaccuguaccggcuguuccguaagagcaaccugaagccauucgagcgggacaucagcaccgagaucuaccaggccggcagcacccccugcaacgguguggagggcuuuaacugcuacuucccccugcagagcuacggcuuccagcccaccuacggcgugggcuaccagcccuaccgggugguggugcugagcuucgagcugcugcacgcccccgccaccgugugcggcccuaaaaagagcaccaaccuggugaagaacaagugcgugaacuucaacuucaauggccugaccggcaccggcgugcugaccgagagcaacaagaaguuccugcccuuccagcaguucggccgggauaucgccgacaccaccgacgcagugcgggacccccagacccuggagauccuggacaucaccccaugcagcuucggcggcgugagcgucaucacccccggcacaaacaccagcaaccagguggccgugcuguaccagggagugaacugcaccgaggugcccguggccauccacgccgaccagcugacccccaccuggcggguguacagcaccggcagcaacguguuccagacccgggccggcugccugaucggcgccgagcacgugaacaacuccuacgagugcgacauccccaucggcgcuggcaucugcgccagcuaccagacccagaccaacagcccccggcgggcccggagcguggccagccagagcaucaucgccuacaccaugagcuuaggcgccgagaacagcguggccuacagcaacaacagcaucgcgaucccuaccaacuucaccaucagcgugaccaccgagauacugcccgugagcaugaccaagaccagcguggacuguaccauguacaucugcggcgacagcaccgagugcagcaaccugcugcugcaguacggcagcuucugcacccagcugaaccgggcccugaccggcaucgccguggagcaggacaagaacacccaagagguguucgcccaggugaagcagaucuacaagacucccccaaucaaggacuucggcggcuucaacuucagccagauccugcccgaccccagcaagcccagcaagcggagcuucaucgaggaccugcuguucaacaaggugacccuggccgacgccggcuucaucaagcaguacggcgacugccugggggauaucgccgcucgggaccugaucugcgcccagaaguucaacggccugaccgugcugcccccucugcugaccgacgagaugaucgcccaguacaccagcgcccugcuugccggcaccaucaccagcggcuggaccuucggcgccggcgcagcccugcagauccccuucgccaugcagauggccuaccgguucaacggcaucggcgugacccagaacgugcuguacgagaaccagaagcugaucgccaaccaguucaacagcgccaucggcaagauccaggacagccugagcagcaccgccagcgcccugggcaagcugcaggacguggugaaccagaacgcucaggcccugaacacccuggugaagcagcugagcagcaacuucggcgccaucagcucagugcugaacgacauccugagcaggcuggaucccccagaggccgaggugcagaucgaccggcugaucaccggccggcugcagagccugcagaccuacgugacccagcagcugauccgggccgccgagauccgggccagcgccaaucuggcagccaccaagaugagcgagugcgugcugggccagagcaagcggguggacuuuugcggcaagggcuaccaccugaugagcuucccccagagcgcuccccacggcgugguguuccuccacgugacauacguccccgcccaggagaagaacuucaccaccgcccccgccauuugccacgacggcaaggcccacuucccccgggagggaguguucgugagcaacggcacccacugguucgugacccagcggaacuucuacgagccucagaucaucaccaccgacaacaccuucgugagcggcaacugcgacguggugaucggcaucgugaacaacaccguguacgacccccugcagcccgagcuggacagcuucaaggaggagcuggacaaguacuucaagaaccacaccagcccagacguggaccugggcgacaucagcggcaucaacgccagcguggugaacauccagaaggagaucgaccggcugaacgagguggccaagaaccugaacgagagccugaucgaccugcaggagcugggcaaguacgagcaguacaucaaguggcccugguacaucuggcugggcuucaucgccggccugaucgccaucgugauggugaccaucaugcugugcugcaugaccagcugcuguagcugccugaagggcugcugcagcugcggcagcugcugcaaguucgacgaggacgacagcgagcccgugcugaagggcgugaagcugcacuacaccugaggacuaguuauaagacugacuagcccgaugggccucccaacgggcccuccuccccuccuugcaccgagauuaauaaaaaaaaaaaaaaaaaaaaaaaaaaaaaaaaaaaaaaaaaaaaaaaaaaaaaaaaaaaaaaaaugcaucccccccccccccccccccccccccccccccaaaggcucuuuucagagccaccagaauu

SEQ ID NO: 23357 - RNA, 4033 nt, Artificial Sequence
  SARS-CoV-2/Wuhan/WIV05/2019__EPI_ISL_402128 spike protein mRNA gc (1-1273)(K986P_V987P_H69del_V70del_D614G)
aggagaaagcuuaccauguucguguuccuggugcugcugccccuggugagcagccagugcgugaaccugaccacccggacccagcugcccccugccuacaccaacagcuucacccggggcguguacuaccccgacaagguguuccggagcagcgugcugcacagcacccaggaccuguuccugcccuucuucagcaacgugaccugguuccacgccaucagcggcaccaacggcaccaagcgguucgacaacccagugcugcccuucaacgacggcguguacuucgccagcaccgagaagucaaacaucauccggggcuggaucuucggcaccacccuggacagcaagacacagagccugcugaucgugaacaacgccaccaacguggugaucaaggugugcgaguuucaguucugcaacgaccccuuccugggcguguacuaccacaagaacaacaagagcuggauggagagcgaguuccggguguacagcagcgcuaacaauugcaccuucgaguacgucagccagcccuuccugauggaccucgagggcaagcagggcaacuucaagaaccugcgggaguucguguucaagaacaucgauggcuacuucaagaucuacagcaagcacacccccaucaaccuggugcgggaccugccccagggauucagcgcccuggagccucugguggaccugcccaucggcaucaacaucaccagguuccagacccugcuggcccugcaccggagcuaccugacccccggcgacagcagcagcggcuggaccgccggcgccgccgcauacuacgugggcuaccugcagccacggaccuuccugcugaaguacaacgagaacggcaccaucaccgacgccguggacugcgcccuggacccccugagcgagaccaagugcacccuaaagagcuucaccguggagaagggcaucuaccagaccagcaacuuccgggugcagcccacugagagcaucgugcgguuccccaacauuaccaaccugugucccuucggcgagguguucaacgccacccgguucgccagcguguacgccuggaaccggaagcggaucagcaacugcguggccgacuacagcgugcuguacaacagcgccagcuucagcaccuucaagugcuacggcgugagcccuaccaagcugaacgaccugugcuucaccaacguguacgcugacagcuucgugauccggggcgacgaggugcggcagaucgcccccggccagaccggcaagaucgccgacuacaacuacaagcugcccgacgacuucaccggcugcgugaucgccuggaacagcaacaaccuggacagcaaggugggcggcaacuacaacuaccuguaccggcuguuccguaagagcaaccugaagccauucgagcgggacaucagcaccgagaucuaccaggccggcagcacccccugcaacgguguggagggcuuuaacugcuacuucccccugcagagcuacggcuuccagcccaccaacggcgugggcuaccagcccuaccgggugguggugcugagcuucgagcugcugcacgcccccgccaccgugugcggcccuaaaaagagcaccaaccuggugaagaacaagugcgugaacuucaauuucaacggccugaccggcaccggcgugcugaccgagagcaacaagaaguuccugcccuuccagcaguucggccgggauaucgccgacaccaccgacgcagugcgggacccccagacccuggagauccuggacaucaccccaugcagcuucggcggcgugagcgugaucacccccggcacaaacaccagcaaccaggucgccgugcuguaccagggagugaacugcaccgaggugcccguggccauccacgccgaccagcugacccccaccuggcggguguacagcaccggcagcaacguguuccagacccgggccggcugccugaucggcgccgagcacgugaacaacuccuacgagugcgacauccccaucggcgcuggcaucugcgccagcuaccagacccagaccaacagcccccggcgggcccggagcguggccagccagagcaucaucgccuacaccaugagcuuaggcgccgagaacagcguggccuacagcaacaacagcaucgcgaucccuaccaacuucaccaucagcgugaccaccgagauacugcccgugagcaugaccaagaccagcguggacuguaccauguacaucugcggcgacagcaccgagugcagcaaccugcugcugcaguacggcagcuucugcacccagcugaaccgggcccugaccggcaucgccguggagcaggacaagaacacccaagagguguucgcccaggugaagcagaucuacaagacucccccaaucaaggacuucggcggcuucaacuucagccagauccugcccgaccccagcaagcccagcaagcggagcuucaucgaggaccugcuguucaacaaggugacccuggccgacgccggcuucaucaagcaguacggcgacugccugggggauaucgccgcucgggaccugaucugcgcccagaaguucaacggccugaccgugcugcccccucugcugaccgacgagaugaucgcccaguacaccagcgcccugcuugccggcaccaucaccagcggcuggaccuucggcgccggcgcagcccugcagauccccuucgccaugcagauggccuaccgguucaacggcaucggcgugacccagaacgugcuguacgagaaccagaagcugaucgccaaccaguucaacagcgccaucggcaagauccaggacagccugagcagcaccgccagcgcccugggcaagcugcaggacguggugaaccagaacgcucaggcccugaacacccuggugaagcagcugagcagcaacuucggcgccaucagcucagugcugaaugacauccugagcaggcuggaucccccagaggccgaggugcagaucgaccggcugaucaccggccggcugcagagccugcagaccuacgugacccagcagcugauccgggccgccgagauccgggccagcgccaaccuggcagccaccaagaugagcgagugcgugcugggccagagcaagcggguggacuuuugcggcaagggcuaccaccugaugagcuucccccagagcgcuccccacggcgugguguuccuccacgugacauacgugcccgcccaggagaagaacuucaccaccgcccccgccauuugccacgacggcaaggcccacuucccccgggagggagucuucgugagcaacggcacccacugguucgugacccagcggaacuucuacgagccucagaucaucaccaccgacaacaccuucgugagcggcaacugcgacguggugaucggcaucgugaacaacaccguguacgacccccugcagcccgagcuggacagcuucaaggaggagcuggacaaguacuucaagaaccacaccagcccagacguggaccugggcgacaucagcggcaucaacgccagcguggugaacauccagaaggagaucgaccggcugaacgagguggccaagaaccugaacgagagccugaucgaccugcaggagcugggcaaguacgagcaguacaucaaguggcccugguacaucuggcugggcuucaucgccggccugaucgccaucgugauggugaccaucaugcugugcugcaugaccagcugcuguagcugccugaagggcugcugcagcugcggcagcugcugcaaguucgacgaggacgacagcgagcccgugcugaagggcgugaagcugcacuacaccugaggacuaguuauaagacugacuagcccgaugggccucccaacgggcccuccuccccuccuugcaccgagauuaauaaaaaaaaaaaaaaaaaaaaaaaaaaaaaaaaaaaaaaaaaaaaaaaaaaaaaaaaaaaaaaaaugcaucccccccccccccccccccccccccccccccaaaggcucuuuucagagccaccagaauu

SEQ ID NO: 23358 - RNA, 4039 nt, Artificial Sequence
  SARS-CoV-2/Wuhan/WIV05/2019__EPI_ISL_402128 spike protein mRNA gc (1-1273)(K986P_V987P_Y453F_D614G)
aggagaaagcuuaccauguucguguuccuggugcugcugccccuggugagcagccagugcgugaaccugaccacccggacccagcugcccccugccuacaccaacagcuucacccggggcguguacuaccccgacaagguguuccggagcagcgugcugcacagcacccaggaccuguuccugcccuucuucagcaacgugaccugguuccacgccauccacgugagcggcaccaacggcaccaagcgguucgacaacccagugcugcccuucaacgacggcguguacuucgccagcaccgagaagucaaacaucauccggggcuggaucuucggcaccacccuggacagcaagacacagagccugcugaucgugaacaacgccaccaacguggugaucaaggugugcgaguuucaguucugcaacgaccccuuccugggcguguacuaccacaagaacaacaagagcuggauggagagcgaguuccgggucuacagcagcgcuaacaauugcaccuucgaguacgugagccagcccuuccugauggaccucgagggcaagcagggcaacuucaagaaccugcgggaguucguguucaagaacaucgauggcuacuucaagaucuacagcaagcacacccccaucaaccuggugcgggaccugccccagggauucagcgcccuggagccucugguggaccugcccaucggcaucaacaucaccagguuccagacccugcuggcccugcaccggagcuaccugacccccggcgacagcagcagcggcuggaccgccggcgccgccgcauacuacgugggcuaccugcagccacggaccuuccugcugaaguacaacgagaacggcaccaucaccgacgccguggacugcgcccuggacccccugagcgagaccaagugcacccuaaagagcuucaccguggagaagggcaucuaccagaccagcaacuuccgggugcagcccacugagagcaucgugcgguuccccaacauuaccaaccugugucccuucggcgagguguucaacgccacccgguucgccagcguguacgccuggaaccggaagcggaucagcaacugcguggccgacuacagcgugcuguacaacagcgccagcuucagcaccuucaagugcuacggcgugagcccuaccaagcugaacgaccugugcuucaccaacguguacgcugacagcuucgugauccggggcgacgaggugcggcagaucgcccccggccagaccggcaagaucgccgacuacaacuacaagcugcccgacgacuucaccggcugcgugaucgccuggaacagcaacaaccuggacagcaaggugggcggcaacuacaacuaccuguuccggcuguuccguaagagcaaccugaagccauuugagcgggacaucagcaccgagaucuaccaggccggcagcacccccugcaacgguguggagggcuucaacugcuacuucccccugcagagcuacggcuuccagcccaccaacggcgugggcuaccagcccuaccgggugguggugcugagcuucgagcugcugcacgcccccgccaccgugugcggcccuaaaaagagcaccaaccuggugaagaacaagugcgugaacuucaauuucaacggccugaccggcaccggcgugcugaccgagagcaacaagaaguuccugcccuuccagcaguucggccgggauaucgccgacaccaccgacgcagugcgggacccccagacccuggagauccuggacaucaccccaugcagcuucggcggcgugagcgucaucacccccggcacaaacaccagcaaccagguggccgugcuguaccagggagugaacugcaccgaggugcccguggccauccacgccgaccagcugacccccaccuggcggguguacagcaccggcagcaacguguuccagacccgggccggcugccugaucggcgccgagcacgugaacaacuccuacgagugcgacauccccaucggcgcuggcaucugcgccagcuaccagacccagaccaacagcccccggcgggcccggagcguggccagccagagcaucaucgccuacaccaugagcuuaggcgccgagaacagcguggccuacagcaacaacagcaucgcgaucccuaccaacuucaccaucagcgugaccaccgagauacugcccgugagcaugaccaagaccagcguggacuguaccauguacaucugcggcgacagcaccgagugcagcaaccugcugcugcaguacggcagcuucugcacccagcugaaccgggcccugaccggcaucgccguggagcaggacaagaacacccaagagguguucgcccaggugaagcagaucuacaagacucccccaaucaaggacuucggcggcuucaacuucagccagauccugcccgaccccagcaagcccagcaagcggagcuucaucgaggaccugcuguucaacaaggugacccuggccgacgccggcuucaucaagcaguacggcgacugccugggggauaucgccgcucgggaccugaucugcgcccagaaguucaacggccugaccgugcugcccccucugcugaccgacgagaugaucgcccaguacaccagcgcccugcuugccggcaccaucaccagcggcuggaccuucggcgccggcgcagcccugcagauccccuucgccaugcagauggccuaccgguucaacggcaucggcgugacccagaacgugcuguacgagaaccagaagcugaucgccaaccaguucaacagcgccaucggcaagauccaggacagccugagcagcaccgccagcgcccugggcaagcugcaggacguggugaaccagaacgcucaggcccugaacacccuggugaagcagcugagcagcaacuuuggcgccaucagcucagugcugaaugacauccugagcaggcuggaucccccagaggccgaggugcagaucgaccggcugaucaccggccggcugcagagccugcagaccuacgugacccagcagcugauccgggccgccgagauccgggccagcgccaaccuggcagccaccaagaugagcgagugcgugcugggccagagcaagcggguggacuucugcggcaagggcuaccaccugaugagcuucccccagagcgcuccccacggcgugguguuccuccacgugacauacguccccgcccaggagaagaacuucaccaccgcccccgccauuugccacgacggcaaggcccacuucccccgggagggaguguucgugagcaacggcacccacugguucgugacccagcggaacuucuacgagccucagaucaucaccaccgacaacaccuucgugagcggcaacugcgacguggugaucggcaucgugaacaacaccguguacgacccccugcagcccgagcuggacagcuucaaggaggagcuggacaaguacuucaagaaccacaccagcccagacguggaccugggcgacaucagcggcaucaacgccagcguggugaacauccagaaggagaucgaccggcugaacgagguggccaagaaccugaacgagagccugaucgaccugcaggagcugggcaaguacgagcaguacaucaaguggcccugguacaucuggcugggcuucaucgccggccugaucgccaucgugauggugaccaucaugcugugcugcaugaccagcugcuguagcugccugaagggcugcugcagcugcggcagcugcugcaaguucgacgaggacgacagcgagcccgugcugaagggcgugaagcugcacuacaccugaggacuaguuauaagacugacuagcccgaugggccucccaacgggcccuccuccccuccuugcaccgagauuaauaaaaaaaaaaaaaaaaaaaaaaaaaaaaaaaaaaaaaaaaaaaaaaaaaaaaaaaaaaaaaaaaugcaucccccccccccccccccccccccccccccccaaaggcucuuuucagagccaccagaauu

SEQ ID NO: 23359 - RNA, 4039 nt, Artificial Sequence
  SARS-CoV-2/Wuhan/WIV05/2019__EPI_ISL_402128 spike protein mRNA gc (1-1273)(K986P_V987P_D614G_I692V)
aggagaaagcuuaccauguucguguuccuggugcugcugccccuggugagcagccagugcgugaaccugaccacccggacccagcugcccccugccuacaccaacagcuucacccggggcguguacuaccccgacaagguguuccggagcagcgugcugcacagcacccaggaccuguuccugcccuucuucagcaacgugaccugguuccacgccauccacgugagcggcaccaacggcaccaagcgguucgacaacccagugcugcccuucaacgacggcguguacuucgccagcaccgagaagucaaacaucauccggggcuggaucuucggcaccacccuggacagcaagacacagagccugcugaucgugaacaacgccaccaacguggugaucaaggugugcgaguuucaguucugcaacgaccccuuccugggcguguacuaccacaagaacaacaagagcuggauggagagcgaguuccgggucuacagcagcgcuaacaauugcaccuucgaguacgugagccagcccuuccugauggaccucgagggcaagcagggcaacuucaagaaccugcgggaguucguguucaagaacaucgauggcuacuucaagaucuacagcaagcacacccccaucaaccuggugcgggaccugccccagggauucagcgcccuggagccucugguggaccugcccaucggcaucaacaucaccagguuccagacccugcuggcccugcaccggagcuaccugacccccggcgacagcagcagcggcuggaccgccggcgccgccgcauacuacgugggcuaccugcagccacggaccuuccugcugaaguacaacgagaacggcaccaucaccgacgccguggacugcgcccuggacccccugagcgagaccaagugcacccuaaagagcuucaccguggagaagggcaucuaccagaccagcaacuuccgggugcagcccacugagagcaucgugcgguuccccaacauuaccaaccugugucccuucggcgagguguucaacgccacccgguucgccagcguguacgccuggaaccggaagcggaucagcaacugcguggccgacuacagcgugcuguacaacagcgccagcuucagcaccuucaagugcuacggcgugagcccuaccaagcugaacgaccugugcuucaccaacguguacgcugacagcuucgugauccggggcgacgaggugcggcagaucgcccccggccagaccggcaagaucgccgacuacaacuacaagcugcccgacgacuucaccggcugcgugaucgccuggaacagcaacaaccuggacagcaaggugggcggcaacuacaacuaccuguaccggcuguuccguaagagcaaccugaagccauucgagcgggacaucagcaccgagaucuaccaggccggcagcacccccugcaacgguguggagggcuuuaacugcuacuucccccugcagagcuacggcuuccagcccaccaacggcgugggcuaccagcccuaccgggugguggugcugagcuucgagcugcugcacgcccccgccaccgugugcggcccuaaaaagagcaccaaccuggugaagaacaagugcgugaacuucaauuucaacggccugaccggcaccggcgugcugaccgagagcaacaagaaguuccugcccuuccagcaguucggccgggauaucgccgacaccaccgacgcagugcgggacccccagacccuggagauccuggacaucaccccaugcagcuucggcggcgugagcgucaucacccccggcacaaacaccagcaaccagguggccgugcuguaccagggagugaacugcaccgaggugcccguggccauccacgccgaccagcugacccccaccuggcggguguacagcaccggcagcaacguguuccagacccgggccggcugccugaucggcgccgagcacgugaacaacuccuacgagugcgacauccccaucggcgcuggcaucugcgccagcuaccagacccagaccaacagcccccggcgggcccggagcguggccagccagagcgugaucgccuacaccaugagcuuaggcgccgagaacagcguggccuacagcaacaacagcaucgcgaucccuaccaacuucaccaucagcgugaccaccgagauccugcccgugagcaugaccaagaccagcguggacuguaccauguacauaugcggcgacagcaccgagugcagcaaccugcugcugcaguacggcagcuucugcacccagcugaaccgggcccugaccggcaucgccguggagcaggacaagaacacccaagagguguucgcccaggugaagcagaucuacaagacucccccaaucaaggacuucggcggcuucaacuucagccagauccugcccgaccccagcaagcccagcaagcggagcuucaucgaggaccugcuguucaacaaggugacccuggccgacgccggcuucaucaagcaguacggcgacugccugggggauaucgccgcucgggaccugaucugcgcccagaaguucaacggccugaccgugcugcccccucugcugaccgacgagaugaucgcccaguacaccagcgcccugcuugccggcaccaucaccagcggcuggaccuucggcgccggcgcagcccugcagauccccuucgccaugcagauggccuaccgguucaacggcaucggcgugacccagaacgugcuguacgagaaccagaagcugaucgccaaccaguucaacagcgccaucggcaagauccaggacagccugagcagcaccgccagcgcccugggcaagcugcaggacguggugaaccagaacgcucaggcccugaacacccuggugaagcagcugagcagcaacuucggcgccaucagcucagugcugaaugacauccugagcaggcuggaucccccagaggccgaggugcagaucgaccggcugaucaccggccggcugcagagccugcagaccuacgugacccagcagcugauccgggccgccgagauccgggccagcgccaaccuggcagccaccaagaugagcgagugcgugcugggccagagcaagcggguggacuuuugcggcaagggcuaccaccugaugagcuucccccagagcgcuccccacggcgugguguuccuccacgucacauacgugcccgcccaggagaagaacuucaccaccgcccccgccaucugccacgacggcaaggcccacuucccccgggagggaguguucgugagcaacggcacccacugguucgugacccagcggaacuucuacgagccucagauuaucaccaccgacaacaccuucgugagcggcaacugcgacguggugaucggcaucgugaacaacaccguguacgacccccugcagcccgagcuggacagcuucaaggaggagcuggacaaguacuucaagaaccacaccagcccagacguggaccugggcgacaucagcggcaucaacgccagcguggugaacauccagaaggagaucgaccggcugaacgagguggccaagaaccugaacgagagccugaucgaccugcaggagcugggcaaguacgagcaguacaucaaguggcccugguacaucuggcugggcuucaucgccggccugaucgccaucgugauggugaccaucaugcugugcugcaugaccagcugcuguagcugccugaagggcugcugcagcugcggcagcugcugcaaguucgacgaggacgacagcgagcccgugcugaagggcgugaagcugcacuacaccugaggacuaguuauaagacugacuagcccgaugggccucccaacgggcccuccuccccuccuugcaccgagauuaauaaaaaaaaaaaaaaaaaaaaaaaaaaaaaaaaaaaaaaaaaaaaaaaaaaaaaaaaaaaaaaaaugcaucccccccccccccccccccccccccccccccaaaggcucuuuucagagccaccagaauu

SEQ ID NO: 23360 - RNA, 4039 nt, Artificial Sequence
  SARS-CoV-2/Wuhan/WIV05/2019__EPI_ISL_402128 spike protein mRNA gc (1-1273)(K986P_V987P_D614G_M1229I)
aggagaaagcuuaccauguucguguuccuggugcugcugccccuggugagcagccagugcgugaaccugaccacccggacccagcugcccccugccuacaccaacagcuucacccggggcguguacuaccccgacaagguguuccggagcagcgugcugcacagcacccaggaccuguuccugcccuucuucagcaacgugaccugguuccacgccauccacgugagcggcaccaacggcaccaagcgguucgacaacccagugcugcccuucaacgacggcguguacuucgccagcaccgagaagucaaacaucauccggggcuggaucuucggcaccacccuggacagcaagacacagagccugcugaucgugaacaacgccaccaacguggugaucaaggugugcgaguuucaguucugcaacgaccccuuccugggcguguacuaccacaagaacaacaagagcuggauggagagcgaguuccgggucuacagcagcgcuaacaauugcaccuucgaguacgugagccagcccuuccugauggaccucgagggcaagcagggcaacuucaagaaccugcgggaguucguguucaagaacaucgauggcuacuucaagaucuacagcaagcacacccccaucaaccuggugcgggaccugccccagggauucagcgcccuggagccucugguggaccugcccaucggcaucaacaucaccagguuccagacccugcuggcccugcaccggagcuaccugacccccggcgacagcagcagcggcuggaccgccggcgccgccgcauacuacgugggcuaccugcagccacggaccuuccugcugaaguacaacgagaacggcaccaucaccgacgccguggacugcgcccuggacccccugagcgagaccaagugcacccuaaagagcuucaccguggagaagggcaucuaccagaccagcaacuuccgggugcagcccacugagagcaucgugcgguuccccaacauuaccaaccugugucccuucggcgagguguucaacgccacccgguucgccagcguguacgccuggaaccggaagcggaucagcaacugcguggccgacuacagcgugcuguacaacagcgccagcuucagcaccuucaagugcuacggcgugagcccuaccaagcugaacgaccugugcuucaccaacguguacgcugacagcuucgugauccggggcgacgaggugcggcagaucgcccccggccagaccggcaagaucgccgacuacaacuacaagcugcccgacgacuucaccggcugcgugaucgccuggaacagcaacaaccuggacagcaaggugggcggcaacuacaacuaccuguaccggcuguuccguaagagcaaccugaagccauucgagcgggacaucagcaccgagaucuaccaggccggcagcacccccugcaacgguguggagggcuuuaacugcuacuucccccugcagagcuacggcuuccagcccaccaacggcgugggcuaccagcccuaccgggugguggugcugagcuucgagcugcugcacgcccccgccaccgugugcggcccuaaaaagagcaccaaccuggugaagaacaagugcgugaacuucaauuucaacggccugaccggcaccggcgugcugaccgagagcaacaagaaguuccugcccuuccagcaguucggccgggauaucgccgacaccaccgacgcagugcgggacccccagacccuggagauccuggacaucaccccaugcagcuucggcggcgugagcgucaucacccccggcacaaacaccagcaaccagguggccgugcuguaccagggagugaacugcaccgaggugcccguggccauccacgccgaccagcugacccccaccuggcggguguacagcaccggcagcaacguguuccagacccgggccggcugccugaucggcgccgagcacgugaacaacuccuacgagugcgacauccccaucggcgcuggcaucugcgccagcuaccagacccagaccaacagcccccggcgggcccggagcguggccagccagagcaucaucgccuacaccaugagcuuaggcgccgagaacagcguggccuacagcaacaacagcaucgcgaucccuaccaacuucaccaucagcgugaccaccgagauacugcccgugagcaugaccaagaccagcguggacuguaccauguacaucugcggcgacagcaccgagugcagcaaccugcugcugcaguacggcagcuucugcacccagcugaaccgggcccugaccggcaucgccguggagcaggacaagaacacccaagagguguucgcccaggugaagcagaucuacaagacucccccaaucaaggacuucggcggcuucaacuucagccagauccugcccgaccccagcaagcccagcaagcggagcuucaucgaggaccugcuguucaacaaggugacccuggccgacgccggcuucaucaagcaguacggcgacugccugggggauaucgccgcucgggaccugaucugcgcccagaaguucaacggccugaccgugcugcccccucugcugaccgacgagaugaucgcccaguacaccagcgcccugcuugccggcaccaucaccagcggcuggaccuucggcgccggcgcagcccugcagauccccuucgccaugcagauggccuaccgguucaacggcaucggcgugacccagaacgugcuguacgagaaccagaagcugaucgccaaccaguucaacagcgccaucggcaagauccaggacagccugagcagcaccgccagcgcccugggcaagcugcaggacguggugaaccagaacgcucaggcccugaacacccuggugaagcagcugagcagcaacuucggcgccaucagcucagugcugaaugacauccugagcaggcuggaucccccagaggccgaggugcagaucgaccggcugaucaccggccggcugcagagccugcagaccuacgugacccagcagcugauccgggccgccgagauccgggccagcgccaaccuggcagccaccaagaugagcgagugcgugcugggccagagcaagcggguggacuuuugcggcaagggcuaccaccugaugagcuucccccagagcgcuccccacggcgugguguuccuccacgugacauacguccccgcccaggagaagaacuucaccaccgcccccgccauuugccacgacggcaaggcccacuucccccgggagggaguguucgugagcaacggcacccacugguucgugacccagcggaacuucuacgagccucagaucaucaccaccgacaacaccuucgugagcggcaacugcgacguggugaucggcaucgugaacaacaccguguacgacccccugcagcccgagcuggacagcuucaaggaggagcuggacaaguacuucaagaaccacaccagcccagacguggaccugggcgacaucagcggcaucaacgccagcguggugaacauccagaaggagaucgaccggcugaacgagguggccaagaaccugaacgagagccugaucgaccugcaggagcugggcaaguacgagcaguacaucaaguggcccugguacaucuggcugggcuucaucgccggccugaucgccaucgugaucgugaccaucaugcugugcugcaugaccagcugcuguagcugccugaagggcugcugcagcugcggcagcugcugcaaguucgacgaggacgacagcgagcccgugcugaagggcgugaagcugcacuacaccugaggacuaguuauaagacugacuagcccgaugggccucccaacgggcccuccuccccuccuugcaccgagauuaauaaaaaaaaaaaaaaaaaaaaaaaaaaaaaaaaaaaaaaaaaaaaaaaaaaaaaaaaaaaaaaaaugcaucccccccccccccccccccccccccccccccaaaggcucuuuucagagccaccagaauu

SEQ ID NO: 23361 - RNA, 4033 nt, Artificial Sequence
  SARS-CoV-2/Wuhan/WIV05/2019__EPI_ISL_402128 spike protein mRNA gc (1-1273)(K986P_V987P_H69del_V70del_A222V_Y453F_S477N_D614G_I692V)
aggagaaagcuuaccauguucguguuccuggugcugcugccccuggugagcagccagugcgugaaccugaccacccggacccagcugcccccugccuacaccaacagcuucacccggggcguguacuaccccgacaagguguuccggagcagcgugcugcacagcacccaggaccuguuccugcccuucuucagcaacgugaccugguuccacgccaucagcggcaccaacggcaccaagcgguucgacaacccagugcugcccuucaacgacggcguguacuucgccagcaccgagaagucaaacaucauccggggcuggaucuucggcaccacccuggacagcaagacacagagccugcugaucgugaacaacgccaccaacguggugaucaaggugugcgaguuucaguucugcaacgaccccuuccugggcguguacuaccacaagaacaacaagagcuggauggagagcgaguuccggguguacagcagcgcuaacaauugcaccuucgaguacgucagccagcccuuccugauggaccucgagggcaagcagggcaacuucaagaaccugcgggaguucguguucaagaacaucgauggcuacuucaagaucuacagcaagcacacccccaucaaccuggugcgggaccugccccagggauucagcgugcuggagccucugguggaccugcccaucggcaucaacaucaccagguuccagacccugcuggcccugcaccggagcuaccugacccccggcgacagcagcagcggcuggaccgccggcgccgccgccuacuacgugggcuaccugcagccacggaccuuccugcugaaguacaacgagaacggcaccaucaccgacgcaguggacugcgcccuggacccccugagcgagaccaagugcacccuaaagagcuucaccguggagaagggcaucuaccagaccagcaacuuccgggugcagcccacugagagcaucgugcgguuccccaacauuaccaaccugugucccuucggcgagguguucaacgccacccgguucgccagcguguacgccuggaaccggaagcggaucagcaacugcguggccgacuacagcgugcuguacaacagcgccagcuucagcaccuucaagugcuacggcgugagcccuaccaagcugaacgaccugugcuucaccaacguguacgccgacagcuucgugauccggggcgacgaggugcggcagaucgcucccggccagaccggcaagaucgccgacuacaacuacaagcugcccgacgacuucaccggcugcgugaucgccuggaacagcaacaaccuggacagcaaggugggcggcaacuacaacuaccuguuccggcuguuccguaagagcaaccugaagccauuugagcgggacaucagcaccgagaucuaccaggccggcaacacccccugcaacgguguggagggcuucaacugcuacuucccccugcagagcuacggcuuccagcccaccaacggcgugggcuaccagcccuaccgggugguggugcugagcuucgagcugcugcacgcccccgccaccgugugcggcccuaaaaagagcaccaaccuggugaagaacaagugcgugaauuucaacuucaacggccugaccggcaccggcgugcugaccgagagcaacaagaaguuccugcccuuccagcaguucggccgggauaucgccgacaccaccgacgccgugcgggacccccagacccuggagauccuggacaucaccccaugcagcuucggcggcgugagcgucaucacccccggcacaaacaccagcaaccagguggcagugcuguaccagggagugaacugcaccgaggugcccguggccauccacgccgaccagcugacccccaccuggcggguguacagcaccggcagcaacguguuccagacccgggccggcugccugaucggcgccgagcacgugaacaacagcuacgagugcgacauccccaucggcgccggcaucugcgcuuccuaccagacccagaccaacagcccccggcgggcccggagcguggccagccagagcgugaucgccuacaccaugagcuuaggcgccgagaacagcguggccuacagcaacaacagcaucgccaucccuaccaacuucaccaucagcgugaccaccgagauccugcccgugagcaugaccaagaccagcguggacuguaccauguacauaugcggcgacagcaccgagugcagcaaccugcugcugcaguacggcagcuucugcacccagcugaaccgggcgcugaccggcaucgccguggagcaggacaagaacacccaagagguguucgcccaggugaagcagaucuacaagacucccccaaucaaggacuucggcggcuucaacuucagccagauccugcccgaccccagcaagcccagcaagcggagcuucaucgaggaccugcuguucaacaaggugacccuggccgacgccggcuucaucaagcaguacggcgacugccugggggauaucgccgcccgggaccugaucugcgcucagaaguucaacggccugaccgugcugcccccucugcugaccgacgagaugaucgcccaguacaccagcgcccugcuugccggcaccaucaccagcggcuggaccuucggcgccggcgccgcacugcagauccccuucgccaugcagauggccuaccgguucaacggcaucggcgugacccagaacgugcuguacgagaaccagaagcugaucgccaaccaguucaacagcgccaucggcaagauccaggacagccugagcagcaccgccagcgcccugggcaagcugcaggacguggugaaccagaacgcccaggcucugaacacccuggugaagcagcugagcagcaauuuuggcgccaucagcagcgugcugaacgacauccugucaaggcuggaucccccagaggccgaggugcagaucgaccggcugaucaccggccggcugcagagccugcagaccuacgugacccagcagcugauccgggccgccgagauccgggccagcgccaaccuggccgcaaccaagaugagcgagugcgugcugggccagagcaagcggguggacuucugcggcaagggcuaccaccugaugagcuucccccagagcgcuccccacggcgugguguuccuccacgucacauacgugcccgcccaggagaagaacuucaccaccgcccccgccaucugccacgacggcaaggcccacuucccccgggagggaguguucgugagcaacggcacccacugguucgugacccagcggaacuucuacgagccucagauuaucaccaccgacaacaccuucgugagcggcaacugcgacguggugaucggcaucgugaacaacaccguguacgacccccugcagcccgagcuggacagcuucaaggaggagcuggacaaguacuucaagaaccacaccagcccagacguggaccugggcgacaucagcggcaucaacgccagcguggugaacauccagaaggagaucgaccggcugaacgagguggccaagaaccugaacgagagccugaucgaccugcaggagcugggcaaguacgagcaguacaucaaguggcccugguacaucuggcugggcuucaucgccggccugaucgccaucgugauggugaccaucaugcugugcugcaugaccagcugcuguagcugccugaagggcugcugcagcugcggcagcugcugcaaguucgacgaggacgacagcgagcccgugcugaagggcgugaagcugcacuacaccugaggacuaguuauaagacugacuagcccgaugggccucccaacgggcccuccuccccuccuugcaccgagauuaauaaaaaaaaaaaaaaaaaaaaaaaaaaaaaaaaaaaaaaaaaaaaaaaaaaaaaaaaaaaaaaaaugcaucccccccccccccccccccccccccccccccaaaggcucuuuucagagccaccagaauu

SEQ ID NO: 23362 - RNA, 4033 nt, Artificial Sequence
  SARS-CoV-2/Wuhan/WIV05/2019__EPI_ISL_402128 spike protein mRNA gc (1-1273)(K986P_V987P_H69del_V70del_Y453F_D614G_I692V_M1229I)
aggagaaagcuuaccauguucguguuccuggugcugcugccccuggugagcagccagugcgugaaccugaccacccggacccagcugcccccugccuacaccaacagcuucacccggggcguguacuaccccgacaagguguuccggagcagcgugcugcacagcacccaggaccuguuccugcccuucuucagcaacgugaccugguuccacgccaucagcggcaccaacggcaccaagcgguucgacaacccagugcugcccuucaacgacggcguguacuucgccagcaccgagaagucaaacaucauccggggcuggaucuucggcaccacccuggacagcaagacacagagccugcugaucgugaacaacgccaccaacguggugaucaaggugugcgaguuucaguucugcaacgaccccuuccugggcguguacuaccacaagaacaacaagagcuggauggagagcgaguuccggguguacagcagcgcuaacaauugcaccuucgaguacgucagccagcccuuccugauggaccucgagggcaagcagggcaacuucaagaaccugcgggaguucguguucaagaacaucgauggcuacuucaagaucuacagcaagcacacccccaucaaccuggugcgggaccugccccagggauucagcgcccuggagccucugguggaccugcccaucggcaucaacaucaccagguuccagacccugcuggcccugcaccggagcuaccugacccccggcgacagcagcagcggcuggaccgccggcgccgccgcauacuacgugggcuaccugcagccacggaccuuccugcugaaguacaacgagaacggcaccaucaccgacgccguggacugcgcccuggacccccugagcgagaccaagugcacccuaaagagcuucaccguggagaagggcaucuaccagaccagcaacuuccgggugcagcccacugagagcaucgugcgguuccccaacauuaccaaccugugucccuucggcgagguguucaacgccacccgguucgccagcguguacgccuggaaccggaagcggaucagcaacugcguggccgacuacagcgugcuguacaacagcgccagcuucagcaccuucaagugcuacggcgugagcccuaccaagcugaacgaccugugcuucaccaacguguacgcugacagcuucgugauccggggcgacgaggugcggcagaucgcccccggccagaccggcaagaucgccgacuacaacuacaagcugcccgacgacuucaccggcugcgugaucgccuggaacagcaacaaccuggacagcaaggugggcggcaacuacaacuaccuguuccggcuguuccguaagagcaaccugaagccauuugagcgggacaucagcaccgagaucuaccaggccggcagcacccccugcaacgguguggagggcuucaacugcuacuucccccugcagagcuacggcuuccagcccaccaacggcgugggcuaccagcccuaccgggugguggugcugagcuucgagcugcugcacgcccccgccaccgugugcggcccuaaaaagagcaccaaccuggugaagaacaagugcgugaacuucaauuucaacggccugaccggcaccggcgugcugaccgagagcaacaagaaguuccugcccuuccagcaguucggccgggauaucgccgacaccaccgacgcagugcgggacccccagacccuggagauccuggacaucaccccaugcagcuucggcggcgugagcgugaucacccccggcacaaacaccagcaaccaggucgccgugcuguaccagggagugaacugcaccgaggugcccguggccauccacgccgaccagcugacccccaccuggcggguguacagcaccggcagcaacguguuccagacccgggccggcugccugaucggcgccgagcacgugaacaacuccuacgagugcgacauccccaucggcgcuggcaucugcgccagcuaccagacccagaccaacagcccccggcgggcccggagcguggccagccagagcgugaucgccuacaccaugagcuuaggcgccgagaacagcguggccuacagcaacaacagcaucgcgaucccuaccaacuucaccaucagcgugaccaccgagauccugcccgugagcaugaccaagaccagcguggacuguaccauguacauaugcggcgacagcaccgagugcagcaaccugcugcugcaguacggcagcuucugcacccagcugaaccgggcccugaccggcaucgccguggagcaggacaagaacacccaagagguguucgcccaggugaagcagaucuacaagacucccccaaucaaggacuucggcggcuucaacuucagccagauccugcccgaccccagcaagcccagcaagcggagcuucaucgaggaccugcuguucaacaaggugacccuggccgacgccggcuucaucaagcaguacggcgacugccugggggauaucgccgcucgggaccugaucugcgcccagaaguucaacggccugaccgugcugcccccucugcugaccgacgagaugaucgcccaguacaccagcgcccugcuugccggcaccaucaccagcggcuggaccuucggcgccggcgcagcccugcagauccccuucgccaugcagauggccuaccgguucaacggcaucggcgugacccagaacgugcuguacgagaaccagaagcugaucgccaaccaguucaacagcgccaucggcaagauccaggacagccugagcagcaccgccagcgcccugggcaagcugcaggacguggugaaccagaacgcucaggcccugaacacccuggugaagcagcugagcagcaacuuuggcgccaucagcucagugcugaaugacauccugagcaggcuggaucccccagaggccgaggugcagaucgaccggcugaucaccggccggcugcagagccugcagaccuacgugacccagcagcugauccgggccgccgagauccgggccagcgccaaccuggcagccaccaagaugagcgagugcgugcugggccagagcaagcggguggacuucugcggcaagggcuaccaccugaugagcuucccccagagcgcuccccacggcgugguguuccuccacgugacauacguccccgcccaggagaagaacuucaccaccgcccccgccaucugccacgacggcaaggcccacuucccccgggagggaguguucgugagcaacggcacccacugguucgugacccagcggaacuucuacgagccucagauuaucaccaccgacaacaccuucgugagcggcaacugcgacguggugaucggcaucgugaacaacaccguguacgacccccugcagcccgagcuggacagcuucaaggaggagcuggacaaguacuucaagaaccacaccagcccagacguggaccugggcgacaucagcggcaucaacgccagcguggugaacauccagaaggagaucgaccggcugaacgagguggccaagaaccugaacgagagccugaucgaccugcaggagcugggcaaguacgagcaguacaucaaguggcccugguacaucuggcugggcuucaucgccggccugaucgccaucgugaucgugaccaucaugcugugcugcaugaccagcugcuguagcugccugaagggcugcugcagcugcggcagcugcugcaaguucgacgaggacgacagcgagcccgugcugaagggcgugaagcugcacuacaccugaggacuaguuauaagacugacuagcccgaugggccucccaacgggcccuccuccccuccuugcaccgagauuaauaaaaaaaaaaaaaaaaaaaaaaaaaaaaaaaaaaaaaaaaaaaaaaaaaaaaaaaaaaaaaaaaugcaucccccccccccccccccccccccccccccccaaaggcucuuuucagagccaccagaauu

SEQ ID NO: 23363 - RNA, 4030 nt, Artificial Sequence
  SARS-CoV-2/Wuhan/WIV05/2019__EPI_ISL_402128 spike protein mRNA gc (1-1273)(K986P_V987P_K986P_V987P_H69del_V70del_Y144del_N501Y_A570 D_D614G_P681H_T716I_S982A_D1118H)
aggagaaagcuuaccauguucguguuccuggugcugcugccccuggugagcagccagugcgugaaccugaccacccggacccagcugcccccugccuacaccaacagcuucacccggggcguguacuaccccgacaagguguuccggagcagcgugcugcacagcacccaggaccuguuccugcccuucuucagcaacgugaccugguuccacgccaucagcggcaccaacggcaccaagcgguucgacaacccagugcugcccuucaacgacggcguguacuucgccagcaccgagaagucaaacaucauccggggcuggaucuucggcaccacccuggacagcaagacacagagccugcugaucgugaacaacgccaccaacguggugaucaaggugugcgaguuucaguucugcaacgaccccuuccugggcguguaccacaagaacaacaagagcuggauggagagcgaguuccggguguacagcagcgcuaacaauugcaccuucgaguacgucagccagcccuuccugauggaccucgagggcaagcagggcaacuucaagaaccugcgggaguucguguucaagaacaucgauggcuacuucaagaucuacagcaagcacacccccaucaaccuggugcgggaccugccccagggauucagcgcccuggagccucugguggaccugcccaucggcaucaacaucaccagguuccagacccugcuggcccugcaccggagcuaccugacccccggcgacagcagcagcggcuggaccgccggcgccgccgcauacuacgugggcuaccugcagccacggaccuuccugcugaaguacaacgagaacggcaccaucaccgacgccguggacugcgcccuggacccccugagcgagaccaagugcacccuaaagagcuucaccguggagaagggcaucuaccagaccagcaacuuccgggugcagcccacugagagcaucgugcgguuccccaacauuaccaaccugugucccuucggcgagguguucaacgccacccgguucgccagcguguacgccuggaaccggaagcggaucagcaacugcguggccgacuacagcgugcuguacaacagcgccagcuucagcaccuucaagugcuacggcgugagcccuaccaagcugaacgaccugugcuucaccaacguguacgcugacagcuucgugauccggggcgacgaggugcggcagaucgcccccggccagaccggcaagaucgccgacuacaacuacaagcugcccgacgacuucaccggcugcgugaucgccuggaacagcaacaaccuggacagcaaggugggcggcaacuacaacuaccuguaccggcuguuccguaagagcaaccugaagccauucgagcgggacaucagcaccgagaucuaccaggccggcagcacccccugcaacgguguggagggcuuuaacugcuacuucccccugcagagcuacggcuuccagcccaccuacggcgugggcuaccagcccuaccgggugguggugcugagcuucgagcugcugcacgcccccgccaccgugugcggcccuaaaaagagcaccaaccuggugaagaacaagugcgugaacuucaacuucaauggccugaccggcaccggcgugcugaccgagagcaacaagaaguuccugcccuuccagcaguucggccgggauaucgacgacaccaccgacgccgugcgggacccccagacccuggagauccuggacaucaccccaugcagcuucggcggcgugagcgugaucacccccggcacaaacaccagcaaccaggucgcagugcuguaccagggagugaacugcaccgaggugcccguggccauccacgccgaccagcugacccccaccuggcggguguacagcaccggcagcaacguguuccagacccgggccggcugccugaucggcgccgagcacgugaacaacuccuacgagugcgacauccccaucggcgccggcaucugcgcuagcuaccagacccagaccaacagccaccggcgggcccggagcguggccagccagagcaucaucgccuacaccaugagcuuaggcgccgagaacagcguggccuacagcaacaacagcaucgccauccccaucaacuucaccauaagcgugaccaccgagauccugccugugagcaugaccaagaccagcguggacuguaccauguacaucugcggcgacagcaccgagugcagcaaccugcugcugcaguacggcagcuucugcacccagcugaaccgggcgcugaccggcaucgccguggagcaggacaagaacacccaagagguguucgcccaggugaagcagaucuacaagaccccacccaucaaggacuucggcggcuucaacuucagccagauccugcccgaccccagcaagcccagcaagcggagcuucaucgaggaccugcuguucaacaaggugacucuggccgacgccggcuucaucaagcaguacggcgauugccugggggacaucgccgcccgggaccugaucugcgcucagaaguucaacggccugaccgugcugccuccccugcugaccgacgagaugaucgcccaguacaccagcgcccugcuugccggcaccaucaccagcggcuggaccuucggcgccggcgccgcacugcagauccccuucgccaugcagauggccuaccgguucaacggcaucggcgugacccagaacgugcuguacgagaaccagaagcugaucgccaaccaguucaacagcgccaucggcaagauccaggacagccugagcagcaccgccagcgcccugggcaagcugcaggacguggugaaccagaacgcccaggcucugaacacccuggugaagcagcugagcagcaacuucggcgccaucagcucagugcugaacgacauccuggccaggcuggacccacccgaggccgaggugcagaucgaccggcugaucaccggccggcugcagagccugcagaccuacgugacccagcagcugauccgggccgccgagauucgggccagcgccaaucuggcagccaccaagaugagcgagugcgugcugggccagagcaagcggguggacuuuugcggcaagggcuaccaccugaugagcuucccccagagcgcuccccacggcgugguguuccuccacgugaccuacgugcccgcccaggagaagaacuucacaaccgcccccgccaucugccacgacggcaaggcccacuucccccgggagggagucuucgugagcaacggcacccacugguucgugacccagcggaacuucuacgagccccagaucaucaccacccacaacaccuucgugagcggcaacugcgacguggugaucggcaucgugaacaacaccguguacgacccucugcagcccgagcuggacagcuucaaggaggagcuggacaaguacuucaagaaccacaccagccccgacguggaucugggcgacaucagcggcaucaacgccagcguggugaacauccagaaggagaucgaccggcugaacgagguggccaagaaccugaacgagagccugaucgaccugcaggagcugggcaaguacgagcaguacaucaaguggccaugguacaucuggcugggcuucaucgccggccugaucgccaucgugauggugaccaucaugcugugcugcaugaccagcugcuguagcugccugaagggcugcugcagcugcggcagcugcugcaaguucgacgaggacgacagcgagcccgugcugaagggcgugaagcugcacuacaccugaggacuaguuauaagacugacuagcccgaugggccucccaacgggcccuccuccccuccuugcaccgagauuaauaaaaaaaaaaaaaaaaaaaaaaaaaaaaaaaaaaaaaaaaaaaaaaaaaaaaaaaaaaaaaaaaugcaucccccccccccccccccccccccccccccccaaaggcucuuuucagagccaccagaauu

SEQ ID NO: 23364 - RNA, 4039 nt, Artificial Sequence
  SARS-CoV-2/Wuhan/WIV05/2019__EPI_ISL_402128 spike protein mRNA gc (1-1273)(K986P_V987P_K986P_V987P_K417N_E484K_N501Y_D614G)
aggagaaagcuuaccauguucguguuccuggugcugcugccccuggugagcagccagugcgugaaccugaccacccggacccagcugcccccugccuacaccaacagcuucacccggggcguguacuaccccgacaagguguuccggagcagcgugcugcacagcacccaggaccuguuccugcccuucuucagcaacgugaccugguuccacgccauccacgugagcggcaccaacggcaccaagcgguucgacaacccagugcugcccuucaacgacggcguguacuucgccagcaccgagaagucaaacaucauccggggcuggaucuucggcaccacccuggacagcaagacacagagccugcugaucgugaacaacgccaccaacguggugaucaaggugugcgaguuucaguucugcaacgaccccuuccugggcguguacuaccacaagaacaacaagagcuggauggagagcgaguuccgggucuacagcagcgcuaacaauugcaccuucgaguacgugagccagcccuuccugauggaccucgagggcaagcagggcaacuucaagaaccugcgggaguucguguucaagaacaucgauggcuacuucaagaucuacagcaagcacacccccaucaaccuggugcgggaccugccccagggauucagcgcccuggagccucugguggaccugcccaucggcaucaacaucaccagguuccagacccugcuggcccugcaccggagcuaccugacccccggcgacagcagcagcggcuggaccgccggcgccgccgcauacuacgugggcuaccugcagccacggaccuuccugcugaaguacaacgagaacggcaccaucaccgacgccguggacugcgcccuggacccccugagcgagaccaagugcacccuaaagagcuucaccguggagaagggcaucuaccagaccagcaacuuccgggugcagcccacugagagcaucgugcgguuccccaacauuaccaaccugugucccuucggcgagguguucaacgccacccgguucgccagcguguacgccuggaaccggaagcggaucagcaacugcguggccgacuacagcgugcuguacaacagcgccagcuucagcaccuucaagugcuacggcgugagcccuaccaagcugaacgaccugugcuucaccaacguguacgcugacagcuucgugauccggggcgacgaggugcggcagaucgcccccggccagaccggcaacaucgccgacuacaacuacaagcugcccgacgacuucaccggcugcgugaucgccuggaacagcaacaaccuggacagcaaggugggcggcaacuacaacuaccuguaccggcuguuccguaagagcaaccugaagccauucgagcgggacaucagcaccgagaucuaccaggccggcagcacccccugcaacggugugaagggcuuuaacugcuacuucccccugcagagcuacggcuuccagcccaccuacggcgugggcuaccagcccuaccgggugguggugcugagcuucgagcugcugcacgcccccgccaccgugugcggcccuaaaaagagcaccaaccuggugaagaacaagugcgugaacuucaauuucaacggccugaccggcaccggcgugcugaccgagagcaacaagaaguuccugcccuuccagcaguucggccgggauaucgccgacaccaccgacgcagugcgggacccccagacccuggagauccuggacaucaccccaugcagcuucggcggcgugagcgucaucacccccggcacaaacaccagcaaccagguggccgugcuguaccagggagugaacugcaccgaggugcccguggccauccacgccgaccagcugacccccaccuggcggguguacagcaccggcagcaacguguuccagacccgggccggcugccugaucggcgccgagcacgugaacaacuccuacgagugcgacauccccaucggcgcuggcaucugcgccagcuaccagacccagaccaacagcccccggcgggcccggagcguggccagccagagcaucaucgccuacaccaugagcuuaggcgccgagaacagcguggccuacagcaacaacagcaucgcgaucccuaccaacuucaccaucagcgugaccaccgagauacugcccgugagcaugaccaagaccagcguggacuguaccauguacaucugcggcgacagcaccgagugcagcaaccugcugcugcaguacggcagcuucugcacccagcugaaccgggcccugaccggcaucgccguggagcaggacaagaacacccaagagguguucgcccaggugaagcagaucuacaagacucccccaaucaaggacuucggcggcuucaacuucagccagauccugcccgaccccagcaagcccagcaagcggagcuucaucgaggaccugcuguucaacaaggugacccuggccgacgccggcuucaucaagcaguacggcgacugccugggggauaucgccgcucgggaccugaucugcgcccagaaguucaacggccugaccgugcugcccccucugcugaccgacgagaugaucgcccaguacaccagcgcccugcuugccggcaccaucaccagcggcuggaccuucggcgccggcgcagcccugcagauccccuucgccaugcagauggccuaccgguucaacggcaucggcgugacccagaacgugcuguacgagaaccagaagcugaucgccaaccaguucaacagcgccaucggcaagauccaggacagccugagcagcaccgccagcgcccugggcaagcugcaggacguggugaaccagaacgcucaggcccugaacacccuggugaagcagcugagcagcaacuucggcgccaucagcucagugcugaaugacauccugagcaggcuggaucccccagaggccgaggugcagaucgaccggcugaucaccggccggcugcagagccugcagaccuacgugacccagcagcugauccgggccgccgagauccgggccagcgccaaccuggcagccaccaagaugagcgagugcgugcugggccagagcaagcggguggacuuuugcggcaagggcuaccaccugaugagcuucccccagagcgcuccccacggcgugguguuccuccacgugacauacguccccgcccaggagaagaacuucaccaccgcccccgccauuugccacgacggcaaggcccacuucccccgggagggaguguucgugagcaacggcacccacugguucgugacccagcggaacuucuacgagccucagaucaucaccaccgacaacaccuucgugagcggcaacugcgacguggugaucggcaucgugaacaacaccguguacgacccccugcagcccgagcuggacagcuucaaggaggagcuggacaaguacuucaagaaccacaccagcccagacguggaccugggcgacaucagcggcaucaacgccagcguggugaacauccagaaggagaucgaccggcugaacgagguggccaagaaccugaacgagagccugaucgaccugcaggagcugggcaaguacgagcaguacaucaaguggcccugguacaucuggcugggcuucaucgccggccugaucgccaucgugauggugaccaucaugcugugcugcaugaccagcugcuguagcugccugaagggcugcugcagcugcggcagcugcugcaaguucgacgaggacgacagcgagcccgugcugaagggcgugaagcugcacuacaccugaggacuaguuauaagacugacuagcccgaugggccucccaacgggcccuccuccccuccuugcaccgagauuaauaaaaaaaaaaaaaaaaaaaaaaaaaaaaaaaaaaaaaaaaaaaaaaaaaaaaaaaaaaaaaaaaugcaucccccccccccccccccccccccccccccccaaaggcucuuuucagagccaccagaauu

SEQ ID NO: 23365 - RNA, 4030 nt, Artificial Sequence
  SARS-CoV-2/Wuhan/WIV05/2019__EPI_ISL_402128 spike protein mRNA gc (1-1273)(K986P_V987P_K986P_V987P_L18F_D80A_D215G_L242del_A243del_ L244del_R246I_K417N_E484K_N501Y_D614G_A701V)
aggagaaagcuuaccauguucguguuccuggugcugcugccccuggugagcagccagugcgugaacuucaccacccggacccagcugcccccugccuacaccaacagcuucacccggggcguguacuaccccgacaagguguuccggagcagcgugcugcacagcacccaggaccuguuccugcccuucuucagcaacgugaccugguuccacgccauccacgugagcggcaccaacggcaccaagcgguucgccaacccagugcugcccuucaacgacggcguguacuucgccagcaccgagaagucaaacaucauccggggcuggaucuuuggcaccacccuggacagcaagacacagagccugcugaucgugaacaacgcuaccaacguggugaucaaggugugcgaguuccaguucugcaacgaccccuuccugggcguguacuaccacaagaacaacaagagcuggauggagagcgaguuccgggucuacagcagcgccaacaauugcaccuucgaguacgugagccagcccuuccugauggaccuggagggcaagcagggcaacuucaagaaccuccgggaguucguguucaagaacaucgacggcuacuucaagaucuacagcaagcacacccccaucaaccuggugcggggacugccccagggcuucagcgcccuggagccucugguggaucugcccaucggcaucaacaucaccagguuccagacccugcacaucagcuaccugacccccggcgacagcagcagcggcuggaccgccggcgccgccgcauacuacgugggcuaccugcagccacggaccuuccugcugaaguacaacgagaacggcaccaucaccgacgccguggacugcgcccuggacccccugagcgagaccaagugcacccuuaagagcuucaccguggagaagggcaucuaccagaccagcaacuuccgggugcagcccacugagagcauugugcgguuccccaacaucaccaaccugugucccuucggcgagguguucaacgccacccgguucgccagcguguacgccuggaaccggaagcggaucagcaacugcguggccgacuacagcgugcuguacaacagcgccagcuucagcaccuucaagugcuacggcgugagcccuaccaagcugaacgaccugugcuucaccaacguguacgcugacagcuucgugauccggggcgacgaggugcggcagaucgcccccggccagaccggcaacaucgccgacuacaacuacaagcugcccgacgacuucaccggcugcgugaucgccuggaacagcaacaaccuggacagcaaggugggcggcaacuacaacuaccuguaccggcuauuccguaagagcaaccugaagccauuugagcgggacaucagcaccgagaucuaccaggccgguagcacccccugcaacggcgugaagggcuucaacugcuacuucccccugcagagcuacggcuuccagcccaccuacggcgugggcuaccagcccuaccgggugguggugcugagcuucgagcugcugcacgcccccgccaccgugugcggcccuaaaaagagcaccaaccuggugaagaacaagugcgugaacuucaauuucaacggccugaccggcaccggcgugcugaccgagagcaacaagaaguuccugcccuuccagcaguucggccgggacaucgccgacaccaccgaugcagugcgggacccccagacccuggagauccuggacaucaccccaugcagcuucggcggcgugagcgucaucacccccggaacaaacaccagcaaccagguggccgugcuguaccagggcgugaacugcaccgaggugcccguggccauccacgccgaccagcugacccccaccuggcggguguacagcaccggcagcaacguguuccagacccgggccggcugccugaucggcgccgagcacgugaacaacuccuacgagugcgacauccccaucggcgcuggcaucugcgccagcuaccagacccagaccaacagcccccggcgggcccggagcguggccagccagagcaucaucgccuacaccaugagccugggcguggagaacagcguggccuacagcaacaacagcaucgccaucccuaccaacuucaccauaagcgugaccaccgagauccugcccgugagcaugaccaagaccagcguggacuguaccauguacaucugcggcgacagcaccgagugcagcaaccuguuacugcaguacggcagcuucugcacccagcugaaccgggcgcugaccggcaucgccguggagcaggacaagaacacccaagagguguucgcccaggugaagcagaucuacaagacucccccaaucaaggacuucggcggcuucaacuucagccagauccugcccgaccccagcaagcccagcaagcggagcuucaucgaggaccugcuguucaacaaggugacccuggccgacgccggcuucaucaagcaguacggggacugccugggcgacaucgccgcccgggaccugaucugcgcucagaaguucaacggccugaccgugcugcccccucugcugaccgaugagaugaucgcccaguacaccagcgcccugcuggccggcaccaucaccagcggcuggaccuucggcgccggcgccgcacugcagauccccuucgccaugcagauggccuaccgguucaacggcaucggcgugacccagaacgugcuguacgagaaccagaagcugaucgccaaccaguucaacagcgccaucggcaagauccaggacagccugagcagcaccgccagcgcccugggcaagcugcaggacguggugaaccagaacgcccaggcucugaacacccuggugaagcagcugagcagcaacuuuggcgccaucagcucagugcugaaugacauccugagccggcuggaucccccagaggccgaggugcagaucgacaggcugaucaccggccggcugcagagccugcagaccuacgugacccagcagcugauccgggccgccgagauucgggccagcgccaaccuggccgcaaccaagaugagcgagugcgugcugggccagagcaagcggguggacuucugcggcaagggcuaccaccugaugagcuucccccagagcgcuccccacggcgugguguuccugcacgucacauacgugcccgcccaggagaagaacuucaccaccgcccccgccaucugccacgacggaaaggcccacuucccccgggagggcguguucgugagcaacggcacccacugguucgugacccagcggaacuucuacgagccucagaucaucaccaccgacaacaccuucgugagcggcaacugcgacguggugaucggcaucgugaacaacaccguguacgacccccugcagcccgagcuggacagcuucaaggaggagcucgacaaguacuucaagaaccacaccagcccagacguggaccugggcgacaucagcggcaucaacgccagcguggugaacauccagaaggagaucgaccggcugaacgagguggccaagaaccugaacgagagccugaucgaccugcaggagcugggcaaguacgagcaguacaucaaguggcccugguacaucuggcugggcuucaucgccggccugaucgccaucgugauggugaccaucaugcugugcugcaugaccagcugcuguagcugccugaagggcugcugcagcugcggcagcugcugcaaguucgacgaggacgacagcgagcccgugcugaagggcgugaagcugcacuacaccugaggacuaguuauaagacugacuagcccgaugggccucccaacgggcccuccuccccuccuugcaccgagauuaauaaaaaaaaaaaaaaaaaaaaaaaaaaaaaaaaaaaaaaaaaaaaaaaaaaaaaaaaaaaaaaaaugcaucccccccccccccccccccccccccccccccaaaggcucuuuucagagccaccagaauu

SEQ ID NO: 23366 - RNA, 4039 nt, Artificial Sequence
  SARS-CoV-2/Wuhan/WIV05/2019__EPI_ISL_402128 spike protein mRNA gc (1-1273)(K986P_V987P_K986P_V987P_E484K_D614G)
aggagaaagcuuaccauguucguguuccuggugcugcugccccuggugagcagccagugcgugaaccugaccacccggacccagcugcccccugccuacaccaacagcuucacccggggcguguacuaccccgacaagguguuccggagcagcgugcugcacagcacccaggaccuguuccugcccuucuucagcaacgugaccugguuccacgccauccacgugagcggcaccaacggcaccaagcgguucgacaacccagugcugcccuucaacgacggcguguacuucgccagcaccgagaagucaaacaucauccggggcuggaucuucggcaccacccuggacagcaagacacagagccugcugaucgugaacaacgccaccaacguggugaucaaggugugcgaguuucaguucugcaacgaccccuuccugggcguguacuaccacaagaacaacaagagcuggauggagagcgaguuccgggucuacagcagcgcuaacaauugcaccuucgaguacgugagccagcccuuccugauggaccucgagggcaagcagggcaacuucaagaaccugcgggaguucguguucaagaacaucgauggcuacuucaagaucuacagcaagcacacccccaucaaccuggugcgggaccugccccagggauucagcgcccuggagccucugguggaccugcccaucggcaucaacaucaccagguuccagacccugcuggcccugcaccggagcuaccugacccccggcgacagcagcagcggcuggaccgccggcgccgccgcauacuacgugggcuaccugcagccacggaccuuccugcugaaguacaacgagaacggcaccaucaccgacgccguggacugcgcccuggacccccugagcgagaccaagugcacccuaaagagcuucaccguggagaagggcaucuaccagaccagcaacuuccgggugcagcccacugagagcaucgugcgguuccccaacauuaccaaccugugucccuucggcgagguguucaacgccacccgguucgccagcguguacgccuggaaccggaagcggaucagcaacugcguggccgacuacagcgugcuguacaacagcgccagcuucagcaccuucaagugcuacggcgugagcccuaccaagcugaacgaccugugcuucaccaacguguacgcugacagcuucgugauccggggcgacgaggugcggcagaucgcccccggccagaccggcaagaucgccgacuacaacuacaagcugcccgacgacuucaccggcugcgugaucgccuggaacagcaacaaccuggacagcaaggugggcggcaacuacaacuaccuguaccggcuguuccguaagagcaaccugaagccauucgagcgggacaucagcaccgagaucuaccaggccggcagcacccccugcaacggugugaagggcuuuaacugcuacuucccccugcagagcuacggcuuccagcccaccaacggcgugggcuaccagcccuaccgggugguggugcugagcuucgagcugcugcacgcccccgccaccgugugcggcccuaaaaagagcaccaaccuggugaagaacaagugcgugaacuucaauuucaacggccugaccggcaccggcgugcugaccgagagcaacaagaaguuccugcccuuccagcaguucggccgggauaucgccgacaccaccgacgcagugcgggacccccagacccuggagauccuggacaucaccccaugcagcuucggcggcgugagcgucaucacccccggcacaaacaccagcaaccagguggccgugcuguaccagggagugaacugcaccgaggugcccguggccauccacgccgaccagcugacccccaccuggcggguguacagcaccggcagcaacguguuccagacccgggccggcugccugaucggcgccgagcacgugaacaacuccuacgagugcgacauccccaucggcgcuggcaucugcgccagcuaccagacccagaccaacagcccccggcgggcccggagcguggccagccagagcaucaucgccuacaccaugagcuuaggcgccgagaacagcguggccuacagcaacaacagcaucgcgaucccuaccaacuucaccaucagcgugaccaccgagauacugcccgugagcaugaccaagaccagcguggacuguaccauguacaucugcggcgacagcaccgagugcagcaaccugcugcugcaguacggcagcuucugcacccagcugaaccgggcccugaccggcaucgccguggagcaggacaagaacacccaagagguguucgcccaggugaagcagaucuacaagacucccccaaucaaggacuucggcggcuucaacuucagccagauccugcccgaccccagcaagcccagcaagcggagcuucaucgaggaccugcuguucaacaaggugacccuggccgacgccggcuucaucaagcaguacggcgacugccugggggauaucgccgcucgggaccugaucugcgcccagaaguucaacggccugaccgugcugcccccucugcugaccgacgagaugaucgcccaguacaccagcgcccugcuugccggcaccaucaccagcggcuggaccuucggcgccggcgcagcccugcagauccccuucgccaugcagauggccuaccgguucaacggcaucggcgugacccagaacgugcuguacgagaaccagaagcugaucgccaaccaguucaacagcgccaucggcaagauccaggacagccugagcagcaccgccagcgcccugggcaagcugcaggacguggugaaccagaacgcucaggcccugaacacccuggugaagcagcugagcagcaacuucggcgccaucagcucagugcugaaugacauccugagcaggcuggaucccccagaggccgaggugcagaucgaccggcugaucaccggccggcugcagagccugcagaccuacgugacccagcagcugauccgggccgccgagauccgggccagcgccaaccuggcagccaccaagaugagcgagugcgugcugggccagagcaagcggguggacuuuugcggcaagggcuaccaccugaugagcuucccccagagcgcuccccacggcgugguguuccuccacgugacauacguccccgcccaggagaagaacuucaccaccgcccccgccauuugccacgacggcaaggcccacuucccccgggagggaguguucgugagcaacggcacccacugguucgugacccagcggaacuucuacgagccucagaucaucaccaccgacaacaccuucgugagcggcaacugcgacguggugaucggcaucgugaacaacaccguguacgacccccugcagcccgagcuggacagcuucaaggaggagcuggacaaguacuucaagaaccacaccagcccagacguggaccugggcgacaucagcggcaucaacgccagcguggugaacauccagaaggagaucgaccggcugaacgagguggccaagaaccugaacgagagccugaucgaccugcaggagcugggcaaguacgagcaguacaucaaguggcccugguacaucuggcugggcuucaucgccggccugaucgccaucgugauggugaccaucaugcugugcugcaugaccagcugcuguagcugccugaagggcugcugcagcugcggcagcugcugcaaguucgacgaggacgacagcgagcccgugcugaagggcgugaagcugcacuacaccugaggacuaguuauaagacugacuagcccgaugggccucccaacgggcccuccuccccuccuugcaccgagauuaauaaaaaaaaaaaaaaaaaaaaaaaaaaaaaaaaaaaaaaaaaaaaaaaaaaaaaaaaaaaaaaaaugcaucccccccccccccccccccccccccccccccaaaggcucuuuucagagccaccagaauu

SEQ ID NO: 23367 - RNA, 4039 nt, Artificial Sequence
  SARS-CoV-2/Wuhan/WIV05/2019__EPI_ISL_402128 spike protein mRNA gc (1-1273)(K986P_V987P_K986P_V987P_L18F_T20N_P26S_D138Y_R190S_K417T _E484K_N501Y_D614G_H655Y_T1027I)
aggagaaagcuuaccauguucguguuccuggugcugcugccccuggugagcagccagugcgugaacuucaccaaccggacccagcugcccagcgccuacaccaacagcuucacccggggcguguacuacccugacaagguguuccggagcagcgugcugcacagcacccaggaccuguuccugcccuucuucagcaacgugaccugguuccacgccauccacgugagcggcaccaacggcaccaagcgguucgacaaccccgugcugccauucaacgacggcguguacuucgccagcaccgagaagucaaacaucauccggggcuggaucuuuggcaccacccuggacagcaagacccagagccugcugaucgugaacaacgccacaaacguggugaucaaggugugcgaguuccaguucugcaacuaccccuuccugggcguguacuaccacaagaacaacaagagcuggauggagagcgaguuccgggucuacagcagcgcuaauaacugcaccuucgaguacgugagccagcccuuccugauggaccuggagggcaagcagggcaacuucaagaaccucagcgaguucguguucaagaacaucgacggcuacuucaagaucuacagcaagcacacccccaucaaccuggugcgggaucugccccagggauucagcgcccuggagccccugguggaccugccuaucggcaucaacaucacccgguuccagacccugcuggcccugcacaggagcuaccugacccccggcgacagcagcagcggcuggaccgccggcgccgccgcauacuacgugggcuaccugcagccccggaccuuccugcugaaguacaacgagaacggcaccaucaccgacgccguggacugcgcccuggacccacugagcgagaccaagugcacccuaaagagcuucaccguggagaagggcaucuaccagaccagcaacuuccgggugcagcccaccgagagcaucgugcgguuccccaacauuacuaaccugugucccuucggcgagguguucaacgccacccgguucgccagcguguacgccuggaaccggaagcggaucagcaacugcguggccgacuacagcgugcuguacaacagcgccagcuucagcaccuucaagugcuacggcgugagccccaccaagcugaacgaccugugcuucaccaacguguacgcugacagcuucgugauccggggcgacgaggugcggcagaucgccccuggccagaccggcaccaucgccgacuacaacuacaagcugcccgacgacuucaccggcugcgugaucgccuggaacagcaacaaccuggacagcaaggugggcggcaacuacaacuaccuguaccggcuguuccguaagagcaaccugaagcccuuugagcgggacaucagcaccgagaucuaccaggccggcagcaccccaugcaacggugugaagggcuucaacugcuacuucccccugcagagcuacggcuuccagcccaccuacggcgugggcuaccagcccuaccgggugguggugcugagcuucgagcugcugcacgcccccgccaccgugugcggccccaaaaagagcaccaaccuggugaagaacaagugcgugaacuucaauuucaacggccugaccggcaccggcgugcugaccgagagcaacaagaaguuccugccuuuccagcaguucggccgggacaucgccgauaccaccgacgcagugcgggacccccagacccuggagauccuggacaucacccccugcagcuucggcggcgugagcgucaucaccccaggcacaaacaccagcaaccagguggccgugcuguaccagggagugaacugcaccgaggugcccguggccauccacgccgaccagcugacccccaccuggcggguguacuccaccggcagcaacguguuccagacccgggccggcugccugaucggcgccgaguacgugaacaacagcuacgagugcgacauccccaucggcgcuggcaucugcgccagcuaccagacccagaccaacagcccccggcgggcccggagcguggccagccagagcaucaucgccuacaccaugagccugggcgccgagaacagcguggccuacagcaacaacagcaucgcgauccccaccaacuucaccaucagcgugaccaccgagauauuaccugugagcaugaccaagaccagcguggacuguaccauguacaucugcggcgacagcaccgagugcagcaaccugcugcugcaguacggcagcuucugcacccagcugaaccgggcccugaccggcaucgccguggagcaggacaagaacacccaagagguguucgcccaggugaagcagaucuacaagacuccacccaucaaggacuucggcggcuucaacuucagccagauccugcccgaccccagcaagcccagcaagcggagcuucaucgaggaccugcuguucaacaaggugacccuggccgacgccggcuucaucaagcaguacggcgacugccugggggacaucgccgcucgggaucugaucugcgcccagaaguucaacggccugaccgugcugccuccccugcugaccgacgagaugaucgcccaguacaccagcgcccugcuggccggcaccaucaccagcggcuggaccuucggcgccggcgcagcccuucagauccccuucgccaugcagauggccuaccgguucaacggcaucggcgugacccagaacgugcuguacgagaaccagaagcugaucgccaaccaguucaacagcgccaucggcaagauccaggacagccugagcagcaccgccagcgcccugggcaagcugcaggacguggugaaccagaacgcucaggcccugaacacccuggugaagcagcugagcucaaacuuuggcgccaucagcagcgugcugaaugacauccugagccggcuggacccacccgaggccgaggugcagaucgacaggcugaucaccggccggcugcagagccugcagaccuacgugacccagcagcugauccgggccgccgagauccgggccagcgccaaccuggcagccauuaagaugagcgagugcgugcugggccagagcaagcggguggacuucugcggcaagggcuaccaccugaugagcuucccccagagcgcuccccacggcgugguguuccugcacgugaccuacguccccgcccaggagaagaacuucacaaccgcccccgccaucugccacgacggcaaggcccacuucccccgggagggaguguucgugagcaacggcacccacugguucgugacccagcggaacuucuacgagccccagaucaucaccaccgacaacaccuucgugagcggcaacugcgacguggugaucggcaucgugaacaacaccguguacgacccucuccagcccgagcuggacagcuucaaggaggagcuggacaaguacuucaagaaccacaccagccccgacguggaccugggcgauaucagcggcaucaacgccagcguggugaacauccagaaggagaucgaccggcugaacgagguggccaagaaccugaacgagagccugaucgaccugcaggagcugggcaaguacgagcaguacaucaaguggccaugguacaucuggcugggcuucaucgccggccugaucgccaucgugauggugaccaucaugcugugcugcaugaccagcugcuguagcugccugaagggcugcugcagcugcggcagcugcugcaaguucgacgaggacgacagcgagcccgugcugaagggcgugaagcugcacuacaccugaggacuaguuauaagacugacuagcccgaugggccucccaacgggcccuccuccccuccuugcaccgagauuaauaaaaaaaaaaaaaaaaaaaaaaaaaaaaaaaaaaaaaaaaaaaaaaaaaaaaaaaaaaaaaaaaugcaucccccccccccccccccccccccccccccccaaaggcucuuuucagagccaccagaauu

SEQ ID NO: 23368 - RNA, 4039 nt, Artificial Sequence
  SARS-CoV-2/Wuhan/WIV05/2019__EPI_ISL_402128 spike protein mRNA gc (1-1273)(K986P_V987P_K986P_V987P_S13I_W152C_L452R_D614G)
aggagaaagcuuaccauguucguguuccuggugcugcugccccuggugagcauccagugcgugaaccugaccacccggacccagcugcccccugccuacaccaacagcuucacccggggcguguacuaccccgacaagguguuccggagcagcgugcugcacagcacccaggaccuguuccugcccuucuucagcaacgugaccugguuccacgccauccacgugagcggcaccaacggcaccaagcgguucgacaacccagugcugcccuucaacgacggcguguacuucgccagcaccgagaagucaaacaucauccggggcuggaucuucggcaccacccuggacagcaagacacagagccugcugaucgugaacaacgccaccaacguggugaucaaggugugcgaguuucaguucugcaacgaccccuuccugggcguguacuaccacaagaacaacaagagcugcauggagagcgaguuccgggucuacagcagcgcuaacaauugcaccuucgaguacgugagccagcccuuccugauggaccucgagggcaagcagggcaacuucaagaaccugcgggaguucguguucaagaacaucgauggcuacuucaagaucuacagcaagcacacccccaucaaccuggugcgggaccugccccagggauucagcgcccuggagccucugguggaccugcccaucggcaucaacaucaccagguuccagacccugcuggcccugcaccggagcuaccugacccccggcgacagcagcagcggcuggaccgccggcgccgccgcauacuacgugggcuaccugcagccacggaccuuccugcugaaguacaacgagaacggcaccaucaccgacgccguggacugcgcccuggacccccugagcgagaccaaguguacccuaaagagcuucaccguggagaagggcaucuaccagaccagcaacuuccgggugcagcccacugagagcauugugcgguuccccaacaucaccaaccugugccccuucggcgagguguucaacgccacccgguucgccagcguguacgccuggaaccggaagcggaucagcaacugcguggccgacuacagcgugcuguacaacagcgccagcuucagcaccuucaagugcuacggcgugagcccuaccaagcugaacgaccugugcuucaccaacguguacgcugacagcuucgugauccggggcgacgaggugcggcagaucgcccccggccagaccggcaagaucgccgacuacaacuacaagcugcccgacgacuucaccggcugcgugaucgccuggaacagcaacaaccuggacagcaaggugggcggcaacuacaacuaccgguaccggcuguuccguaagagcaaccugaagccauucgagcgggacaucagcaccgagaucuaccaggccggcagcacccccugcaacgguguggagggcuuuaacugcuacuucccccugcagagcuacggcuuccagcccaccaacggcgugggcuaccagcccuaccgggugguggugcugagcuucgagcugcugcacgcccccgccaccgugugcggcccuaaaaagagcaccaaccuggugaagaacaagugcgugaacuucaauuucaacggccugaccggcaccggcgugcugaccgagagcaacaagaaguuccugcccuuccagcaguucggccgggauaucgccgacaccaccgacgcagugcgggacccccagacccuggagauccuggacaucaccccaugcagcuucggcggcgugagcgucaucacccccggcacaaacaccagcaaccagguggccgugcuguaccagggagugaacugcaccgaggugcccguggccauccacgccgaccagcugacccccaccuggcggguguacagcaccggcagcaacguguuccagacccgggccggcugccugaucggcgccgagcacgugaacaacagcuacgagugcgacauccccaucggcgcuggcaucugugccuccuaccagacccagaccaacagcccccggcgggcccggagcguggccagccagagcaucaucgccuacaccaugagccugggcgccgagaacagcguggccuacagcaacaacagcaucgcgaucccuaccaacuucaccauaagcgugaccaccgagaucuuacccgugagcaugaccaagaccagcguggacugcaccauguacaucugcggcgacagcaccgagugcagcaaccugcugcugcaguacggcagcuucugcacccagcugaaccgggcccugaccggcaucgccguggagcaggacaagaacacccaagagguguucgcccaggugaagcagaucuacaagacucccccaaucaaggacuucggcggcuucaacuucagccagauccugcccgaccccagcaagcccagcaagcggagcuucaucgaggaccugcuguucaacaaggugacccuggccgacgccggcuucaucaagcaguacggcgacugccugggggauaucgccgcucgggaccugaucugcgcccagaaguucaacggccugaccgugcugcccccucugcugaccgacgagaugaucgcccaguacaccagcgcccugcuggccggcaccaucaccagcggcuggaccuucggcgccggcgcagcccuucagauccccuucgccaugcagauggccuacagguucaacggcaucggcgugacccagaacgugcuguacgagaaccagaagcugaucgccaaccaguucaacagcgccaucggcaagauccaggacagccugagcagcaccgccagcgcccugggcaagcugcaggacguggugaaccagaacgcucaggcccugaacacccuggugaagcagcugagcagcaacuucggcgccaucagcagcgugcugaaugacauccugucacggcuggaucccccagaggccgaggugcagaucgaccggcugaucaccggccggcugcagagccugcagaccuacgugacccagcagcugauccgggccgccgagauucgggccagcgccaaccuggcagccaccaagaugagcgagugcgugcugggccagagcaagcggguggacuuuugcggcaagggcuaccaccugaugagcuucccccagagcgcuccccacggcgugguguuccugcacgugacauacguccccgcccaggagaagaacuucaccaccgcccccgccaucugccacgacggcaaggcccacuucccccgggagggaguguucgugagcaacggcacccacugguucgugacccagcggaacuucuacgagccucagaucaucaccaccgacaacaccuucgugagcggcaacugcgacguggugaucggcaucgugaacaacaccguguacgacccccuccagcccgagcuggacagcuucaaggaggagcuggacaaguacuucaagaaccacaccagcccagacguggaccugggcgacaucagcggcaucaacgccagcguggugaacauccagaaggagaucgaccggcugaacgagguggccaagaaccugaacgagagccugaucgaccugcaggagcugggcaaguacgagcaguacaucaaguggcccugguacaucuggcugggcuucaucgccggccugaucgccaucgugauggugaccaucaugcugugcugcaugaccagcuguugcagcugccugaagggcugcugcagcugcggcagcugcugcaaguucgacgaggacgacagcgagcccgugcugaagggcgugaagcugcacuacaccugaggacuaguuauaagacugacuagcccgaugggccucccaacgggcccuccuccccuccuugcaccgagauuaauaaaaaaaaaaaaaaaaaaaaaaaaaaaaaaaaaaaaaaaaaaaaaaaaaaaaaaaaaaaaaaaaugcaucccccccccccccccccccccccccccccccaaaggcucuuuucagagccaccagaauu

SEQ ID NO: 23369 - RNA, 4039 nt, Artificial Sequence; identical to SEQ ID NO: 165
  SARS-CoV-2/Wuhan/WIV05/2019__EPI_ISL_402128 spike protein mRNA gc mod (1-1273)(K986P_V987P) R9519

SEQ ID NO: 23370 - RNA, 4039 nt, Artificial Sequence
  SARS-CoV-2/Wuhan/WIV05/2019__EPI_ISL_402128 spike protein mRNA gc mod (1-1273)(K986P_V987P_ D614G)
aggagaaagcuuaccauguucguguuucuggugcugcugccccugguguccagccagugugugaaccugaccaccagaacacagcugccuccagccuacaccaacagcuucaccagaggcguguacuaccccgacaagguguucagauccagcgugcugcacucuacccaggaccuguuccugccuuucuucagcaacgugaccugguuccacgccauccacguguccggcaccaauggcaccaagagauucgacaaccccgugcugcccuucaacgacgggguguacuuugccagcaccgagaaguccaacaucaucagaggcuggaucuucggcaccacacuggacagcaagacccagagccugcugaucgugaacaacgccaccaacguggucaucaaagugugcgaguuccaguucugcaacgaccccuuccugggcgucuacuaccacaagaacaacaagagcuggauggaaagcgaguuccggguguacagcagcgccaacaacugcaccuucgaguacgugucccagccuuuccugauggaccuggaaggcaagcagggcaacuucaagaaccugcgcgaguucguguucaagaacaucgacggcuacuucaaaaucuacagcaagcacaccccuaucaaccucgugcgggaucugccucagggcuucucugcucuggaaccccugguggaucugcccaucggcaucaacaucacccgguuucagacacugcuggcccugcacagaagcuaccugacaccuggcgauagcagcagcggauggacagcuggugccgccgcuuacuaugugggcuaccugcagccuagaaccuuccugcugaaguacaacgagaacggcaccaucaccgacgccguggauugugcucuggauccucugagcgagacaaagugcacccugaaguccuucaccguggaaaagggcaucuaccagaccagcaacuuccgggugcagcccaccgaauccaucgugcgguuccccaauaucaccaaucugugccccuucggcgagguguucaaugccaccagauucgccucuguguacgccuggaaccggaagcggaucagcaauugcguggccgacuacuccgugcuguacaacuccgccagcuucagcaccuucaagugcuacggcguguccccuaccaagcugaacgaccugugcuucacaaacguguacgccgacagcuucgugauccggggagaugaagugcggcagauugccccuggacagacaggcaagaucgccgacuacaacuacaagcugcccgacgacuucaccggcugugugauugccuggaacagcaacaaccuggacuccaaagucggcggcaacuacaauuaccuguaccggcuguuccggaaguccaaucugaagcccuucgagcgggacaucagcaccgaaaucuaucaggccggcagcaccccuugcaacggcguggaaggcuucaacugcuacuucccacugcaguccuacggcuuucagcccacaaauggcgugggcuaucagcccuacagagugguggugcugagcuucgaacugcugcaugcuccugccacagugugcggcccuaagaaaagcaccaaucucgugaagaacaaaugcgugaacuucaacuucaacggccugaccggcaccggcgugcugacagagagcaacaagaaguuccugccauuccagcaguuuggccgggauaucgccgauaccacagacgccguuagagauccccagacacuggaaauccuggacaucaccccaugcagcuucggcggagugucugugaucaccccuggcaccaacaccagcaaucagguggcagugcuguaccagggcgugaacuguaccgaagugcccguggccauucacgccgaucagcugacaccuacauggcggguguacuccaccggcagcaauguguuucagaccagagccggcugucugaucggagccgagcacgugaacaauagcuacgagugcgacauccccaucggcgcuggcaucugugccagcuaccagacacagacaaacagccccagacgggcuagaagcguggccagccagagcaucauugccuacacaaugucucugggcgccgagaacagcguggccuacuccaacaacucuaucgcuauccccaccaacuucaccaucagcgugaccaccgagauccugccuguguccaugaccaagaccagcguggacugcaccauguacaucugcggcgauuccaccgagugcuccaaccugcugcugcaguacggcagcuucugcacccagcugaauagagcccugacagggaucgccguggaacaggacaagaacacccaagagguguucgcccaagugaagcaaaucuacaagaccccuccuaucaaggacuucggcggcuucaauuucagccagauucugcccgauccuagcaagcccagcaagcggagcuucaucgaggaccugcuguucaacaaagugacacuggccgacgccggcuucaucaagcaguauggcgauugucugggcgacauugccgccagggaucugauuugcgcccagaaguuuaacggacugacagugcugccuccucugcugaccgaugagaugaucgcccaguacacaucugcccugcuggccggcacaaucacaagcggcuggacauuuggagcuggcgccgcucugcagauccccuuugcuaugcagauggccuaccgguucaacggcaucggagugacccagaaugugcuguacgagaaccagaagcugaucgccaaccaguucaacagcgccaucggcaagauccaggacagccugagcagcacagcaagcgcccugggaaagcugcaggacguggucaaccagaaugcccaggcacugaacacccuggucaagcagcuguccuccaacuucggcgccaucagcucugugcugaacgauauccugagcagacuggacccuccugaggccgaggugcagaucgacagacugaucacaggcagacugcagagccuccagacauacgugacccagcagcugaucagagccgccgagauuagagccucugccaaucuggccgccaccaagaugucugagugugugcugggccagagcaagagaguggacuuuugcggcaagggcuaccaccugaugagcuucccucagucugccccucacggcgugguguuucugcacgugacauaugugcccgcucaagagaagaauuucaccaccgcuccagccaucugccacgacggcaaagcccacuuuccuagagaaggcguguucguguccaacggcacccauugguucgugacacagcggaacuucuacgagccccagaucaucaccaccgacaacaccuucgugucuggcaacugcgacguugugaucggcauugugaacaauaccguguacgacccucugcagcccgagcuggacagcuucaaagaggaacuggacaaguacuuuaagaaccacacaagccccgacguggaccugggcgauaucagcggaaucaaugccagcgucgugaacauccagaaagagaucgaccggcugaacgagguggccaagaaucugaacgagagccugaucgaccugcaagaacuggggaaguacgagcaguacaucaaguggcccugguacaucuggcugggcuuuaucgccggacugauugccaucgugauggucacaaucaugcuguguugcaugaccagcugcuguagcugccugaagggcuguuguagcuguggcagcugcugcaaguucgacgaggacgauucugagcccgugcugaagggcgugaaacugcacuacaccugaggacuaguuauaagacugacuagcccgaugggccucccaacgggcccuccuccccuccuugcaccgagauuaauaaaaaaaaaaaaaaaaaaaaaaaaaaaaaaaaaaaaaaaaaaaaaaaaaaaaaaaaaaaaaaaaugcaucccccccccccccccccccccccccccccccaaaggcucuuuucagagccaccagaauu

SEQ ID NO: 23371 - RNA, 4039 nt, Artificial Sequence
  SARS-CoV-2/Wuhan/WIV05/2019__EPI_ISL_402128 spike protein mRNA gc mod (1-1273)(K986P_V987P_A222V_D614G)
aggagaaagcuuaccauguucguguuucuggugcugcugccccugguguccagccagugugugaaccugaccaccagaacacagcugccuccagccuacaccaacagcuucaccagaggcguguacuaccccgacaagguguucagauccagcgugcugcacucuacccaggaccuguuccugccuuucuucagcaacgugaccugguuccacgccauccacguguccggcaccaauggcaccaagagauucgacaaccccgugcugcccuucaacgacgggguguacuuugccagcaccgagaaguccaacaucaucagaggcuggaucuucggcaccacacuggacagcaagacccagagccugcugaucgugaacaacgccaccaacguggucaucaaagugugcgaguuccaguucugcaacgaccccuuccugggcgucuacuaccacaagaacaacaagagcuggauggaaagcgaguuccggguguacagcagcgccaacaacugcaccuucgaguacgugucccagccuuuccugauggaccuggaaggcaagcagggcaacuucaagaaccugcgcgaguucguguucaagaacaucgacggcuacuucaaaaucuacagcaagcacaccccuaucaaccucgugcgggaucugccucagggcuucucugugcuggaaccccugguggaucugcccaucggcaucaacaucacccgguuucagacacugcuggcccugcacagaagcuaccugacaccuggcgauagcagcagcggauggacagcuggugccgccgcuuacuaugugggcuaccugcagccuagaaccuuccugcugaaguacaacgagaacggcaccaucaccgacgccguggauugugcucuggauccucugagcgagacaaagugcacccugaaguccuucaccguggaaaagggcaucuaccagaccagcaacuuccgggugcagcccaccgaauccaucgugcgguuccccaauaucaccaaucugugccccuucggcgagguguucaaugccaccagauucgccucuguguacgccuggaaccggaagcggaucagcaauugcguggccgacuacuccgugcuguacaacuccgccagcuucagcaccuucaagugcuacggcguguccccuaccaagcugaacgaccugugcuucacaaacguguacgccgacagcuucgugauccggggagaugaagugcggcagauugccccuggacagacaggcaagaucgccgacuacaacuacaagcugcccgacgacuucaccggcugugugauugccuggaacagcaacaaccuggacuccaaagucggcggcaacuacaauuaccuguaccggcuguuccggaaguccaaucugaagcccuucgagcgggacaucagcaccgaaaucuaucaggccggcagcaccccuugcaacggcguggaaggcuucaacugcuacuucccacugcaguccuacggcuuucagcccacaaauggcgugggcuaucagcccuacagagugguggugcugagcuucgaacugcugcaugcuccugccacagugugcggcccuaagaaaagcaccaaucucgugaagaacaaaugcgugaacuucaacuucaacggccugaccggcaccggcgugcugacagagagcaacaagaaguuccugccauuccagcaguuuggccgggauaucgccgauaccacagacgccguuagagauccccagacacuggaaauccuggacaucaccccaugcagcuucggcggagugucugugaucaccccuggcaccaacaccagcaaucagguggcagugcuguaccagggcgugaacuguaccgaagugcccguggccauucacgccgaucagcugacaccuacauggcggguguacuccaccggcagcaauguguuucagaccagagccggcugucugaucggagccgagcacgugaacaauagcuacgagugcgacauccccaucggcgcuggcaucugugccagcuaccagacacagacaaacagccccagacgggcuagaagcguggccagccagagcaucauugccuacacaaugucucugggcgccgagaacagcguggccuacuccaacaacucuaucgcuauccccaccaacuucaccaucagcgugaccaccgagauccugccuguguccaugaccaagaccagcguggacugcaccauguacaucugcggcgauuccaccgagugcuccaaccugcugcugcaguacggcagcuucugcacccagcugaauagagcccugacagggaucgccguggaacaggacaagaacacccaagagguguucgcccaagugaagcaaaucuacaagaccccuccuaucaaggacuucggcggcuucaauuucagccagauucugcccgauccuagcaagcccagcaagcggagcuucaucgaggaccugcuguucaacaaagugacacuggccgacgccggcuucaucaagcaguauggcgauugucugggcgacauugccgccagggaucugauuugcgcccagaaguuuaacggacugacagugcugccuccucugcugaccgaugagaugaucgcccaguacacaucugcccugcuggccggcacaaucacaagcggcuggacauuuggagcuggcgccgcucugcagauccccuuugcuaugcagauggccuaccgguucaacggcaucggagugacccagaaugugcuguacgagaaccagaagcugaucgccaaccaguucaacagcgccaucggcaagauccaggacagccugagcagcacagcaagcgcccugggaaagcugcaggacguggucaaccagaaugcccaggcacugaacacccuggucaagcagcuguccuccaacuucggcgccaucagcucugugcugaacgauauccugagcagacuggacccuccugaggccgaggugcagaucgacagacugaucacaggcagacugcagagccuccagacauacgugacccagcagcugaucagagccgccgagauuagagccucugccaaucuggccgccaccaagaugucugagugugugcugggccagagcaagagaguggacuuuugcggcaagggcuaccaccugaugagcuucccucagucugccccucacggcgugguguuucugcacgugacauaugugcccgcucaagagaagaauuucaccaccgcuccagccaucugccacgacggcaaagcccacuuuccuagagaaggcguguucguguccaacggcacccauugguucgugacacagcggaacuucuacgagccccagaucaucaccaccgacaacaccuucgugucuggcaacugcgacguugugaucggcauugugaacaauaccguguacgacccucugcagcccgagcuggacagcuucaaagaggaacuggacaaguacuuuaagaaccacacaagccccgacguggaccugggcgauaucagcggaaucaaugccagcgucgugaacauccagaaagagaucgaccggcugaacgagguggccaagaaucugaacgagagccugaucgaccugcaagaacuggggaaguacgagcaguacaucaaguggcccugguacaucuggcugggcuuuaucgccggacugauugccaucgugauggucacaaucaugcuguguugcaugaccagcugcuguagcugccugaagggcuguuguagcuguggcagcugcugcaaguucgacgaggacgauucugagcccgugcugaagggcgugaaacugcacuacaccugaggacuaguuauaagacugacuagcccgaugggccucccaacgggcccuccuccccuccuugcaccgagauuaauaaaaaaaaaaaaaaaaaaaaaaaaaaaaaaaaaaaaaaaaaaaaaaaaaaaaaaaaaaaaaaaaugcaucccccccccccccccccccccccccccccccaaaggcucuuuucagagccaccagaauu

SEQ ID NO: 23372 - RNA, 4039 nt, Artificial Sequence
  SARS-CoV-2/Wuhan/WIV05/2019__EPI_ISL_402128 spike protein mRNA gc mod (1-1273)(K986P_V987P_N439K_D614G)
aggagaaagcuuaccauguucguguuucuggugcugcugccccugguguccagccagugugugaaccugaccaccagaacacagcugccuccagccuacaccaacagcuucaccagaggcguguacuaccccgacaagguguucagauccagcgugcugcacucuacccaggaccuguuccugccuuucuucagcaacgugaccugguuccacgccauccacguguccggcaccaauggcaccaagagauucgacaaccccgugcugcccuucaacgacgggguguacuuugccagcaccgagaaguccaacaucaucagaggcuggaucuucggcaccacacuggacagcaagacccagagccugcugaucgugaacaacgccaccaacguggucaucaaagugugcgaguuccaguucugcaacgaccccuuccugggcgucuacuaccacaagaacaacaagagcuggauggaaagcgaguuccggguguacagcagcgccaacaacugcaccuucgaguacgugucccagccuuuccugauggaccuggaaggcaagcagggcaacuucaagaaccugcgcgaguucguguucaagaacaucgacggcuacuucaaaaucuacagcaagcacaccccuaucaaccucgugcgggaucugccucagggcuucucugcucuggaaccccugguggaucugcccaucggcaucaacaucacccgguuucagacacugcuggcccugcacagaagcuaccugacaccuggcgauagcagcagcggauggacagcuggugccgccgcuuacuaugugggcuaccugcagccuagaaccuuccugcugaaguacaacgagaacggcaccaucaccgacgccguggauugugcucuggauccucugagcgagacaaagugcacccugaaguccuucaccguggaaaagggcaucuaccagaccagcaacuuccgggugcagcccaccgaauccaucgugcgguuccccaauaucaccaaucugugccccuucggcgagguguucaaugccaccagauucgccucuguguacgccuggaaccggaagcggaucagcaauugcguggccgacuacuccgugcuguacaacuccgccagcuucagcaccuucaagugcuacggcguguccccuaccaagcugaacgaccugugcuucacaaacguguacgccgacagcuucgugauccggggagaugaagugcggcagauugccccuggacagacaggcaagaucgccgacuacaacuacaagcugcccgacgacuucaccggcugugugauugccuggaacagcaagaaccuggacuccaaagucggcggcaacuacaauuaccuguaccggcuguuccggaaguccaaucugaagcccuucgagcgggacaucagcaccgaaaucuaucaggccggcagcaccccuugcaacggcguggaaggcuucaacugcuacuucccacugcaguccuacggcuuucagcccacaaauggcgugggcuaucagcccuacagagugguggugcugagcuucgaacugcugcaugcuccugccacagugugcggcccuaagaaaagcaccaaucucgugaagaacaaaugcgugaacuucaacuucaacggccugaccggcaccggcgugcugacagagagcaacaagaaguuccugccauuccagcaguuuggccgggauaucgccgauaccacagacgccguuagagauccccagacacuggaaauccuggacaucaccccaugcagcuucggcggagugucugugaucaccccuggcaccaacaccagcaaucagguggcagugcuguaccagggcgugaacuguaccgaagugcccguggccauucacgccgaucagcugacaccuacauggcggguguacuccaccggcagcaauguguuucagaccagagccggcugucugaucggagccgagcacgugaacaauagcuacgagugcgacauccccaucggcgcuggcaucugugccagcuaccagacacagacaaacagccccagacgggcuagaagcguggccagccagagcaucauugccuacacaaugucucugggcgccgagaacagcguggccuacuccaacaacucuaucgcuauccccaccaacuucaccaucagcgugaccaccgagauccugccuguguccaugaccaagaccagcguggacugcaccauguacaucugcggcgauuccaccgagugcuccaaccugcugcugcaguacggcagcuucugcacccagcugaauagagcccugacagggaucgccguggaacaggacaagaacacccaagagguguucgcccaagugaagcaaaucuacaagaccccuccuaucaaggacuucggcggcuucaauuucagccagauucugcccgauccuagcaagcccagcaagcggagcuucaucgaggaccugcuguucaacaaagugacacuggccgacgccggcuucaucaagcaguauggcgauugucugggcgacauugccgccagggaucugauuugcgcccagaaguuuaacggacugacagugcugccuccucugcugaccgaugagaugaucgcccaguacacaucugcccugcuggccggcacaaucacaagcggcuggacauuuggagcuggcgccgcucugcagauccccuuugcuaugcagauggccuaccgguucaacggcaucggagugacccagaaugugcuguacgagaaccagaagcugaucgccaaccaguucaacagcgccaucggcaagauccaggacagccugagcagcacagcaagcgcccugggaaagcugcaggacguggucaaccagaaugcccaggcacugaacacccuggucaagcagcuguccuccaacuucggcgccaucagcucugugcugaacgauauccugagcagacuggacccuccugaggccgaggugcagaucgacagacugaucacaggcagacugcagagccuccagacauacgugacccagcagcugaucagagccgccgagauuagagccucugccaaucuggccgccaccaagaugucugagugugugcugggccagagcaagagaguggacuuuugcggcaagggcuaccaccugaugagcuucccucagucugccccucacggcgugguguuucugcacgugacauaugugcccgcucaagagaagaauuucaccaccgcuccagccaucugccacgacggcaaagcccacuuuccuagagaaggcguguucguguccaacggcacccauugguucgugacacagcggaacuucuacgagccccagaucaucaccaccgacaacaccuucgugucuggcaacugcgacguugugaucggcauugugaacaauaccguguacgacccucugcagcccgagcuggacagcuucaaagaggaacuggacaaguacuuuaagaaccacacaagccccgacguggaccugggcgauaucagcggaaucaaugccagcgucgugaacauccagaaagagaucgaccggcugaacgagguggccaagaaucugaacgagagccugaucgaccugcaagaacuggggaaguacgagcaguacaucaaguggcccugguacaucuggcugggcuuuaucgccggacugauugccaucgugauggucacaaucaugcuguguugcaugaccagcugcuguagcugccugaagggcuguuguagcuguggcagcugcugcaaguucgacgaggacgauucugagcccgugcugaagggcgugaaacugcacuacaccugaggacuaguuauaagacugacuagcccgaugggccucccaacgggcccuccuccccuccuugcaccgagauuaauaaaaaaaaaaaaaaaaaaaaaaaaaaaaaaaaaaaaaaaaaaaaaaaaaaaaaaaaaaaaaaaaugcaucccccccccccccccccccccccccccccccaaaggcucuuuucagagccaccagaauu

SEQ ID NO: 23373 - RNA, 4039 nt, Artificial Sequence
  SARS-CoV-2/Wuhan/WIV05/2019__EPI_ISL_402128 spike protein mRNA gc mod (1-1273)(K986P_V987P_S477N_D614G)
aggagaaagcuuaccauguucguguuucuggugcugcugccccugguguccagccagugugugaaccugaccaccagaacacagcugccuccagccuacaccaacagcuucaccagaggcguguacuaccccgacaagguguucagauccagcgugcugcacucuacccaggaccuguuccugccuuucuucagcaacgugaccugguuccacgccauccacguguccggcaccaauggcaccaagagauucgacaaccccgugcugcccuucaacgacgggguguacuuugccagcaccgagaaguccaacaucaucagaggcuggaucuucggcaccacacuggacagcaagacccagagccugcugaucgugaacaacgccaccaacguggucaucaaagugugcgaguuccaguucugcaacgaccccuuccugggcgucuacuaccacaagaacaacaagagcuggauggaaagcgaguuccggguguacagcagcgccaacaacugcaccuucgaguacgugucccagccuuuccugauggaccuggaaggcaagcagggcaacuucaagaaccugcgcgaguucguguucaagaacaucgacggcuacuucaaaaucuacagcaagcacaccccuaucaaccucgugcgggaucugccucagggcuucucugcucuggaaccccugguggaucugcccaucggcaucaacaucacccgguuucagacacugcuggcccugcacagaagcuaccugacaccuggcgauagcagcagcggauggacagcuggugccgccgcuuacuaugugggcuaccugcagccuagaaccuuccugcugaaguacaacgagaacggcaccaucaccgacgccguggauugugcucuggauccucugagcgagacaaagugcacccugaaguccuucaccguggaaaagggcaucuaccagaccagcaacuuccgggugcagcccaccgaauccaucgugcgguuccccaauaucaccaaucugugccccuucggcgagguguucaaugccaccagauucgccucuguguacgccuggaaccggaagcggaucagcaauugcguggccgacuacuccgugcuguacaacuccgccagcuucagcaccuucaagugcuacggcguguccccuaccaagcugaacgaccugugcuucacaaacguguacgccgacagcuucgugauccggggagaugaagugcggcagauugccccuggacagacaggcaagaucgccgacuacaacuacaagcugcccgacgacuucaccggcugugugauugccuggaacagcaacaaccuggacuccaaagucggcggcaacuacaauuaccuguaccggcuguuccggaaguccaaucugaagcccuucgagcgggacaucagcaccgaaaucuaucaggccggcaacaccccuugcaacggcguggaaggcuucaacugcuacuucccacugcaguccuacggcuuucagcccacaaauggcgugggcuaucagcccuacagagugguggugcugagcuucgaacugcugcaugcuccugccacagugugcggcccuaagaaaagcaccaaucucgugaagaacaaaugcgugaacuucaacuucaacggccugaccggcaccggcgugcugacagagagcaacaagaaguuccugccauuccagcaguuuggccgggauaucgccgauaccacagacgccguuagagauccccagacacuggaaauccuggacaucaccccaugcagcuucggcggagugucugugaucaccccuggcaccaacaccagcaaucagguggcagugcuguaccagggcgugaacuguaccgaagugcccguggccauucacgccgaucagcugacaccuacauggcggguguacuccaccggcagcaauguguuucagaccagagccggcugucugaucggagccgagcacgugaacaauagcuacgagugcgacauccccaucggcgcuggcaucugugccagcuaccagacacagacaaacagccccagacgggcuagaagcguggccagccagagcaucauugccuacacaaugucucugggcgccgagaacagcguggccuacuccaacaacucuaucgcuauccccaccaacuucaccaucagcgugaccaccgagauccugccuguguccaugaccaagaccagcguggacugcaccauguacaucugcggcgauuccaccgagugcuccaaccugcugcugcaguacggcagcuucugcacccagcugaauagagcccugacagggaucgccguggaacaggacaagaacacccaagagguguucgcccaagugaagcaaaucuacaagaccccuccuaucaaggacuucggcggcuucaauuucagccagauucugcccgauccuagcaagcccagcaagcggagcuucaucgaggaccugcuguucaacaaagugacacuggccgacgccggcuucaucaagcaguauggcgauugucugggcgacauugccgccagggaucugauuugcgcccagaaguuuaacggacugacagugcugccuccucugcugaccgaugagaugaucgcccaguacacaucugcccugcuggccggcacaaucacaagcggcuggacauuuggagcuggcgccgcucugcagauccccuuugcuaugcagauggccuaccgguucaacggcaucggagugacccagaaugugcuguacgagaaccagaagcugaucgccaaccaguucaacagcgccaucggcaagauccaggacagccugagcagcacagcaagcgcccugggaaagcugcaggacguggucaaccagaaugcccaggcacugaacacccuggucaagcagcuguccuccaacuucggcgccaucagcucugugcugaacgauauccugagcagacuggacccuccugaggccgaggugcagaucgacagacugaucacaggcagacugcagagccuccagacauacgugacccagcagcugaucagagccgccgagauuagagccucugccaaucuggccgccaccaagaugucugagugugugcugggccagagcaagagaguggacuuuugcggcaagggcuaccaccugaugagcuucccucagucugccccucacggcgugguguuucugcacgugacauaugugcccgcucaagagaagaauuucaccaccgcuccagccaucugccacgacggcaaagcccacuuuccuagagaaggcguguucguguccaacggcacccauugguucgugacacagcggaacuucuacgagccccagaucaucaccaccgacaacaccuucgugucuggcaacugcgacguugugaucggcauugugaacaauaccguguacgacccucugcagcccgagcuggacagcuucaaagaggaacuggacaaguacuuuaagaaccacacaagccccgacguggaccugggcgauaucagcggaaucaaugccagcgucgugaacauccagaaagagaucgaccggcugaacgagguggccaagaaucugaacgagagccugaucgaccugcaagaacuggggaaguacgagcaguacaucaaguggcccugguacaucuggcugggcuuuaucgccggacugauugccaucgugauggucacaaucaugcuguguugcaugaccagcugcuguagcugccugaagggcuguuguagcuguggcagcugcugcaaguucgacgaggacgauucugagcccgugcugaagggcgugaaacugcacuacaccugaggacuaguuauaagacugacuagcccgaugggccucccaacgggcccuccuccccuccuugcaccgagauuaauaaaaaaaaaaaaaaaaaaaaaaaaaaaaaaaaaaaaaaaaaaaaaaaaaaaaaaaaaaaaaaaaugcaucccccccccccccccccccccccccccccccaaaggcucuuuucagagccaccagaauu

SEQ ID NO: 23374 - RNA, 4039 nt, Artificial Sequence
  SARS-CoV-2/Wuhan/WIV05/2019__EPI_ISL_402128 spike protein mRNA gc mod (1-1273)(K986P_V987P_N501Y_D614G)
aggagaaagcuuaccauguucguguuucuggugcugcugccccugguguccagccagugugugaaccugaccaccagaacacagcugccuccagccuacaccaacagcuucaccagaggcguguacuaccccgacaagguguucagauccagcgugcugcacucuacccaggaccuguuccugccuuucuucagcaacgugaccugguuccacgccauccacguguccggcaccaauggcaccaagagauucgacaaccccgugcugcccuucaacgacgggguguacuuugccagcaccgagaaguccaacaucaucagaggcuggaucuucggcaccacacuggacagcaagacccagagccugcugaucgugaacaacgccaccaacguggucaucaaagugugcgaguuccaguucugcaacgaccccuuccugggcgucuacuaccacaagaacaacaagagcuggauggaaagcgaguuccggguguacagcagcgccaacaacugcaccuucgaguacgugucccagccuuuccugauggaccuggaaggcaagcagggcaacuucaagaaccugcgcgaguucguguucaagaacaucgacggcuacuucaaaaucuacagcaagcacaccccuaucaaccucgugcgggaucugccucagggcuucucugcucuggaaccccugguggaucugcccaucggcaucaacaucacccgguuucagacacugcuggcccugcacagaagcuaccugacaccuggcgauagcagcagcggauggacagcuggugccgccgcuuacuaugugggcuaccugcagccuagaaccuuccugcugaaguacaacgagaacggcaccaucaccgacgccguggauugugcucuggauccucugagcgagacaaagugcacccugaaguccuucaccguggaaaagggcaucuaccagaccagcaacuuccgggugcagcccaccgaauccaucgugcgguuccccaauaucaccaaucugugccccuucggcgagguguucaaugccaccagauucgccucuguguacgccuggaaccggaagcggaucagcaauugcguggccgacuacuccgugcuguacaacuccgccagcuucagcaccuucaagugcuacggcguguccccuaccaagcugaacgaccugugcuucacaaacguguacgccgacagcuucgugauccggggagaugaagugcggcagauugccccuggacagacaggcaagaucgccgacuacaacuacaagcugcccgacgacuucaccggcugugugauugccuggaacagcaacaaccuggacuccaaagucggcggcaacuacaauuaccuguaccggcuguuccggaaguccaaucugaagcccuucgagcgggacaucagcaccgaaaucuaucaggccggcagcaccccuugcaacggcguggaaggcuucaacugcuacuucccacugcaguccuacggcuuucagcccacauacggcgugggcuaucagcccuacagagugguggugcugagcuucgaacugcugcaugcuccugccacagugugcggcccuaagaaaagcaccaaucucgugaagaacaaaugcgugaacuucaacuucaacggccugaccggcaccggcgugcugacagagagcaacaagaaguuccugccauuccagcaguuuggccgggauaucgccgauaccacagacgccguuagagauccccagacacuggaaauccuggacaucaccccaugcagcuucggcggagugucugugaucaccccuggcaccaacaccagcaaucagguggcagugcuguaccagggcgugaacuguaccgaagugcccguggccauucacgccgaucagcugacaccuacauggcggguguacuccaccggcagcaauguguuucagaccagagccggcugucugaucggagccgagcacgugaacaauagcuacgagugcgacauccccaucggcgcuggcaucugugccagcuaccagacacagacaaacagccccagacgggcuagaagcguggccagccagagcaucauugccuacacaaugucucugggcgccgagaacagcguggccuacuccaacaacucuaucgcuauccccaccaacuucaccaucagcgugaccaccgagauccugccuguguccaugaccaagaccagcguggacugcaccauguacaucugcggcgauuccaccgagugcuccaaccugcugcugcaguacggcagcuucugcacccagcugaauagagcccugacagggaucgccguggaacaggacaagaacacccaagagguguucgcccaagugaagcaaaucuacaagaccccuccuaucaaggacuucggcggcuucaauuucagccagauucugcccgauccuagcaagcccagcaagcggagcuucaucgaggaccugcuguucaacaaagugacacuggccgacgccggcuucaucaagcaguauggcgauugucugggcgacauugccgccagggaucugauuugcgcccagaaguuuaacggacugacagugcugccuccucugcugaccgaugagaugaucgcccaguacacaucugcccugcuggccggcacaaucacaagcggcuggacauuuggagcuggcgccgcucugcagauccccuuugcuaugcagauggccuaccgguucaacggcaucggagugacccagaaugugcuguacgagaaccagaagcugaucgccaaccaguucaacagcgccaucggcaagauccaggacagccugagcagcacagcaagcgcccugggaaagcugcaggacguggucaaccagaaugcccaggcacugaacacccuggucaagcagcuguccuccaacuucggcgccaucagcucugugcugaacgauauccugagcagacuggacccuccugaggccgaggugcagaucgacagacugaucacaggcagacugcagagccuccagacauacgugacccagcagcugaucagagccgccgagauuagagccucugccaaucuggccgccaccaagaugucugagugugugcugggccagagcaagagaguggacuuuugcggcaagggcuaccaccugaugagcuucccucagucugccccucacggcgugguguuucugcacgugacauaugugcccgcucaagagaagaauuucaccaccgcuccagccaucugccacgacggcaaagcccacuuuccuagagaaggcguguucguguccaacggcacccauugguucgugacacagcggaacuucuacgagccccagaucaucaccaccgacaacaccuucgugucuggcaacugcgacguugugaucggcauugugaacaauaccguguacgacccucugcagcccgagcuggacagcuucaaagaggaacuggacaaguacuuuaagaaccacacaagccccgacguggaccugggcgauaucagcggaaucaaugccagcgucgugaacauccagaaagagaucgaccggcugaacgagguggccaagaaucugaacgagagccugaucgaccugcaagaacuggggaaguacgagcaguacaucaaguggcccugguacaucuggcugggcuuuaucgccggacugauugccaucgugauggucacaaucaugcuguguugcaugaccagcugcuguagcugccugaagggcuguuguagcuguggcagcugcugcaaguucgacgaggacgauucugagcccgugcugaagggcgugaaacugcacuacaccugaggacuaguuauaagacugacuagcccgaugggccucccaacgggcccuccuccccuccuugcaccgagauuaauaaaaaaaaaaaaaaaaaaaaaaaaaaaaaaaaaaaaaaaaaaaaaaaaaaaaaaaaaaaaaaaaugcaucccccccccccccccccccccccccccccccaaaggcucuuuucagagccaccagaauu

SEQ ID NO: 23375 - RNA, 4033 nt, Artificial Sequence
  SARS-CoV-2/Wuhan/WIV05/2019__EPI_ISL_402128 spike protein mRNA gc mod (1-1273)(K986P_V987P_H69del_V70del_D614G)
aggagaaagcuuaccauguucguguuucuggugcugcugccccugguguccagccagugugugaaccugaccaccagaacacagcugccuccagccuacaccaacagcuucaccagaggcguguacuaccccgacaagguguucagauccagcgugcugcacucuacccaggaccuguuccugccuuucuucagcaacgugaccugguuccacgccaucuccggcaccaauggcaccaagagauucgacaaccccgugcugcccuucaacgacgggguguacuuugccagcaccgagaaguccaacaucaucagaggcuggaucuucggcaccacacuggacagcaagacccagagccugcugaucgugaacaacgccaccaacguggucaucaaagugugcgaguuccaguucugcaacgaccccuuccugggcgucuacuaccacaagaacaacaagagcuggauggaaagcgaguuccggguguacagcagcgccaacaacugcaccuucgaguacgugucccagccuuuccugauggaccuggaaggcaagcagggcaacuucaagaaccugcgcgaguucguguucaagaacaucgacggcuacuucaaaaucuacagcaagcacaccccuaucaaccucgugcgggaucugccucagggcuucucugcucuggaaccccugguggaucugcccaucggcaucaacaucacccgguuucagacacugcuggcccugcacagaagcuaccugacaccuggcgauagcagcagcggauggacagcuggugccgccgcuuacuaugugggcuaccugcagccuagaaccuuccugcugaaguacaacgagaacggcaccaucaccgacgccguggauugugcucuggauccucugagcgagacaaagugcacccugaaguccuucaccguggaaaagggcaucuaccagaccagcaacuuccgggugcagcccaccgaauccaucgugcgguuccccaauaucaccaaucugugccccuucggcgagguguucaaugccaccagauucgccucuguguacgccuggaaccggaagcggaucagcaauugcguggccgacuacuccgugcuguacaacuccgccagcuucagcaccuucaagugcuacggcguguccccuaccaagcugaacgaccugugcuucacaaacguguacgccgacagcuucgugauccggggagaugaagugcggcagauugccccuggacagacaggcaagaucgccgacuacaacuacaagcugcccgacgacuucaccggcugugugauugccuggaacagcaacaaccuggacuccaaagucggcggcaacuacaauuaccuguaccggcuguuccggaaguccaaucugaagcccuucgagcgggacaucagcaccgaaaucuaucaggccggcagcaccccuugcaacggcguggaaggcuucaacugcuacuucccacugcaguccuacggcuuucagcccacaaauggcgugggcuaucagcccuacagagugguggugcugagcuucgaacugcugcaugcuccugccacagugugcggcccuaagaaaagcaccaaucucgugaagaacaaaugcgugaacuucaacuucaacggccugaccggcaccggcgugcugacagagagcaacaagaaguuccugccauuccagcaguuuggccgggauaucgccgauaccacagacgccguuagagauccccagacacuggaaauccuggacaucaccccaugcagcuucggcggagugucugugaucaccccuggcaccaacaccagcaaucagguggcagugcuguaccagggcgugaacuguaccgaagugcccguggccauucacgccgaucagcugacaccuacauggcggguguacuccaccggcagcaauguguuucagaccagagccggcugucugaucggagccgagcacgugaacaauagcuacgagugcgacauccccaucggcgcuggcaucugugccagcuaccagacacagacaaacagccccagacgggcuagaagcguggccagccagagcaucauugccuacacaaugucucugggcgccgagaacagcguggccuacuccaacaacucuaucgcuauccccaccaacuucaccaucagcgugaccaccgagauccugccuguguccaugaccaagaccagcguggacugcaccauguacaucugcggcgauuccaccgagugcuccaaccugcugcugcaguacggcagcuucugcacccagcugaauagagcccugacagggaucgccguggaacaggacaagaacacccaagagguguucgcccaagugaagcaaaucuacaagaccccuccuaucaaggacuucggcggcuucaauuucagccagauucugcccgauccuagcaagcccagcaagcggagcuucaucgaggaccugcuguucaacaaagugacacuggccgacgccggcuucaucaagcaguauggcgauugucugggcgacauugccgccagggaucugauuugcgcccagaaguuuaacggacugacagugcugccuccucugcugaccgaugagaugaucgcccaguacacaucugcccugcuggccggcacaaucacaagcggcuggacauuuggagcuggcgccgcucugcagauccccuuugcuaugcagauggccuaccgguucaacggcaucggagugacccagaaugugcuguacgagaaccagaagcugaucgccaaccaguucaacagcgccaucggcaagauccaggacagccugagcagcacagcaagcgcccugggaaagcugcaggacguggucaaccagaaugcccaggcacugaacacccuggucaagcagcuguccuccaacuucggcgccaucagcucugugcugaacgauauccugagcagacuggacccuccugaggccgaggugcagaucgacagacugaucacaggcagacugcagagccuccagacauacgugacccagcagcugaucagagccgccgagauuagagccucugccaaucuggccgccaccaagaugucugagugugugcugggccagagcaagagaguggacuuuugcggcaagggcuaccaccugaugagcuucccucagucugccccucacggcgugguguuucugcacgugacauaugugcccgcucaagagaagaauuucaccaccgcuccagccaucugccacgacggcaaagcccacuuuccuagagaaggcguguucguguccaacggcacccauugguucgugacacagcggaacuucuacgagccccagaucaucaccaccgacaacaccuucgugucuggcaacugcgacguugugaucggcauugugaacaauaccguguacgacccucugcagcccgagcuggacagcuucaaagaggaacuggacaaguacuuuaagaaccacacaagccccgacguggaccugggcgauaucagcggaaucaaugccagcgucgugaacauccagaaagagaucgaccggcugaacgagguggccaagaaucugaacgagagccugaucgaccugcaagaacuggggaaguacgagcaguacaucaaguggcccugguacaucuggcugggcuuuaucgccggacugauugccaucgugauggucacaaucaugcuguguugcaugaccagcugcuguagcugccugaagggcuguuguagcuguggcagcugcugcaaguucgacgaggacgauucugagcccgugcugaagggcgugaaacugcacuacaccugaggacuaguuauaagacugacuagcccgaugggccucccaacgggcccuccuccccuccuugcaccgagauuaauaaaaaaaaaaaaaaaaaaaaaaaaaaaaaaaaaaaaaaaaaaaaaaaaaaaaaaaaaaaaaaaaugcaucccccccccccccccccccccccccccccccaaaggcucuuuucagagccaccagaauu

SEQ ID NO: 23376 - RNA, 4039 nt, Artificial Sequence
  SARS-CoV-2/Wuhan/WIV05/2019__EPI_ISL_402128 spike protein mRNA gc mod (1-1273)(K986P_V987P_Y453F_D614G)
aggagaaagcuuaccauguucguguuucuggugcugcugccccugguguccagccagugugugaaccugaccaccagaacacagcugccuccagccuacaccaacagcuucaccagaggcguguacuaccccgacaagguguucagauccagcgugcugcacucuacccaggaccuguuccugccuuucuucagcaacgugaccugguuccacgccauccacguguccggcaccaauggcaccaagagauucgacaaccccgugcugcccuucaacgacgggguguacuuugccagcaccgagaaguccaacaucaucagaggcuggaucuucggcaccacacuggacagcaagacccagagccugcugaucgugaacaacgccaccaacguggucaucaaagugugcgaguuccaguucugcaacgaccccuuccugggcgucuacuaccacaagaacaacaagagcuggauggaaagcgaguuccggguguacagcagcgccaacaacugcaccuucgaguacgugucccagccuuuccugauggaccuggaaggcaagcagggcaacuucaagaaccugcgcgaguucguguucaagaacaucgacggcuacuucaaaaucuacagcaagcacaccccuaucaaccucgugcgggaucugccucagggcuucucugcucuggaaccccugguggaucugcccaucggcaucaacaucacccgguuucagacacugcuggcccugcacagaagcuaccugacaccuggcgauagcagcagcggauggacagcuggugccgccgcuuacuaugugggcuaccugcagccuagaaccuuccugcugaaguacaacgagaacggcaccaucaccgacgccguggauugugcucuggauccucugagcgagacaaagugcacccugaaguccuucaccguggaaaagggcaucuaccagaccagcaacuuccgggugcagcccaccgaauccaucgugcgguuccccaauaucaccaaucugugccccuucggcgagguguucaaugccaccagauucgccucuguguacgccuggaaccggaagcggaucagcaauugcguggccgacuacuccgugcuguacaacuccgccagcuucagcaccuucaagugcuacggcguguccccuaccaagcugaacgaccugugcuucacaaacguguacgccgacagcuucgugauccggggagaugaagugcggcagauugccccuggacagacaggcaagaucgccgacuacaacuacaagcugcccgacgacuucaccggcugugugauugccuggaacagcaacaaccuggacuccaaagucggcggcaacuacaauuaccuguuccggcuguuccggaaguccaaucugaagcccuucgagcgggacaucagcaccgaaaucuaucaggccggcagcaccccuugcaacggcguggaaggcuucaacugcuacuucccacugcaguccuacggcuuucagcccacaaauggcgugggcuaucagcccuacagagugguggugcugagcuucgaacugcugcaugcuccugccacagugugcggcccuaagaaaagcaccaaucucgugaagaacaaaugcgugaacuucaacuucaacggccugaccggcaccggcgugcugacagagagcaacaagaaguuccugccauuccagcaguuuggccgggauaucgccgauaccacagacgccguuagagauccccagacacuggaaauccuggacaucaccccaugcagcuucggcggagugucugugaucaccccuggcaccaacaccagcaaucagguggcagugcuguaccagggcgugaacuguaccgaagugcccguggccauucacgccgaucagcugacaccuacauggcggguguacuccaccggcagcaauguguuucagaccagagccggcugucugaucggagccgagcacgugaacaauagcuacgagugcgacauccccaucggcgcuggcaucugugccagcuaccagacacagacaaacagccccagacgggcuagaagcguggccagccagagcaucauugccuacacaaugucucugggcgccgagaacagcguggccuacuccaacaacucuaucgcuauccccaccaacuucaccaucagcgugaccaccgagauccugccuguguccaugaccaagaccagcguggacugcaccauguacaucugcggcgauuccaccgagugcuccaaccugcugcugcaguacggcagcuucugcacccagcugaauagagcccugacagggaucgccguggaacaggacaagaacacccaagagguguucgcccaagugaagcaaaucuacaagaccccuccuaucaaggacuucggcggcuucaauuucagccagauucugcccgauccuagcaagcccagcaagcggagcuucaucgaggaccugcuguucaacaaagugacacuggccgacgccggcuucaucaagcaguauggcgauugucugggcgacauugccgccagggaucugauuugcgcccagaaguuuaacggacugacagugcugccuccucugcugaccgaugagaugaucgcccaguacacaucugcccugcuggccggcacaaucacaagcggcuggacauuuggagcuggcgccgcucugcagauccccuuugcuaugcagauggccuaccgguucaacggcaucggagugacccagaaugugcuguacgagaaccagaagcugaucgccaaccaguucaacagcgccaucggcaagauccaggacagccugagcagcacagcaagcgcccugggaaagcugcaggacguggucaaccagaaugcccaggcacugaacacccuggucaagcagcuguccuccaacuucggcgccaucagcucugugcugaacgauauccugagcagacuggacccuccugaggccgaggugcagaucgacagacugaucacaggcagacugcagagccuccagacauacgugacccagcagcugaucagagccgccgagauuagagccucugccaaucuggccgccaccaagaugucugagugugugcugggccagagcaagagaguggacuuuugcggcaagggcuaccaccugaugagcuucccucagucugccccucacggcgugguguuucugcacgugacauaugugcccgcucaagagaagaauuucaccaccgcuccagccaucugccacgacggcaaagcccacuuuccuagagaaggcguguucguguccaacggcacccauugguucgugacacagcggaacuucuacgagccccagaucaucaccaccgacaacaccuucgugucuggcaacugcgacguugugaucggcauugugaacaauaccguguacgacccucugcagcccgagcuggacagcuucaaagaggaacuggacaaguacuuuaagaaccacacaagccccgacguggaccugggcgauaucagcggaaucaaugccagcgucgugaacauccagaaagagaucgaccggcugaacgagguggccaagaaucugaacgagagccugaucgaccugcaagaacuggggaaguacgagcaguacaucaaguggcccugguacaucuggcugggcuuuaucgccggacugauugccaucgugauggucacaaucaugcuguguugcaugaccagcugcuguagcugccugaagggcuguuguagcuguggcagcugcugcaaguucgacgaggacgauucugagcccgugcugaagggcgugaaacugcacuacaccugaggacuaguuauaagacugacuagcccgaugggccucccaacgggcccuccuccccuccuugcaccgagauuaauaaaaaaaaaaaaaaaaaaaaaaaaaaaaaaaaaaaaaaaaaaaaaaaaaaaaaaaaaaaaaaaaugcaucccccccccccccccccccccccccccccccaaaggcucuuuucagagccaccagaauu

SEQ ID NO: 23377 - RNA, 4039 nt, Artificial Sequence
  SARS-CoV-2/Wuhan/WIV05/2019__EPI_ISL_402128 spike protein mRNA gc mod (1-1273)(K986P_V987P_D614G_I692V)
aggagaaagcuuaccauguucguguuucuggugcugcugccccugguguccagccagugugugaaccugaccaccagaacacagcugccuccagccuacaccaacagcuucaccagaggcguguacuaccccgacaagguguucagauccagcgugcugcacucuacccaggaccuguuccugccuuucuucagcaacgugaccugguuccacgccauccacguguccggcaccaauggcaccaagagauucgacaaccccgugcugcccuucaacgacgggguguacuuugccagcaccgagaaguccaacaucaucagaggcuggaucuucggcaccacacuggacagcaagacccagagccugcugaucgugaacaacgccaccaacguggucaucaaagugugcgaguuccaguucugcaacgaccccuuccugggcgucuacuaccacaagaacaacaagagcuggauggaaagcgaguuccggguguacagcagcgccaacaacugcaccuucgaguacgugucccagccuuuccugauggaccuggaaggcaagcagggcaacuucaagaaccugcgcgaguucguguucaagaacaucgacggcuacuucaaaaucuacagcaagcacaccccuaucaaccucgugcgggaucugccucagggcuucucugcucuggaaccccugguggaucugcccaucggcaucaacaucacccgguuucagacacugcuggcccugcacagaagcuaccugacaccuggcgauagcagcagcggauggacagcuggugccgccgcuuacuaugugggcuaccugcagccuagaaccuuccugcugaaguacaacgagaacggcaccaucaccgacgccguggauugugcucuggauccucugagcgagacaaagugcacccugaaguccuucaccguggaaaagggcaucuaccagaccagcaacuuccgggugcagcccaccgaauccaucgugcgguuccccaauaucaccaaucugugccccuucggcgagguguucaaugccaccagauucgccucuguguacgccuggaaccggaagcggaucagcaauugcguggccgacuacuccgugcuguacaacuccgccagcuucagcaccuucaagugcuacggcguguccccuaccaagcugaacgaccugugcuucacaaacguguacgccgacagcuucgugauccggggagaugaagugcggcagauugccccuggacagacaggcaagaucgccgacuacaacuacaagcugcccgacgacuucaccggcugugugauugccuggaacagcaacaaccuggacuccaaagucggcggcaacuacaauuaccuguaccggcuguuccggaaguccaaucugaagcccuucgagcgggacaucagcaccgaaaucuaucaggccggcagcaccccuugcaacggcguggaaggcuucaacugcuacuucccacugcaguccuacggcuuucagcccacaaauggcgugggcuaucagcccuacagagugguggugcugagcuucgaacugcugcaugcuccugccacagugugcggcccuaagaaaagcaccaaucucgugaagaacaaaugcgugaacuucaacuucaacggccugaccggcaccggcgugcugacagagagcaacaagaaguuccugccauuccagcaguuuggccgggauaucgccgauaccacagacgccguuagagauccccagacacuggaaauccuggacaucaccccaugcagcuucggcggagugucugugaucaccccuggcaccaacaccagcaaucagguggcagugcuguaccagggcgugaacuguaccgaagugcccguggccauucacgccgaucagcugacaccuacauggcggguguacuccaccggcagcaauguguuucagaccagagccggcugucugaucggagccgagcacgugaacaauagcuacgagugcgacauccccaucggcgcuggcaucugugccagcuaccagacacagacaaacagccccagacgggcuagaagcguggccagccagagcgugauugccuacacaaugucucugggcgccgagaacagcguggccuacuccaacaacucuaucgcuauccccaccaacuucaccaucagcgugaccaccgagauccugccuguguccaugaccaagaccagcguggacugcaccauguacaucugcggcgauuccaccgagugcuccaaccugcugcugcaguacggcagcuucugcacccagcugaauagagcccugacagggaucgccguggaacaggacaagaacacccaagagguguucgcccaagugaagcaaaucuacaagaccccuccuaucaaggacuucggcggcuucaauuucagccagauucugcccgauccuagcaagcccagcaagcggagcuucaucgaggaccugcuguucaacaaagugacacuggccgacgccggcuucaucaagcaguauggcgauugucugggcgacauugccgccagggaucugauuugcgcccagaaguuuaacggacugacagugcugccuccucugcugaccgaugagaugaucgcccaguacacaucugcccugcuggccggcacaaucacaagcggcuggacauuuggagcuggcgccgcucugcagauccccuuugcuaugcagauggccuaccgguucaacggcaucggagugacccagaaugugcuguacgagaaccagaagcugaucgccaaccaguucaacagcgccaucggcaagauccaggacagccugagcagcacagcaagcgcccugggaaagcugcaggacguggucaaccagaaugcccaggcacugaacacccuggucaagcagcuguccuccaacuucggcgccaucagcucugugcugaacgauauccugagcagacuggacccuccugaggccgaggugcagaucgacagacugaucacaggcagacugcagagccuccagacauacgugacccagcagcugaucagagccgccgagauuagagccucugccaaucuggccgccaccaagaugucugagugugugcugggccagagcaagagaguggacuuuugcggcaagggcuaccaccugaugagcuucccucagucugccccucacggcgugguguuucugcacgugacauaugugcccgcucaagagaagaauuucaccaccgcuccagccaucugccacgacggcaaagcccacuuuccuagagaaggcguguucguguccaacggcacccauugguucgugacacagcggaacuucuacgagccccagaucaucaccaccgacaacaccuucgugucuggcaacugcgacguugugaucggcauugugaacaauaccguguacgacccucugcagcccgagcuggacagcuucaaagaggaacuggacaaguacuuuaagaaccacacaagccccgacguggaccugggcgauaucagcggaaucaaugccagcgucgugaacauccagaaagagaucgaccggcugaacgagguggccaagaaucugaacgagagccugaucgaccugcaagaacuggggaaguacgagcaguacaucaaguggcccugguacaucuggcugggcuuuaucgccggacugauugccaucgugauggucacaaucaugcuguguugcaugaccagcugcuguagcugccugaagggcuguuguagcuguggcagcugcugcaaguucgacgaggacgauucugagcccgugcugaagggcgugaaacugcacuacaccugaggacuaguuauaagacugacuagcccgaugggccucccaacgggcccuccuccccuccuugcaccgagauuaauaaaaaaaaaaaaaaaaaaaaaaaaaaaaaaaaaaaaaaaaaaaaaaaaaaaaaaaaaaaaaaaaugcaucccccccccccccccccccccccccccccccaaaggcucuuuucagagccaccagaauu

SEQ ID NO: 23378 - RNA, 4039 nt, Artificial Sequence
  SARS-CoV-2/Wuhan/WIV05/2019__EPI_ISL_402128 spike protein mRNA gc mod (1-1273)(K986P_V987P_D614G_M1229I)
aggagaaagcuuaccauguucguguuucuggugcugcugccccugguguccagccagugugugaaccugaccaccagaacacagcugccuccagccuacaccaacagcuucaccagaggcguguacuaccccgacaagguguucagauccagcgugcugcacucuacccaggaccuguuccugccuuucuucagcaacgugaccugguuccacgccauccacguguccggcaccaauggcaccaagagauucgacaaccccgugcugcccuucaacgacgggguguacuuugccagcaccgagaaguccaacaucaucagaggcuggaucuucggcaccacacuggacagcaagacccagagccugcugaucgugaacaacgccaccaacguggucaucaaagugugcgaguuccaguucugcaacgaccccuuccugggcgucuacuaccacaagaacaacaagagcuggauggaaagcgaguuccggguguacagcagcgccaacaacugcaccuucgaguacgugucccagccuuuccugauggaccuggaaggcaagcagggcaacuucaagaaccugcgcgaguucguguucaagaacaucgacggcuacuucaaaaucuacagcaagcacaccccuaucaaccucgugcgggaucugccucagggcuucucugcucuggaaccccugguggaucugcccaucggcaucaacaucacccgguuucagacacugcuggcccugcacagaagcuaccugacaccuggcgauagcagcagcggauggacagcuggugccgccgcuuacuaugugggcuaccugcagccuagaaccuuccugcugaaguacaacgagaacggcaccaucaccgacgccguggauugugcucuggauccucugagcgagacaaagugcacccugaaguccuucaccguggaaaagggcaucuaccagaccagcaacuuccgggugcagcccaccgaauccaucgugcgguuccccaauaucaccaaucugugccccuucggcgagguguucaaugccaccagauucgccucuguguacgccuggaaccggaagcggaucagcaauugcguggccgacuacuccgugcuguacaacuccgccagcuucagcaccuucaagugcuacggcguguccccuaccaagcugaacgaccugugcuucacaaacguguacgccgacagcuucgugauccggggagaugaagugcggcagauugccccuggacagacaggcaagaucgccgacuacaacuacaagcugcccgacgacuucaccggcugugugauugccuggaacagcaacaaccuggacuccaaagucggcggcaacuacaauuaccuguaccggcuguuccggaaguccaaucugaagcccuucgagcgggacaucagcaccgaaaucuaucaggccggcagcaccccuugcaacggcguggaaggcuucaacugcuacuucccacugcaguccuacggcuuucagcccacaaauggcgugggcuaucagcccuacagagugguggugcugagcuucgaacugcugcaugcuccugccacagugugcggcccuaagaaaagcaccaaucucgugaagaacaaaugcgugaacuucaacuucaacggccugaccggcaccggcgugcugacagagagcaacaagaaguuccugccauuccagcaguuuggccgggauaucgccgauaccacagacgccguuagagauccccagacacuggaaauccuggacaucaccccaugcagcuucggcggagugucugugaucaccccuggcaccaacaccagcaaucagguggcagugcuguaccagggcgugaacuguaccgaagugcccguggccauucacgccgaucagcugacaccuacauggcggguguacuccaccggcagcaauguguuucagaccagagccggcugucugaucggagccgagcacgugaacaauagcuacgagugcgacauccccaucggcgcuggcaucugugccagcuaccagacacagacaaacagccccagacgggcuagaagcguggccagccagagcaucauugccuacacaaugucucugggcgccgagaacagcguggccuacuccaacaacucuaucgcuauccccaccaacuucaccaucagcgugaccaccgagauccugccuguguccaugaccaagaccagcguggacugcaccauguacaucugcggcgauuccaccgagugcuccaaccugcugcugcaguacggcagcuucugcacccagcugaauagagcccugacagggaucgccguggaacaggacaagaacacccaagagguguucgcccaagugaagcaaaucuacaagaccccuccuaucaaggacuucggcggcuucaauuucagccagauucugcccgauccuagcaagcccagcaagcggagcuucaucgaggaccugcuguucaacaaagugacacuggccgacgccggcuucaucaagcaguauggcgauugucugggcgacauugccgccagggaucugauuugcgcccagaaguuuaacggacugacagugcugccuccucugcugaccgaugagaugaucgcccaguacacaucugcccugcuggccggcacaaucacaagcggcuggacauuuggagcuggcgccgcucugcagauccccuuugcuaugcagauggccuaccgguucaacggcaucggagugacccagaaugugcuguacgagaaccagaagcugaucgccaaccaguucaacagcgccaucggcaagauccaggacagccugagcagcacagcaagcgcccugggaaagcugcaggacguggucaaccagaaugcccaggcacugaacacccuggucaagcagcuguccuccaacuucggcgccaucagcucugugcugaacgauauccugagcagacuggacccuccugaggccgaggugcagaucgacagacugaucacaggcagacugcagagccuccagacauacgugacccagcagcugaucagagccgccgagauuagagccucugccaaucuggccgccaccaagaugucugagugugugcugggccagagcaagagaguggacuuuugcggcaagggcuaccaccugaugagcuucccucagucugccccucacggcgugguguuucugcacgugacauaugugcccgcucaagagaagaauuucaccaccgcuccagccaucugccacgacggcaaagcccacuuuccuagagaaggcguguucguguccaacggcacccauugguucgugacacagcggaacuucuacgagccccagaucaucaccaccgacaacaccuucgugucuggcaacugcgacguugugaucggcauugugaacaauaccguguacgacccucugcagcccgagcuggacagcuucaaagaggaacuggacaaguacuuuaagaaccacacaagccccgacguggaccugggcgauaucagcggaaucaaugccagcgucgugaacauccagaaagagaucgaccggcugaacgagguggccaagaaucugaacgagagccugaucgaccugcaagaacuggggaaguacgagcaguacaucaaguggcccugguacaucuggcugggcuuuaucgccggacugauugccaucgugaucgucacaaucaugcuguguugcaugaccagcugcuguagcugccugaagggcuguuguagcuguggcagcugcugcaaguucgacgaggacgauucugagcccgugcugaagggcgugaaacugcacuacaccugaggacuaguuauaagacugacuagcccgaugggccucccaacgggcccuccuccccuccuugcaccgagauuaauaaaaaaaaaaaaaaaaaaaaaaaaaaaaaaaaaaaaaaaaaaaaaaaaaaaaaaaaaaaaaaaaugcaucccccccccccccccccccccccccccccccaaaggcucuuuucagagccaccagaauu

SEQ ID NO: 23379 - RNA, 4033 nt, Artificial Sequence
  SARS-CoV-2/Wuhan/WIV05/2019__EPI_ISL_402128 spike protein mRNA gc mod (1-1273)(K986P_V987P_H69del_V70del_A222V_Y453F_S477N_D614G_I692V)
aggagaaagcuuaccauguucguguuucuggugcugcugccccugguguccagccagugugugaaccugaccaccagaacacagcugccuccagccuacaccaacagcuucaccagaggcguguacuaccccgacaagguguucagauccagcgugcugcacucuacccaggaccuguuccugccuuucuucagcaacgugaccugguuccacgccaucuccggcaccaauggcaccaagagauucgacaaccccgugcugcccuucaacgacgggguguacuuugccagcaccgagaaguccaacaucaucagaggcuggaucuucggcaccacacuggacagcaagacccagagccugcugaucgugaacaacgccaccaacguggucaucaaagugugcgaguuccaguucugcaacgaccccuuccugggcgucuacuaccacaagaacaacaagagcuggauggaaagcgaguuccggguguacagcagcgccaacaacugcaccuucgaguacgugucccagccuuuccugauggaccuggaaggcaagcagggcaacuucaagaaccugcgcgaguucguguucaagaacaucgacggcuacuucaaaaucuacagcaagcacaccccuaucaaccucgugcgggaucugccucagggcuucucugugcuggaaccccugguggaucugcccaucggcaucaacaucacccgguuucagacacugcuggcccugcacagaagcuaccugacaccuggcgauagcagcagcggauggacagcuggugccgccgcuuacuaugugggcuaccugcagccuagaaccuuccugcugaaguacaacgagaacggcaccaucaccgacgccguggauugugcucuggauccucugagcgagacaaagugcacccugaaguccuucaccguggaaaagggcaucuaccagaccagcaacuuccgggugcagcccaccgaauccaucgugcgguuccccaauaucaccaaucugugccccuucggcgagguguucaaugccaccagauucgccucuguguacgccuggaaccggaagcggaucagcaauugcguggccgacuacuccgugcuguacaacuccgccagcuucagcaccuucaagugcuacggcguguccccuaccaagcugaacgaccugugcuucacaaacguguacgccgacagcuucgugauccggggagaugaagugcggcagauugccccuggacagacaggcaagaucgccgacuacaacuacaagcugcccgacgacuucaccggcugugugauugccuggaacagcaacaaccuggacuccaaagucggcggcaacuacaauuaccuguuccggcuguuccggaaguccaaucugaagcccuucgagcgggacaucagcaccgaaaucuaucaggccggcaacaccccuugcaacggcguggaaggcuucaacugcuacuucccacugcaguccuacggcuuucagcccacaaauggcgugggcuaucagcccuacagagugguggugcugagcuucgaacugcugcaugcuccugccacagugugcggcccuaagaaaagcaccaaucucgugaagaacaaaugcgugaacuucaacuucaacggccugaccggcaccggcgugcugacagagagcaacaagaaguuccugccauuccagcaguuuggccgggauaucgccgauaccacagacgccguuagagauccccagacacuggaaauccuggacaucaccccaugcagcuucggcggagugucugugaucaccccuggcaccaacaccagcaaucagguggcagugcuguaccagggcgugaacuguaccgaagugcccguggccauucacgccgaucagcugacaccuacauggcggguguacuccaccggcagcaauguguuucagaccagagccggcugucugaucggagccgagcacgugaacaauagcuacgagugcgacauccccaucggcgcuggcaucugugccagcuaccagacacagacaaacagccccagacgggcuagaagcguggccagccagagcgugauugccuacacaaugucucugggcgccgagaacagcguggccuacuccaacaacucuaucgcuauccccaccaacuucaccaucagcgugaccaccgagauccugccuguguccaugaccaagaccagcguggacugcaccauguacaucugcggcgauuccaccgagugcuccaaccugcugcugcaguacggcagcuucugcacccagcugaauagagcccugacagggaucgccguggaacaggacaagaacacccaagagguguucgcccaagugaagcaaaucuacaagaccccuccuaucaaggacuucggcggcuucaauuucagccagauucugcccgauccuagcaagcccagcaagcggagcuucaucgaggaccugcuguucaacaaagugacacuggccgacgccggcuucaucaagcaguauggcgauugucugggcgacauugccgccagggaucugauuugcgcccagaaguuuaacggacugacagugcugccuccucugcugaccgaugagaugaucgcccaguacacaucugcccugcuggccggcacaaucacaagcggcuggacauuuggagcuggcgccgcucugcagauccccuuugcuaugcagauggccuaccgguucaacggcaucggagugacccagaaugugcuguacgagaaccagaagcugaucgccaaccaguucaacagcgccaucggcaagauccaggacagccugagcagcacagcaagcgcccugggaaagcugcaggacguggucaaccagaaugcccaggcacugaacacccuggucaagcagcuguccuccaacuucggcgccaucagcucugugcugaacgauauccugagcagacuggacccuccugaggccgaggugcagaucgacagacugaucacaggcagacugcagagccuccagacauacgugacccagcagcugaucagagccgccgagauuagagccucugccaaucuggccgccaccaagaugucugagugugugcugggccagagcaagagaguggacuuuugcggcaagggcuaccaccugaugagcuucccucagucugccccucacggcgugguguuucugcacgugacauaugugcccgcucaagagaagaauuucaccaccgcuccagccaucugccacgacggcaaagcccacuuuccuagagaaggcguguucguguccaacggcacccauugguucgugacacagcggaacuucuacgagccccagaucaucaccaccgacaacaccuucgugucuggcaacugcgacguugugaucggcauugugaacaauaccguguacgacccucugcagcccgagcuggacagcuucaaagaggaacuggacaaguacuuuaagaaccacacaagccccgacguggaccugggcgauaucagcggaaucaaugccagcgucgugaacauccagaaagagaucgaccggcugaacgagguggccaagaaucugaacgagagccugaucgaccugcaagaacuggggaaguacgagcaguacaucaaguggcccugguacaucuggcugggcuuuaucgccggacugauugccaucgugauggucacaaucaugcuguguugcaugaccagcugcuguagcugccugaagggcuguuguagcuguggcagcugcugcaaguucgacgaggacgauucugagcccgugcugaagggcgugaaacugcacuacaccugaggacuaguuauaagacugacuagcccgaugggccucccaacgggcccuccuccccuccuugcaccgagauuaauaaaaaaaaaaaaaaaaaaaaaaaaaaaaaaaaaaaaaaaaaaaaaaaaaaaaaaaaaaaaaaaaugcaucccccccccccccccccccccccccccccccaaaggcucuuuucagagccaccagaauu

SEQ ID NO: 23380 - RNA, 4033 nt, Artificial Sequence
  SARS-CoV-2/Wuhan/WIV05/2019__EPI_ISL_402128 spike protein mRNA gc mod (1-1273)(K986P_V987P_H69del_V70del_Y453F_D614G_I692V_M1229I)
aggagaaagcuuaccauguucguguuucuggugcugcugccccugguguccagccagugugugaaccugaccaccagaacacagcugccuccagccuacaccaacagcuucaccagaggcguguacuaccccgacaagguguucagauccagcgugcugcacucuacccaggaccuguuccugccuuucuucagcaacgugaccugguuccacgccaucuccggcaccaauggcaccaagagauucgacaaccccgugcugcccuucaacgacgggguguacuuugccagcaccgagaaguccaacaucaucagaggcuggaucuucggcaccacacuggacagcaagacccagagccugcugaucgugaacaacgccaccaacguggucaucaaagugugcgaguuccaguucugcaacgaccccuuccugggcgucuacuaccacaagaacaacaagagcuggauggaaagcgaguuccggguguacagcagcgccaacaacugcaccuucgaguacgugucccagccuuuccugauggaccuggaaggcaagcagggcaacuucaagaaccugcgcgaguucguguucaagaacaucgacggcuacuucaaaaucuacagcaagcacaccccuaucaaccucgugcgggaucugccucagggcuucucugcucuggaaccccugguggaucugcccaucggcaucaacaucacccgguuucagacacugcuggcccugcacagaagcuaccugacaccuggcgauagcagcagcggauggacagcuggugccgccgcuuacuaugugggcuaccugcagccuagaaccuuccugcugaaguacaacgagaacggcaccaucaccgacgccguggauugugcucuggauccucugagcgagacaaagugcacccugaaguccuucaccguggaaaagggcaucuaccagaccagcaacuuccgggugcagcccaccgaauccaucgugcgguuccccaauaucaccaaucugugccccuucggcgagguguucaaugccaccagauucgccucuguguacgccuggaaccggaagcggaucagcaauugcguggccgacuacuccgugcuguacaacuccgccagcuucagcaccuucaagugcuacggcguguccccuaccaagcugaacgaccugugcuucacaaacguguacgccgacagcuucgugauccggggagaugaagugcggcagauugccccuggacagacaggcaagaucgccgacuacaacuacaagcugcccgacgacuucaccggcugugugauugccuggaacagcaacaaccuggacuccaaagucggcggcaacuacaauuaccuguuccggcuguuccggaaguccaaucugaagcccuucgagcgggacaucagcaccgaaaucuaucaggccggcagcaccccuugcaacggcguggaaggcuucaacugcuacuucccacugcaguccuacggcuuucagcccacaaauggcgugggcuaucagcccuacagagugguggugcugagcuucgaacugcugcaugcuccugccacagugugcggcccuaagaaaagcaccaaucucgugaagaacaaaugcgugaacuucaacuucaacggccugaccggcaccggcgugcugacagagagcaacaagaaguuccugccauuccagcaguuuggccgggauaucgccgauaccacagacgccguuagagauccccagacacuggaaauccuggacaucaccccaugcagcuucggcggagugucugugaucaccccuggcaccaacaccagcaaucagguggcagugcuguaccagggcgugaacuguaccgaagugcccguggccauucacgccgaucagcugacaccuacauggcggguguacuccaccggcagcaauguguuucagaccagagccggcugucugaucggagccgagcacgugaacaauagcuacgagugcgacauccccaucggcgcuggcaucugugccagcuaccagacacagacaaacagccccagacgggcuagaagcguggccagccagagcgugauugccuacacaaugucucugggcgccgagaacagcguggccuacuccaacaacucuaucgcuauccccaccaacuucaccaucagcgugaccaccgagauccugccuguguccaugaccaagaccagcguggacugcaccauguacaucugcggcgauuccaccgagugcuccaaccugcugcugcaguacggcagcuucugcacccagcugaauagagcccugacagggaucgccguggaacaggacaagaacacccaagagguguucgcccaagugaagcaaaucuacaagaccccuccuaucaaggacuucggcggcuucaauuucagccagauucugcccgauccuagcaagcccagcaagcggagcuucaucgaggaccugcuguucaacaaagugacacuggccgacgccggcuucaucaagcaguauggcgauugucugggcgacauugccgccagggaucugauuugcgcccagaaguuuaacggacugacagugcugccuccucugcugaccgaugagaugaucgcccaguacacaucugcccugcuggccggcacaaucacaagcggcuggacauuuggagcuggcgccgcucugcagauccccuuugcuaugcagauggccuaccgguucaacggcaucggagugacccagaaugugcuguacgagaaccagaagcugaucgccaaccaguucaacagcgccaucggcaagauccaggacagccugagcagcacagcaagcgcccugggaaagcugcaggacguggucaaccagaaugcccaggcacugaacacccuggucaagcagcuguccuccaacuucggcgccaucagcucugugcugaacgauauccugagcagacuggacccuccugaggccgaggugcagaucgacagacugaucacaggcagacugcagagccuccagacauacgugacccagcagcugaucagagccgccgagauuagagccucugccaaucuggccgccaccaagaugucugagugugugcugggccagagcaagagaguggacuuuugcggcaagggcuaccaccugaugagcuucccucagucugccccucacggcgugguguuucugcacgugacauaugugcccgcucaagagaagaauuucaccaccgcuccagccaucugccacgacggcaaagcccacuuuccuagagaaggcguguucguguccaacggcacccauugguucgugacacagcggaacuucuacgagccccagaucaucaccaccgacaacaccuucgugucuggcaacugcgacguugugaucggcauugugaacaauaccguguacgacccucugcagcccgagcuggacagcuucaaagaggaacuggacaaguacuuuaagaaccacacaagccccgacguggaccugggcgauaucagcggaaucaaugccagcgucgugaacauccagaaagagaucgaccggcugaacgagguggccaagaaucugaacgagagccugaucgaccugcaagaacuggggaaguacgagcaguacaucaaguggcccugguacaucuggcugggcuuuaucgccggacugauugccaucgugaucgucacaaucaugcuguguugcaugaccagcugcuguagcugccugaagggcuguuguagcuguggcagcugcugcaaguucgacgaggacgauucugagcccgugcugaagggcgugaaacugcacuacaccugaggacuaguuauaagacugacuagcccgaugggccucccaacgggcccuccuccccuccuugcaccgagauuaauaaaaaaaaaaaaaaaaaaaaaaaaaaaaaaaaaaaaaaaaaaaaaaaaaaaaaaaaaaaaaaaaugcaucccccccccccccccccccccccccccccccaaaggcucuuuucagagccaccagaauu

SEQ ID NO: 23381 - RNA, 4030 nt, Artificial Sequence
  SARS-CoV-2/Wuhan/WIV05/2019__EPI_ISL_402128 spike protein mRNA gc mod (1-1273)(K986P_V987P_K986P_V987P_H69del_V70del_Y144del_N501Y_A570 D_D614G_P681H_T716I_S982A_D1118H)
aggagaaagcuuaccauguucguguuucuggugcugcugccccugguguccagccagugugugaaccugaccaccagaacacagcugccuccagccuacaccaacagcuucaccagaggcguguacuaccccgacaagguguucagauccagcgugcugcacucuacccaggaccuguuccugccuuucuucagcaacgugaccugguuccacgccaucuccggcaccaauggcaccaagagauucgacaaccccgugcugcccuucaacgacgggguguacuuugccagcaccgagaaguccaacaucaucagaggcuggaucuucggcaccacacuggacagcaagacccagagccugcugaucgugaacaacgccaccaacguggucaucaaagugugcgaguuccaguucugcaacgaccccuuccugggcgucuaccacaagaacaacaagagcuggauggaaagcgaguuccggguguacagcagcgccaacaacugcaccuucgaguacgugucccagccuuuccugauggaccuggaaggcaagcagggcaacuucaagaaccugcgcgaguucguguucaagaacaucgacggcuacuucaaaaucuacagcaagcacaccccuaucaaccucgugcgggaucugccucagggcuucucugcucuggaaccccugguggaucugcccaucggcaucaacaucacccgguuucagacacugcuggcccugcacagaagcuaccugacaccuggcgauagcagcagcggauggacagcuggugccgccgcuuacuaugugggcuaccugcagccuagaaccuuccugcugaaguacaacgagaacggcaccaucaccgacgccguggauugugcucuggauccucugagcgagacaaagugcacccugaaguccuucaccguggaaaagggcaucuaccagaccagcaacuuccgggugcagcccaccgaauccaucgugcgguuccccaauaucaccaaucugugccccuucggcgagguguucaaugccaccagauucgccucuguguacgccuggaaccggaagcggaucagcaauugcguggccgacuacuccgugcuguacaacuccgccagcuucagcaccuucaagugcuacggcguguccccuaccaagcugaacgaccugugcuucacaaacguguacgccgacagcuucgugauccggggagaugaagugcggcagauugccccuggacagacaggcaagaucgccgacuacaacuacaagcugcccgacgacuucaccggcugugugauugccuggaacagcaacaaccuggacuccaaagucggcggcaacuacaauuaccuguaccggcuguuccggaaguccaaucugaagcccuucgagcgggacaucagcaccgaaaucuaucaggccggcagcaccccuugcaacggcguggaaggcuucaacugcuacuucccacugcaguccuacggcuuucagcccacauacggcgugggcuaucagcccuacagagugguggugcugagcuucgaacugcugcaugcuccugccacagugugcggcccuaagaaaagcaccaaucucgugaagaacaaaugcgugaacuucaacuucaacggccugaccggcaccggcgugcugacagagagcaacaagaaguuccugccauuccagcaguuuggccgggauaucgacgauaccacagacgccguuagagauccccagacacuggaaauccuggacaucaccccaugcagcuucggcggagugucugugaucaccccuggcaccaacaccagcaaucagguggcagugcuguaccagggcgugaacuguaccgaagugcccguggccauucacgccgaucagcugacaccuacauggcggguguacuccaccggcagcaauguguuucagaccagagccggcugucugaucggagccgagcacgugaacaauagcuacgagugcgacauccccaucggcgcuggcaucugugccagcuaccagacacagacaaacagccacagacgggcuagaagcguggccagccagagcaucauugccuacacaaugucucugggcgccgagaacagcguggccuacuccaacaacucuaucgcuauccccaucaacuucaccaucagcgugaccaccgagauccugccuguguccaugaccaagaccagcguggacugcaccauguacaucugcggcgauuccaccgagugcuccaaccugcugcugcaguacggcagcuucugcacccagcugaauagagcccugacagggaucgccguggaacaggacaagaacacccaagagguguucgcccaagugaagcaaaucuacaagaccccuccuaucaaggacuucggcggcuucaauuucagccagauucugcccgauccuagcaagcccagcaagcggagcuucaucgaggaccugcuguucaacaaagugacacuggccgacgccggcuucaucaagcaguauggcgauugucugggcgacauugccgccagggaucugauuugcgcccagaaguuuaacggacugacagugcugccuccucugcugaccgaugagaugaucgcccaguacacaucugcccugcuggccggcacaaucacaagcggcuggacauuuggagcuggcgccgcucugcagauccccuuugcuaugcagauggccuaccgguucaacggcaucggagugacccagaaugugcuguacgagaaccagaagcugaucgccaaccaguucaacagcgccaucggcaagauccaggacagccugagcagcacagcaagcgcccugggaaagcugcaggacguggucaaccagaaugcccaggcacugaacacccuggucaagcagcuguccuccaacuucggcgccaucagcucugugcugaacgauauccuggccagacuggacccuccugaggccgaggugcagaucgacagacugaucacaggcagacugcagagccuccagacauacgugacccagcagcugaucagagccgccgagauuagagccucugccaaucuggccgccaccaagaugucugagugugugcugggccagagcaagagaguggacuuuugcggcaagggcuaccaccugaugagcuucccucagucugccccucacggcgugguguuucugcacgugacauaugugcccgcucaagagaagaauuucaccaccgcuccagccaucugccacgacggcaaagcccacuuuccuagagaaggcguguucguguccaacggcacccauugguucgugacacagcggaacuucuacgagccccagaucaucaccacccacaacaccuucgugucuggcaacugcgacguugugaucggcauugugaacaauaccguguacgacccucugcagcccgagcuggacagcuucaaagaggaacuggacaaguacuuuaagaaccacacaagccccgacguggaccugggcgauaucagcggaaucaaugccagcgucgugaacauccagaaagagaucgaccggcugaacgagguggccaagaaucugaacgagagccugaucgaccugcaagaacuggggaaguacgagcaguacaucaaguggcccugguacaucuggcugggcuuuaucgccggacugauugccaucgugauggucacaaucaugcuguguugcaugaccagcugcuguagcugccugaagggcuguuguagcuguggcagcugcugcaaguucgacgaggacgauucugagcccgugcugaagggcgugaaacugcacuacaccugaggacuaguuauaagacugacuagcccgaugggccucccaacgggcccuccuccccuccuugcaccgagauuaauaaaaaaaaaaaaaaaaaaaaaaaaaaaaaaaaaaaaaaaaaaaaaaaaaaaaaaaaaaaaaaaaugcaucccccccccccccccccccccccccccccccaaaggcucuuuucagagccaccagaauu

SEQ ID NO: 23382 - RNA, 4039 nt, Artificial Sequence
  SARS-CoV-2/Wuhan/WIV05/2019__EPI_ISL_402128 spike protein mRNA gc mod (1-1273)(K986P_V987P_K986P_V987P_K417N_E484K_N501Y_D614G)
aggagaaagcuuaccauguucguguuucuggugcugcugccccugguguccagccagugugugaaccugaccaccagaacacagcugccuccagccuacaccaacagcuucaccagaggcguguacuaccccgacaagguguucagauccagcgugcugcacucuacccaggaccuguuccugccuuucuucagcaacgugaccugguuccacgccauccacguguccggcaccaauggcaccaagagauucgacaaccccgugcugcccuucaacgacgggguguacuuugccagcaccgagaaguccaacaucaucagaggcuggaucuucggcaccacacuggacagcaagacccagagccugcugaucgugaacaacgccaccaacguggucaucaaagugugcgaguuccaguucugcaacgaccccuuccugggcgucuacuaccacaagaacaacaagagcuggauggaaagcgaguuccggguguacagcagcgccaacaacugcaccuucgaguacgugucccagccuuuccugauggaccuggaaggcaagcagggcaacuucaagaaccugcgcgaguucguguucaagaacaucgacggcuacuucaaaaucuacagcaagcacaccccuaucaaccucgugcgggaucugccucagggcuucucugcucuggaaccccugguggaucugcccaucggcaucaacaucacccgguuucagacacugcuggcccugcacagaagcuaccugacaccuggcgauagcagcagcggauggacagcuggugccgccgcuuacuaugugggcuaccugcagccuagaaccuuccugcugaaguacaacgagaacggcaccaucaccgacgccguggauugugcucuggauccucugagcgagacaaagugcacccugaaguccuucaccguggaaaagggcaucuaccagaccagcaacuuccgggugcagcccaccgaauccaucgugcgguuccccaauaucaccaaucugugccccuucggcgagguguucaaugccaccagauucgccucuguguacgccuggaaccggaagcggaucagcaauugcguggccgacuacuccgugcuguacaacuccgccagcuucagcaccuucaagugcuacggcguguccccuaccaagcugaacgaccugugcuucacaaacguguacgccgacagcuucgugauccggggagaugaagugcggcagauugccccuggacagacaggcaacaucgccgacuacaacuacaagcugcccgacgacuucaccggcugugugauugccuggaacagcaacaaccuggacuccaaagucggcggcaacuacaauuaccuguaccggcuguuccggaaguccaaucugaagcccuucgagcgggacaucagcaccgaaaucuaucaggccggcagcaccccuugcaacggcgugaagggcuucaacugcuacuucccacugcaguccuacggcuuucagcccacauacggcgugggcuaucagcccuacagagugguggugcugagcuucgaacugcugcaugcuccugccacagugugcggcccuaagaaaagcaccaaucucgugaagaacaaaugcgugaacuucaacuucaacggccugaccggcaccggcgugcugacagagagcaacaagaaguuccugccauuccagcaguuuggccgggauaucgccgauaccacagacgccguuagagauccccagacacuggaaauccuggacaucaccccaugcagcuucggcggagugucugugaucaccccuggcaccaacaccagcaaucagguggcagugcuguaccagggcgugaacuguaccgaagugcccguggccauucacgccgaucagcugacaccuacauggcggguguacuccaccggcagcaauguguuucagaccagagccggcugucugaucggagccgagcacgugaacaauagcuacgagugcgacauccccaucggcgcuggcaucugugccagcuaccagacacagacaaacagccccagacgggcuagaagcguggccagccagagcaucauugccuacacaaugucucugggcgccgagaacagcguggccuacuccaacaacucuaucgcuauccccaccaacuucaccaucagcgugaccaccgagauccugccuguguccaugaccaagaccagcguggacugcaccauguacaucugcggcgauuccaccgagugcuccaaccugcugcugcaguacggcagcuucugcacccagcugaauagagcccugacagggaucgccguggaacaggacaagaacacccaagagguguucgcccaagugaagcaaaucuacaagaccccuccuaucaaggacuucggcggcuucaauuucagccagauucugcccgauccuagcaagcccagcaagcggagcuucaucgaggaccugcuguucaacaaagugacacuggccgacgccggcuucaucaagcaguauggcgauugucugggcgacauugccgccagggaucugauuugcgcccagaaguuuaacggacugacagugcugccuccucugcugaccgaugagaugaucgcccaguacacaucugcccugcuggccggcacaaucacaagcggcuggacauuuggagcuggcgccgcucugcagauccccuuugcuaugcagauggccuaccgguucaacggcaucggagugacccagaaugugcuguacgagaaccagaagcugaucgccaaccaguucaacagcgccaucggcaagauccaggacagccugagcagcacagcaagcgcccugggaaagcugcaggacguggucaaccagaaugcccaggcacugaacacccuggucaagcagcuguccuccaacuucggcgccaucagcucugugcugaacgauauccugagcagacuggacccuccugaggccgaggugcagaucgacagacugaucacaggcagacugcagagccuccagacauacgugacccagcagcugaucagagccgccgagauuagagccucugccaaucuggccgccaccaagaugucugagugugugcugggccagagcaagagaguggacuuuugcggcaagggcuaccaccugaugagcuucccucagucugccccucacggcgugguguuucugcacgugacauaugugcccgcucaagagaagaauuucaccaccgcuccagccaucugccacgacggcaaagcccacuuuccuagagaaggcguguucguguccaacggcacccauugguucgugacacagcggaacuucuacgagccccagaucaucaccaccgacaacaccuucgugucuggcaacugcgacguugugaucggcauugugaacaauaccguguacgacccucugcagcccgagcuggacagcuucaaagaggaacuggacaaguacuuuaagaaccacacaagccccgacguggaccugggcgauaucagcggaaucaaugccagcgucgugaacauccagaaagagaucgaccggcugaacgagguggccaagaaucugaacgagagccugaucgaccugcaagaacuggggaaguacgagcaguacaucaaguggcccugguacaucuggcugggcuuuaucgccggacugauugccaucgugauggucacaaucaugcuguguugcaugaccagcugcuguagcugccugaagggcuguuguagcuguggcagcugcugcaaguucgacgaggacgauucugagcccgugcugaagggcgugaaacugcacuacaccugaggacuaguuauaagacugacuagcccgaugggccucccaacgggcccuccuccccuccuugcaccgagauuaauaaaaaaaaaaaaaaaaaaaaaaaaaaaaaaaaaaaaaaaaaaaaaaaaaaaaaaaaaaaaaaaaugcaucccccccccccccccccccccccccccccccaaaggcucuuuucagagccaccagaauu

SEQ ID NO: 23383 - RNA, 4030 nt, Artificial Sequence
  SARS-CoV-2/Wuhan/WIV05/2019__EPI_ISL_402128 spike protein mRNA gc mod (1-1273)(K986P_V987P_K986P_V987P_L18F_D80A_D215G_L242del_A243del_ L244del_R246I_K417N_E484K_N501Y_D614G_A701V)
aggagaaagcuuaccauguucguguuucuggugcugcugccccugguguccagccagugugugaacuucaccaccagaacacagcugccuccagccuacaccaacagcuucaccagaggcguguacuaccccgacaagguguucagauccagcgugcugcacucuacccaggaccuguuccugccuuucuucagcaacgugaccugguuccacgccauccacguguccggcaccaauggcaccaagagauucgccaaccccgugcugcccuucaacgacgggguguacuuugccagcaccgagaaguccaacaucaucagaggcuggaucuucggcaccacacuggacagcaagacccagagccugcugaucgugaacaacgccaccaacguggucaucaaagugugcgaguuccaguucugcaacgaccccuuccugggcgucuacuaccacaagaacaacaagagcuggauggaaagcgaguuccggguguacagcagcgccaacaacugcaccuucgaguacgugucccagccuuuccugauggaccuggaaggcaagcagggcaacuucaagaaccugcgcgaguucguguucaagaacaucgacggcuacuucaaaaucuacagcaagcacaccccuaucaaccucgugcggggccugccucagggcuucucugcucuggaaccccugguggaucugcccaucggcaucaacaucacccgguuucagacacugcacaucagcuaccugacaccuggcgauagcagcagcggauggacagcuggugccgccgcuuacuaugugggcuaccugcagccuagaaccuuccugcugaaguacaacgagaacggcaccaucaccgacgccguggauugugcucuggauccucugagcgagacaaagugcacccugaaguccuucaccguggaaaagggcaucuaccagaccagcaacuuccgggugcagcccaccgaauccaucgugcgguuccccaauaucaccaaucugugccccuucggcgagguguucaaugccaccagauucgccucuguguacgccuggaaccggaagcggaucagcaauugcguggccgacuacuccgugcuguacaacuccgccagcuucagcaccuucaagugcuacggcguguccccuaccaagcugaacgaccugugcuucacaaacguguacgccgacagcuucgugauccggggagaugaagugcggcagauugccccuggacagacaggcaacaucgccgacuacaacuacaagcugcccgacgacuucaccggcugugugauugccuggaacagcaacaaccuggacuccaaagucggcggcaacuacaauuaccuguaccggcuguuccggaaguccaaucugaagcccuucgagcgggacaucagcaccgaaaucuaucaggccggcagcaccccuugcaacggcgugaagggcuucaacugcuacuucccacugcaguccuacggcuuucagcccacauacggcgugggcuaucagcccuacagagugguggugcugagcuucgaacugcugcaugcuccugccacagugugcggcccuaagaaaagcaccaaucucgugaagaacaaaugcgugaacuucaacuucaacggccugaccggcaccggcgugcugacagagagcaacaagaaguuccugccauuccagcaguuuggccgggauaucgccgauaccacagacgccguuagagauccccagacacuggaaauccuggacaucaccccaugcagcuucggcggagugucugugaucaccccuggcaccaacaccagcaaucagguggcagugcuguaccagggcgugaacuguaccgaagugcccguggccauucacgccgaucagcugacaccuacauggcggguguacuccaccggcagcaauguguuucagaccagagccggcugucugaucggagccgagcacgugaacaauagcuacgagugcgacauccccaucggcgcuggcaucugugccagcuaccagacacagacaaacagccccagacgggcuagaagcguggccagccagagcaucauugccuacacaaugucucugggcguggagaacagcguggccuacuccaacaacucuaucgcuauccccaccaacuucaccaucagcgugaccaccgagauccugccuguguccaugaccaagaccagcguggacugcaccauguacaucugcggcgauuccaccgagugcuccaaccugcugcugcaguacggcagcuucugcacccagcugaauagagcccugacagggaucgccguggaacaggacaagaacacccaagagguguucgcccaagugaagcaaaucuacaagaccccuccuaucaaggacuucggcggcuucaauuucagccagauucugcccgauccuagcaagcccagcaagcggagcuucaucgaggaccugcuguucaacaaagugacacuggccgacgccggcuucaucaagcaguauggcgauugucugggcgacauugccgccagggaucugauuugcgcccagaaguuuaacggacugacagugcugccuccucugcugaccgaugagaugaucgcccaguacacaucugcccugcuggccggcacaaucacaagcggcuggacauuuggagcuggcgccgcucugcagauccccuuugcuaugcagauggccuaccgguucaacggcaucggagugacccagaaugugcuguacgagaaccagaagcugaucgccaaccaguucaacagcgccaucggcaagauccaggacagccugagcagcacagcaagcgcccugggaaagcugcaggacguggucaaccagaaugcccaggcacugaacacccuggucaagcagcuguccuccaacuucggcgccaucagcucugugcugaacgauauccugagcagacuggacccuccugaggccgaggugcagaucgacagacugaucacaggcagacugcagagccuccagacauacgugacccagcagcugaucagagccgccgagauuagagccucugccaaucuggccgccaccaagaugucugagugugugcugggccagagcaagagaguggacuuuugcggcaagggcuaccaccugaugagcuucccucagucugccccucacggcgugguguuucugcacgugacauaugugcccgcucaagagaagaauuucaccaccgcuccagccaucugccacgacggcaaagcccacuuuccuagagaaggcguguucguguccaacggcacccauugguucgugacacagcggaacuucuacgagccccagaucaucaccaccgacaacaccuucgugucuggcaacugcgacguugugaucggcauugugaacaauaccguguacgacccucugcagcccgagcuggacagcuucaaagaggaacuggacaaguacuuuaagaaccacacaagccccgacguggaccugggcgauaucagcggaaucaaugccagcgucgugaacauccagaaagagaucgaccggcugaacgagguggccaagaaucugaacgagagccugaucgaccugcaagaacuggggaaguacgagcaguacaucaaguggcccugguacaucuggcugggcuuuaucgccggacugauugccaucgugauggucacaaucaugcuguguugcaugaccagcugcuguagcugccugaagggcuguuguagcuguggcagcugcugcaaguucgacgaggacgauucugagcccgugcugaagggcgugaaacugcacuacaccugaggacuaguuauaagacugacuagcccgaugggccucccaacgggcccuccuccccuccuugcaccgagauuaauaaaaaaaaaaaaaaaaaaaaaaaaaaaaaaaaaaaaaaaaaaaaaaaaaaaaaaaaaaaaaaaaugcaucccccccccccccccccccccccccccccccaaaggcucuuuucagagccaccagaauu

SEQ ID NO: 23384 - RNA, 4039 nt, Artificial Sequence
  SARS-CoV-2/Wuhan/WIV05/2019__EPI_ISL_402128 spike protein mRNA gc mod (1-1273)(K986P_V987P_K986P_V987P_E484K_D614G)
aggagaaagcuuaccauguucguguuucuggugcugcugccccugguguccagccagugugugaaccugaccaccagaacacagcugccuccagccuacaccaacagcuucaccagaggcguguacuaccccgacaagguguucagauccagcgugcugcacucuacccaggaccuguuccugccuuucuucagcaacgugaccugguuccacgccauccacguguccggcaccaauggcaccaagagauucgacaaccccgugcugcccuucaacgacgggguguacuuugccagcaccgagaaguccaacaucaucagaggcuggaucuucggcaccacacuggacagcaagacccagagccugcugaucgugaacaacgccaccaacguggucaucaaagugugcgaguuccaguucugcaacgaccccuuccugggcgucuacuaccacaagaacaacaagagcuggauggaaagcgaguuccggguguacagcagcgccaacaacugcaccuucgaguacgugucccagccuuuccugauggaccuggaaggcaagcagggcaacuucaagaaccugcgcgaguucguguucaagaacaucgacggcuacuucaaaaucuacagcaagcacaccccuaucaaccucgugcgggaucugccucagggcuucucugcucuggaaccccugguggaucugcccaucggcaucaacaucacccgguuucagacacugcuggcccugcacagaagcuaccugacaccuggcgauagcagcagcggauggacagcuggugccgccgcuuacuaugugggcuaccugcagccuagaaccuuccugcugaaguacaacgagaacggcaccaucaccgacgccguggauugugcucuggauccucugagcgagacaaagugcacccugaaguccuucaccguggaaaagggcaucuaccagaccagcaacuuccgggugcagcccaccgaauccaucgugcgguuccccaauaucaccaaucugugccccuucggcgagguguucaaugccaccagauucgccucuguguacgccuggaaccggaagcggaucagcaauugcguggccgacuacuccgugcuguacaacuccgccagcuucagcaccuucaagugcuacggcguguccccuaccaagcugaacgaccugugcuucacaaacguguacgccgacagcuucgugauccggggagaugaagugcggcagauugccccuggacagacaggcaagaucgccgacuacaacuacaagcugcccgacgacuucaccggcugugugauugccuggaacagcaacaaccuggacuccaaagucggcggcaacuacaauuaccuguaccggcuguuccggaaguccaaucugaagcccuucgagcgggacaucagcaccgaaaucuaucaggccggcagcaccccuugcaacggcgugaagggcuucaacugcuacuucccacugcaguccuacggcuuucagcccacaaauggcgugggcuaucagcccuacagagugguggugcugagcuucgaacugcugcaugcuccugccacagugugcggcccuaagaaaagcaccaaucucgugaagaacaaaugcgugaacuucaacuucaacggccugaccggcaccggcgugcugacagagagcaacaagaaguuccugccauuccagcaguuuggccgggauaucgccgauaccacagacgccguuagagauccccagacacuggaaauccuggacaucaccccaugcagcuucggcggagugucugugaucaccccuggcaccaacaccagcaaucagguggcagugcuguaccagggcgugaacuguaccgaagugcccguggccauucacgccgaucagcugacaccuacauggcggguguacuccaccggcagcaauguguuucagaccagagccggcugucugaucggagccgagcacgugaacaauagcuacgagugcgacauccccaucggcgcuggcaucugugccagcuaccagacacagacaaacagccccagacgggcuagaagcguggccagccagagcaucauugccuacacaaugucucugggcgccgagaacagcguggccuacuccaacaacucuaucgcuauccccaccaacuucaccaucagcgugaccaccgagauccugccuguguccaugaccaagaccagcguggacugcaccauguacaucugcggcgauuccaccgagugcuccaaccugcugcugcaguacggcagcuucugcacccagcugaauagagcccugacagggaucgccguggaacaggacaagaacacccaagagguguucgcccaagugaagcaaaucuacaagaccccuccuaucaaggacuucggcggcuucaauuucagccagauucugcccgauccuagcaagcccagcaagcggagcuucaucgaggaccugcuguucaacaaagugacacuggccgacgccggcuucaucaagcaguauggcgauugucugggcgacauugccgccagggaucugauuugcgcccagaaguuuaacggacugacagugcugccuccucugcugaccgaugagaugaucgcccaguacacaucugcccugcuggccggcacaaucacaagcggcuggacauuuggagcuggcgccgcucugcagauccccuuugcuaugcagauggccuaccgguucaacggcaucggagugacccagaaugugcuguacgagaaccagaagcugaucgccaaccaguucaacagcgccaucggcaagauccaggacagccugagcagcacagcaagcgcccugggaaagcugcaggacguggucaaccagaaugcccaggcacugaacacccuggucaagcagcuguccuccaacuucggcgccaucagcucugugcugaacgauauccugagcagacuggacccuccugaggccgaggugcagaucgacagacugaucacaggcagacugcagagccuccagacauacgugacccagcagcugaucagagccgccgagauuagagccucugccaaucuggccgccaccaagaugucugagugugugcugggccagagcaagagaguggacuuuugcggcaagggcuaccaccugaugagcuucccucagucugccccucacggcgugguguuucugcacgugacauaugugcccgcucaagagaagaauuucaccaccgcuccagccaucugccacgacggcaaagcccacuuuccuagagaaggcguguucguguccaacggcacccauugguucgugacacagcggaacuucuacgagccccagaucaucaccaccgacaacaccuucgugucuggcaacugcgacguugugaucggcauugugaacaauaccguguacgacccucugcagcccgagcuggacagcuucaaagaggaacuggacaaguacuuuaagaaccacacaagccccgacguggaccugggcgauaucagcggaaucaaugccagcgucgugaacauccagaaagagaucgaccggcugaacgagguggccaagaaucugaacgagagccugaucgaccugcaagaacuggggaaguacgagcaguacaucaaguggcccugguacaucuggcugggcuuuaucgccggacugauugccaucgugauggucacaaucaugcuguguugcaugaccagcugcuguagcugccugaagggcuguuguagcuguggcagcugcugcaaguucgacgaggacgauucugagcccgugcugaagggcgugaaacugcacuacaccugaggacuaguuauaagacugacuagcccgaugggccucccaacgggcccuccuccccuccuugcaccgagauuaauaaaaaaaaaaaaaaaaaaaaaaaaaaaaaaaaaaaaaaaaaaaaaaaaaaaaaaaaaaaaaaaaugcaucccccccccccccccccccccccccccccccaaaggcucuuuucagagccaccagaauu

SEQ ID NO: 23385 - RNA, 4039 nt, Artificial Sequence
  SARS-CoV-2/Wuhan/WIV05/2019__EPI_ISL_402128 spike protein mRNA gc mod (1-1273)(K986P_V987P_K986P_V987P_L18F_T20N_P26S_D138Y_R190S_K417T _E484K_N501Y_D614G_H655Y_T1027I)
aggagaaagcuuaccauguucguguuucuggugcugcugccccugguguccagccagugugugaacuucaccaacagaacacagcugccuagcgccuacaccaacagcuucaccagaggcguguacuaccccgacaagguguucagauccagcgugcugcacucuacccaggaccuguuccugccuuucuucagcaacgugaccugguuccacgccauccacguguccggcaccaauggcaccaagagauucgacaaccccgugcugcccuucaacgacgggguguacuuugccagcaccgagaaguccaacaucaucagaggcuggaucuucggcaccacacuggacagcaagacccagagccugcugaucgugaacaacgccaccaacguggucaucaaagugugcgaguuccaguucugcaacuaccccuuccugggcgucuacuaccacaagaacaacaagagcuggauggaaagcgaguuccggguguacagcagcgccaacaacugcaccuucgaguacgugucccagccuuuccugauggaccuggaaggcaagcagggcaacuucaagaaccugagcgaguucguguucaagaacaucgacggcuacuucaaaaucuacagcaagcacaccccuaucaaccucgugcgggaucugccucagggcuucucugcucuggaaccccugguggaucugcccaucggcaucaacaucacccgguuucagacacugcuggcccugcacagaagcuaccugacaccuggcgauagcagcagcggauggacagcuggugccgccgcuuacuaugugggcuaccugcagccuagaaccuuccugcugaaguacaacgagaacggcaccaucaccgacgccguggauugugcucuggauccucugagcgagacaaagugcacccugaaguccuucaccguggaaaagggcaucuaccagaccagcaacuuccgggugcagcccaccgaauccaucgugcgguuccccaauaucaccaaucugugccccuucggcgagguguucaaugccaccagauucgccucuguguacgccuggaaccggaagcggaucagcaauugcguggccgacuacuccgugcuguacaacuccgccagcuucagcaccuucaagugcuacggcguguccccuaccaagcugaacgaccugugcuucacaaacguguacgccgacagcuucgugauccggggagaugaagugcggcagauugccccuggacagacaggcaccaucgccgacuacaacuacaagcugcccgacgacuucaccggcugugugauugccuggaacagcaacaaccuggacuccaaagucggcggcaacuacaauuaccuguaccggcuguuccggaaguccaaucugaagcccuucgagcgggacaucagcaccgaaaucuaucaggccggcagcaccccuugcaacggcgugaagggcuucaacugcuacuucccacugcaguccuacggcuuucagcccacauacggcgugggcuaucagcccuacagagugguggugcugagcuucgaacugcugcaugcuccugccacagugugcggcccuaagaaaagcaccaaucucgugaagaacaaaugcgugaacuucaacuucaacggccugaccggcaccggcgugcugacagagagcaacaagaaguuccugccauuccagcaguuuggccgggauaucgccgauaccacagacgccguuagagauccccagacacuggaaauccuggacaucaccccaugcagcuucggcggagugucugugaucaccccuggcaccaacaccagcaaucagguggcagugcuguaccagggcgugaacuguaccgaagugcccguggccauucacgccgaucagcugacaccuacauggcggguguacuccaccggcagcaauguguuucagaccagagccggcugucugaucggagccgaguacgugaacaauagcuacgagugcgacauccccaucggcgcuggcaucugugccagcuaccagacacagacaaacagccccagacgggcuagaagcguggccagccagagcaucauugccuacacaaugucucugggcgccgagaacagcguggccuacuccaacaacucuaucgcuauccccaccaacuucaccaucagcgugaccaccgagauccugccuguguccaugaccaagaccagcguggacugcaccauguacaucugcggcgauuccaccgagugcuccaaccugcugcugcaguacggcagcuucugcacccagcugaauagagcccugacagggaucgccguggaacaggacaagaacacccaagagguguucgcccaagugaagcaaaucuacaagaccccuccuaucaaggacuucggcggcuucaauuucagccagauucugcccgauccuagcaagcccagcaagcggagcuucaucgaggaccugcuguucaacaaagugacacuggccgacgccggcuucaucaagcaguauggcgauugucugggcgacauugccgccagggaucugauuugcgcccagaaguuuaacggacugacagugcugccuccucugcugaccgaugagaugaucgcccaguacacaucugcccugcuggccggcacaaucacaagcggcuggacauuuggagcuggcgccgcucugcagauccccuuugcuaugcagauggccuaccgguucaacggcaucggagugacccagaaugugcuguacgagaaccagaagcugaucgccaaccaguucaacagcgccaucggcaagauccaggacagccugagcagcacagcaagcgcccugggaaagcugcaggacguggucaaccagaaugcccaggcacugaacacccuggucaagcagcuguccuccaacuucggcgccaucagcucugugcugaacgauauccugagcagacuggacccuccugaggccgaggugcagaucgacagacugaucacaggcagacugcagagccuccagacauacgugacccagcagcugaucagagccgccgagauuagagccucugccaaucuggccgccaucaagaugucugagugugugcugggccagagcaagagaguggacuuuugcggcaagggcuaccaccugaugagcuucccucagucugccccucacggcgugguguuucugcacgugacauaugugcccgcucaagagaagaauuucaccaccgcuccagccaucugccacgacggcaaagcccacuuuccuagagaaggcguguucguguccaacggcacccauugguucgugacacagcggaacuucuacgagccccagaucaucaccaccgacaacaccuucgugucuggcaacugcgacguugugaucggcauugugaacaauaccguguacgacccucugcagcccgagcuggacagcuucaaagaggaacuggacaaguacuuuaagaaccacacaagccccgacguggaccugggcgauaucagcggaaucaaugccagcgucgugaacauccagaaagagaucgaccggcugaacgagguggccaagaaucugaacgagagccugaucgaccugcaagaacuggggaaguacgagcaguacaucaaguggcccugguacaucuggcugggcuuuaucgccggacugauugccaucgugauggucacaaucaugcuguguugcaugaccagcugcuguagcugccugaagggcuguuguagcuguggcagcugcugcaaguucgacgaggacgauucugagcccgugcugaagggcgugaaacugcacuacaccugaggacuaguuauaagacugacuagcccgaugggccucccaacgggcccuccuccccuccuugcaccgagauuaauaaaaaaaaaaaaaaaaaaaaaaaaaaaaaaaaaaaaaaaaaaaaaaaaaaaaaaaaaaaaaaaaugcaucccccccccccccccccccccccccccccccaaaggcucuuuucagagccaccagaauu

SEQ ID NO: 23386 - RNA, 4039 nt, Artificial Sequence
  SARS-CoV-2/Wuhan/WIV05/2019__EPI_ISL_402128 spike protein mRNA gc mod (1-1273)(K986P_V987P_K986P_V987P_S13I_W152C_L452R_D614G)
aggagaaagcuuaccauguucguguuucuggugcugcugccccugguguccauccagugugugaaccugaccaccagaacacagcugccuccagccuacaccaacagcuucaccagaggcguguacuaccccgacaagguguucagauccagcgugcugcacucuacccaggaccuguuccugccuuucuucagcaacgugaccugguuccacgccauccacguguccggcaccaauggcaccaagagauucgacaaccccgugcugcccuucaacgacgggguguacuuugccagcaccgagaaguccaacaucaucagaggcuggaucuucggcaccacacuggacagcaagacccagagccugcugaucgugaacaacgccaccaacguggucaucaaagugugcgaguuccaguucugcaacgaccccuuccugggcgucuacuaccacaagaacaacaagagcugcauggaaagcgaguuccggguguacagcagcgccaacaacugcaccuucgaguacgugucccagccuuuccugauggaccuggaaggcaagcagggcaacuucaagaaccugcgcgaguucguguucaagaacaucgacggcuacuucaaaaucuacagcaagcacaccccuaucaaccucgugcgggaucugccucagggcuucucugcucuggaaccccugguggaucugcccaucggcaucaacaucacccgguuucagacacugcuggcccugcacagaagcuaccugacaccuggcgauagcagcagcggauggacagcuggugccgccgcuuacuaugugggcuaccugcagccuagaaccuuccugcugaaguacaacgagaacggcaccaucaccgacgccguggauugugcucuggauccucugagcgagacaaagugcacccugaaguccuucaccguggaaaagggcaucuaccagaccagcaacuuccgggugcagcccaccgaauccaucgugcgguuccccaauaucaccaaucugugccccuucggcgagguguucaaugccaccagauucgccucuguguacgccuggaaccggaagcggaucagcaauugcguggccgacuacuccgugcuguacaacuccgccagcuucagcaccuucaagugcuacggcguguccccuaccaagcugaacgaccugugcuucacaaacguguacgccgacagcuucgugauccggggagaugaagugcggcagauugccccuggacagacaggcaagaucgccgacuacaacuacaagcugcccgacgacuucaccggcugugugauugccuggaacagcaacaaccuggacuccaaagucggcggcaacuacaauuaccgcuaccggcuguuccggaaguccaaucugaagcccuucgagcgggacaucagcaccgaaaucuaucaggccggcagcaccccuugcaacggcguggaaggcuucaacugcuacuucccacugcaguccuacggcuuucagcccacaaauggcgugggcuaucagcccuacagagugguggugcugagcuucgaacugcugcaugcuccugccacagugugcggcccuaagaaaagcaccaaucucgugaagaacaaaugcgugaacuucaacuucaacggccugaccggcaccggcgugcugacagagagcaacaagaaguuccugccauuccagcaguuuggccgggauaucgccgauaccacagacgccguuagagauccccagacacuggaaauccuggacaucaccccaugcagcuucggcggagugucugugaucaccccuggcaccaacaccagcaaucagguggcagugcuguaccagggcgugaacuguaccgaagugcccguggccauucacgccgaucagcugacaccuacauggcggguguacuccaccggcagcaauguguuucagaccagagccggcugucugaucggagccgagcacgugaacaauagcuacgagugcgacauccccaucggcgcuggcaucugugccagcuaccagacacagacaaacagccccagacgggcuagaagcguggccagccagagcaucauugccuacacaaugucucugggcgccgagaacagcguggccuacuccaacaacucuaucgcuauccccaccaacuucaccaucagcgugaccaccgagauccugccuguguccaugaccaagaccagcguggacugcaccauguacaucugcggcgauuccaccgagugcuccaaccugcugcugcaguacggcagcuucugcacccagcugaauagagcccugacagggaucgccguggaacaggacaagaacacccaagagguguucgcccaagugaagcaaaucuacaagaccccuccuaucaaggacuucggcggcuucaauuucagccagauucugcccgauccuagcaagcccagcaagcggagcuucaucgaggaccugcuguucaacaaagugacacuggccgacgccggcuucaucaagcaguauggcgauugucugggcgacauugccgccagggaucugauuugcgcccagaaguuuaacggacugacagugcugccuccucugcugaccgaugagaugaucgcccaguacacaucugcccugcuggccggcacaaucacaagcggcuggacauuuggagcuggcgccgcucugcagauccccuuugcuaugcagauggccuaccgguucaacggcaucggagugacccagaaugugcuguacgagaaccagaagcugaucgccaaccaguucaacagcgccaucggcaagauccaggacagccugagcagcacagcaagcgcccugggaaagcugcaggacguggucaaccagaaugcccaggcacugaacacccuggucaagcagcuguccuccaacuucggcgccaucagcucugugcugaacgauauccugagcagacuggacccuccugaggccgaggugcagaucgacagacugaucacaggcagacugcagagccuccagacauacgugacccagcagcugaucagagccgccgagauuagagccucugccaaucuggccgccaccaagaugucugagugugugcugggccagagcaagagaguggacuuuugcggcaagggcuaccaccugaugagcuucccucagucugccccucacggcgugguguuucugcacgugacauaugugcccgcucaagagaagaauuucaccaccgcuccagccaucugccacgacggcaaagcccacuuuccuagagaaggcguguucguguccaacggcacccauugguucgugacacagcggaacuucuacgagccccagaucaucaccaccgacaacaccuucgugucuggcaacugcgacguugugaucggcauugugaacaauaccguguacgacccucugcagcccgagcuggacagcuucaaagaggaacuggacaaguacuuuaagaaccacacaagccccgacguggaccugggcgauaucagcggaaucaaugccagcgucgugaacauccagaaagagaucgaccggcugaacgagguggccaagaaucugaacgagagccugaucgaccugcaagaacuggggaaguacgagcaguacaucaaguggcccugguacaucuggcugggcuuuaucgccggacugauugccaucgugauggucacaaucaugcuguguugcaugaccagcugcuguagcugccugaagggcuguuguagcuguggcagcugcugcaaguucgacgaggacgauucugagcccgugcugaagggcgugaaacugcacuacaccugaggacuaguuauaagacugacuagcccgaugggccucccaacgggcccuccuccccuccuugcaccgagauuaauaaaaaaaaaaaaaaaaaaaaaaaaaaaaaaaaaaaaaaaaaaaaaaaaaaaaaaaaaaaaaaaaugcaucccccccccccccccccccccccccccccccaaaggcucuuuucagagccaccagaauu

SEQ ID NO: 23387 - RNA, 4039 nt, Artificial Sequence
  SARS-CoV-2/Wuhan/WIV05/2019__EPI_ISL_402128 spike protein mRNA gc mod (1-1273)(K986P_V987P)
aggagaaagcuuaccauguucguguuccuggugcugcugccucugguguccagccagugugugaaccugaccaccagaacacagcugccuccagccuacaccaacagcuuuaccagaggcguguacuaccccgacaagguguucagauccagcgugcugcacucuacccaggaccuguuccugccuuucuucagcaacgugaccugguuccacgccauccacguguccggcaccaauggcaccaagagauucgacaaccccgugcugcccuucaacgacgggguguacuuugccagcaccgagaaguccaacaucaucagaggcuggaucuucggcaccacacuggacagcaagacccagagccugcugaucgugaacaacgccaccaacguggucaucaaagugugcgaguuccaguucugcaacgaccccuuccugggcgucuacuaccacaagaacaacaagagcuggauggaaagcgaguuccggguguacagcagcgccaacaacugcaccuucgaguacgugucccagccuuuccugauggaccuggaaggcaagcagggcaacuucaagaaccugcgcgaguucguguuuaagaacaucgacggcuacuucaagaucuacagcaagcacaccccuaucaaccucgugcgggaucugccucagggcuucucugcucuggaaccccugguggaucugcccaucggcaucaacaucacccgguuucagacacugcuggcccugcacagaagcuaccugacaccuggcgauagcagcagcggauggacagcuggugccgccgcuuacuaugugggcuaccugcagccuagaaccuuccugcugaaguacaacgagaacggcaccaucaccgacgccguggauugugcucuggauccucugagcgagacaaagugcacccugaaguccuucaccguggaaaagggcaucuaccagaccagcaacuuccgggugcagcccaccgaauccaucgugcgguuccccaauaucaccaaucugugccccuucggcgagguguucaaugccaccagauucgccucuguguacgccuggaaccggaagcggaucagcaauugcguggccgacuacuccgugcuguacaacuccgccagcuucagcaccuucaagugcuacggcguguccccuaccaagcugaacgaccugugcuucacaaacguguacgccgacagcuucgugauccggggagaugaagugcggcagauugccccuggacagacaggcaagaucgccgacuacaacuacaagcugcccgacgacuucaccggcugugugauugccuggaacagcaacaaccuggacuccaaagucggcggcaacuacaauuaccuguaccggcuguuccggaaguccaaucugaagcccuucgagcgggacaucuccaccgagaucuaucaggccggcagcaccccuuguaacggcguggaaggcuucaacugcuacuucccacugcaguccuacggcuuucagcccacaaauggcgugggcuaucagcccuacagagugguggugcugagcuucgaacugcugcaugccccugccacagugugcggcccuaagaaaagcaccaaucucgugaagaacaaaugcgugaacuucaacuucaacggccugaccggcaccggcgugcugacagagagcaacaagaaguuccugccauuccagcaguuuggccgggauaucgccgauaccacagacgccguuagagauccccagacacuggaaauccuggacaucaccccuugcagcuucggcggagugucugugaucaccccuggcaccaacaccagcaaucagguggcagugcuguaccaggacgugaacuguaccgaagugcccguggccauucacgccgaucagcugacaccuacauggcggguguacuccaccggcagcaauguguuucagaccagagccggcugucugaucggagccgagcacgugaacaauagcuacgagugcgacauccccaucggcgcuggaaucugcgccagcuaccagacacagacaaacagcccucggagagccagaagcguggccagccagagcaucauugccuacacaaugucucugggcgccgagaacagcguggccuacuccaacaacucuaucgcuauccccaccaacuucaccaucagcgugaccacagagauccugccuguguccaugaccaagaccagcguggacugcaccauguacaucugcggcgauuccaccgagugcuccaaccugcugcugcaguacggcagcuucugcacccagcugaauagagcccugacagggaucgccguggaacaggacaagaacacccaagagguguucgcccaagugaagcagaucuacaagaccccuccuaucaaggacuucggcggcuucaauuucagccagauucugcccgauccuagcaagcccagcaagcggagcuucaucgaggaccugcuguucaacaaagugacacuggccgacgccggcuucaucaagcaguauggcgauugucugggcgacauugccgccagggaucugauuugcgcccagaaguuuaacggacugacagugcugccuccucugcugaccgaugagaugaucgcccaguacacaucugcccugcuggccggcacaaucacaagcggcuggacauuuggagcaggcgccgcucugcagauccccuuugcuaugcagauggccuaccgguucaacggcaucggagugacccagaaugugcuguacgagaaccagaagcugaucgccaaccaguucaacagcgccaucggcaagauccaggacagccugagcagcacagcaagcgcccugggaaagcugcaggacguggucaaccagaaugcccaggcacugaacacccuggucaagcagcuguccuccaacuucggcgccaucagcucugugcugaacgauauccugagcagacuggacccuccugaggccgaggugcagaucgacagacugaucacaggcagacugcagagccuccagacauacgugacccagcagcugaucagagccgccgagauuagagccucugccaaucuggccgccaccaagaugucugagugugugcugggccagagcaagagaguggacuuuugcggcaagggcuaccaccugaugagcuucccucagucugccccucacggcgugguguuucugcacgugacauaugugcccgcucaagagaagaauuucaccaccgcuccagccaucugccacgacggcaaagcccacuuuccuagagaaggcguguucguguccaacggcacccauugguucgugacacagcggaacuucuacgagccccagaucaucaccaccgacaacaccuucgugucuggcaacugcgacgucgugaucggcauugugaacaauaccguguacgacccucugcagcccgagcuggacagcuucaaagaggaacuggacaaguacuuuaagaaccacacaagccccgacguggaccugggcgauaucagcggaaucaaugccagcgucgugaacauccagaaagagaucgaccggcugaacgagguggccaagaaucugaacgagagccugaucgaccugcaagaacuggggaaguacgagcaguacaucaaguggcccugguacaucuggcugggcuuuaucgccggacugauugccaucgugauggucacaaucaugcuguguugcaugaccagcugcuguagcugccugaagggcuguuguagcuguggcagcugcugcaaguucgacgaggacgauucugagcccgugcugaagggcgugaaacugcacuacacaugaggacuaguuauaagacugacuagcccgaugggccucccaacgggcccuccuccccuccuugcaccgagauuaauaaaaaaaaaaaaaaaaaaaaaaaaaaaaaaaaaaaaaaaaaaaaaaaaaaaaaaaaaaaaaaaaugcaucccccccccccccccccccccccccccccccaaaggcucuuuucagagccaccagaauu

SEQ ID NO: 23388 - RNA, 4039 nt, Artificial Sequence
  SARS-CoV-2/Wuhan/WIV05/2019__EPI_ISL_402128 spike protein mRNA gc mod (1-1273)(K986P_V987P_ D614G)
aggagaaagcuuaccauguucguguuccuggugcugcugccucugguguccagccagugugugaaccugaccaccagaacacagcugccuccagccuacaccaacagcuuuaccagaggcguguacuaccccgacaagguguucagauccagcgugcugcacucuacccaggaccuguuccugccuuucuucagcaacgugaccugguuccacgccauccacguguccggcaccaauggcaccaagagauucgacaaccccgugcugcccuucaacgacgggguguacuuugccagcaccgagaaguccaacaucaucagaggcuggaucuucggcaccacacuggacagcaagacccagagccugcugaucgugaacaacgccaccaacguggucaucaaagugugcgaguuccaguucugcaacgaccccuuccugggcgucuacuaccacaagaacaacaagagcuggauggaaagcgaguuccggguguacagcagcgccaacaacugcaccuucgaguacgugucccagccuuuccugauggaccuggaaggcaagcagggcaacuucaagaaccugcgcgaguucguguuuaagaacaucgacggcuacuucaagaucuacagcaagcacaccccuaucaaccucgugcgggaucugccucagggcuucucugcucuggaaccccugguggaucugcccaucggcaucaacaucacccgguuucagacacugcuggcccugcacagaagcuaccugacaccuggcgauagcagcagcggauggacagcuggugccgccgcuuacuaugugggcuaccugcagccuagaaccuuccugcugaaguacaacgagaacggcaccaucaccgacgccguggauugugcucuggauccucugagcgagacaaagugcacccugaaguccuucaccguggaaaagggcaucuaccagaccagcaacuuccgggugcagcccaccgaauccaucgugcgguuccccaauaucaccaaucugugccccuucggcgagguguucaaugccaccagauucgccucuguguacgccuggaaccggaagcggaucagcaauugcguggccgacuacuccgugcuguacaacuccgccagcuucagcaccuucaagugcuacggcguguccccuaccaagcugaacgaccugugcuucacaaacguguacgccgacagcuucgugauccggggagaugaagugcggcagauugccccuggacagacaggcaagaucgccgacuacaacuacaagcugcccgacgacuucaccggcugugugauugccuggaacagcaacaaccuggacuccaaagucggcggcaacuacaauuaccuguaccggcuguuccggaaguccaaucugaagcccuucgagcgggacaucuccaccgagaucuaucaggccggcagcaccccuuguaacggcguggaaggcuucaacugcuacuucccacugcaguccuacggcuuucagcccacaaauggcgugggcuaucagcccuacagagugguggugcugagcuucgaacugcugcaugccccugccacagugugcggcccuaagaaaagcaccaaucucgugaagaacaaaugcgugaacuucaacuucaacggccugaccggcaccggcgugcugacagagagcaacaagaaguuccugccauuccagcaguuuggccgggauaucgccgauaccacagacgccguuagagauccccagacacuggaaauccuggacaucaccccuugcagcuucggcggagugucugugaucaccccuggcaccaacaccagcaaucagguggcagugcuguaccagggcgugaacuguaccgaagugcccguggccauucacgccgaucagcugacaccuacauggcggguguacuccaccggcagcaauguguuucagaccagagccggcugucugaucggagccgagcacgugaacaauagcuacgagugcgacauccccaucggcgcuggaaucugcgccagcuaccagacacagacaaacagcccucggagagccagaagcguggccagccagagcaucauugccuacacaaugucucugggcgccgagaacagcguggccuacuccaacaacucuaucgcuauccccaccaacuucaccaucagcgugaccacagagauccugccuguguccaugaccaagaccagcguggacugcaccauguacaucugcggcgauuccaccgagugcuccaaccugcugcugcaguacggcagcuucugcacccagcugaauagagcccugacagggaucgccguggaacaggacaagaacacccaagagguguucgcccaagugaagcagaucuacaagaccccuccuaucaaggacuucggcggcuucaauuucagccagauucugcccgauccuagcaagcccagcaagcggagcuucaucgaggaccugcuguucaacaaagugacacuggccgacgccggcuucaucaagcaguauggcgauugucugggcgacauugccgccagggaucugauuugcgcccagaaguuuaacggacugacagugcugccuccucugcugaccgaugagaugaucgcccaguacacaucugcccugcuggccggcacaaucacaagcggcuggacauuuggagcaggcgccgcucugcagauccccuuugcuaugcagauggccuaccgguucaacggcaucggagugacccagaaugugcuguacgagaaccagaagcugaucgccaaccaguucaacagcgccaucggcaagauccaggacagccugagcagcacagcaagcgcccugggaaagcugcaggacguggucaaccagaaugcccaggcacugaacacccuggucaagcagcuguccuccaacuucggcgccaucagcucugugcugaacgauauccugagcagacuggacccuccugaggccgaggugcagaucgacagacugaucacaggcagacugcagagccuccagacauacgugacccagcagcugaucagagccgccgagauuagagccucugccaaucuggccgccaccaagaugucugagugugugcugggccagagcaagagaguggacuuuugcggcaagggcuaccaccugaugagcuucccucagucugccccucacggcgugguguuucugcacgugacauaugugcccgcucaagagaagaauuucaccaccgcuccagccaucugccacgacggcaaagcccacuuuccuagagaaggcguguucguguccaacggcacccauugguucgugacacagcggaacuucuacgagccccagaucaucaccaccgacaacaccuucgugucuggcaacugcgacgucgugaucggcauugugaacaauaccguguacgacccucugcagcccgagcuggacagcuucaaagaggaacuggacaaguacuuuaagaaccacacaagccccgacguggaccugggcgauaucagcggaaucaaugccagcgucgugaacauccagaaagagaucgaccggcugaacgagguggccaagaaucugaacgagagccugaucgaccugcaagaacuggggaaguacgagcaguacaucaaguggcccugguacaucuggcugggcuuuaucgccggacugauugccaucgugauggucacaaucaugcuguguugcaugaccagcugcuguagcugccugaagggcuguuguagcuguggcagcugcugcaaguucgacgaggacgauucugagcccgugcugaagggcgugaaacugcacuacacaugaggacuaguuauaagacugacuagcccgaugggccucccaacgggcccuccuccccuccuugcaccgagauuaauaaaaaaaaaaaaaaaaaaaaaaaaaaaaaaaaaaaaaaaaaaaaaaaaaaaaaaaaaaaaaaaaugcaucccccccccccccccccccccccccccccccaaaggcucuuuucagagccaccagaauu

SEQ ID NO: 23389 - RNA, 4039 nt, Artificial Sequence
  SARS-CoV-2/Wuhan/WIV05/2019__EPI_ISL_402128 spike protein mRNA gc mod (1-1273)(K986P_V987P_A222V_D614G)
aggagaaagcuuaccauguucguguuccuggugcugcugccucugguguccagccagugugugaaccugaccaccagaacacagcugccuccagccuacaccaacagcuuuaccagaggcguguacuaccccgacaagguguucagauccagcgugcugcacucuacccaggaccuguuccugccuuucuucagcaacgugaccugguuccacgccauccacguguccggcaccaauggcaccaagagauucgacaaccccgugcugcccuucaacgacgggguguacuuugccagcaccgagaaguccaacaucaucagaggcuggaucuucggcaccacacuggacagcaagacccagagccugcugaucgugaacaacgccaccaacguggucaucaaagugugcgaguuccaguucugcaacgaccccuuccugggcgucuacuaccacaagaacaacaagagcuggauggaaagcgaguuccggguguacagcagcgccaacaacugcaccuucgaguacgugucccagccuuuccugauggaccuggaaggcaagcagggcaacuucaagaaccugcgcgaguucguguuuaagaacaucgacggcuacuucaagaucuacagcaagcacaccccuaucaaccucgugcgggaucugccucagggcuucucugugcuggaaccccugguggaucugcccaucggcaucaacaucacccgguuucagacacugcuggcccugcacagaagcuaccugacaccuggcgauagcagcagcggauggacagcuggugccgccgcuuacuaugugggcuaccugcagccuagaaccuuccugcugaaguacaacgagaacggcaccaucaccgacgccguggauugugcucuggauccucugagcgagacaaagugcacccugaaguccuucaccguggaaaagggcaucuaccagaccagcaacuuccgggugcagcccaccgaauccaucgugcgguuccccaauaucaccaaucugugccccuucggcgagguguucaaugccaccagauucgccucuguguacgccuggaaccggaagcggaucagcaauugcguggccgacuacuccgugcuguacaacuccgccagcuucagcaccuucaagugcuacggcguguccccuaccaagcugaacgaccugugcuucacaaacguguacgccgacagcuucgugauccggggagaugaagugcggcagauugccccuggacagacaggcaagaucgccgacuacaacuacaagcugcccgacgacuucaccggcugugugauugccuggaacagcaacaaccuggacuccaaagucggcggcaacuacaauuaccuguaccggcuguuccggaaguccaaucugaagcccuucgagcgggacaucuccaccgagaucuaucaggccggcagcaccccuuguaacggcguggaaggcuucaacugcuacuucccacugcaguccuacggcuuucagcccacaaauggcgugggcuaucagcccuacagagugguggugcugagcuucgaacugcugcaugccccugccacagugugcggcccuaagaaaagcaccaaucucgugaagaacaaaugcgugaacuucaacuucaacggccugaccggcaccggcgugcugacagagagcaacaagaaguuccugccauuccagcaguuuggccgggauaucgccgauaccacagacgccguuagagauccccagacacuggaaauccuggacaucaccccuugcagcuucggcggagugucugugaucaccccuggcaccaacaccagcaaucagguggcagugcuguaccagggcgugaacuguaccgaagugcccguggccauucacgccgaucagcugacaccuacauggcggguguacuccaccggcagcaauguguuucagaccagagccggcugucugaucggagccgagcacgugaacaauagcuacgagugcgacauccccaucggcgcuggaaucugcgccagcuaccagacacagacaaacagcccucggagagccagaagcguggccagccagagcaucauugccuacacaaugucucugggcgccgagaacagcguggccuacuccaacaacucuaucgcuauccccaccaacuucaccaucagcgugaccacagagauccugccuguguccaugaccaagaccagcguggacugcaccauguacaucugcggcgauuccaccgagugcuccaaccugcugcugcaguacggcagcuucugcacccagcugaauagagcccugacagggaucgccguggaacaggacaagaacacccaagagguguucgcccaagugaagcagaucuacaagaccccuccuaucaaggacuucggcggcuucaauuucagccagauucugcccgauccuagcaagcccagcaagcggagcuucaucgaggaccugcuguucaacaaagugacacuggccgacgccggcuucaucaagcaguauggcgauugucugggcgacauugccgccagggaucugauuugcgcccagaaguuuaacggacugacagugcugccuccucugcugaccgaugagaugaucgcccaguacacaucugcccugcuggccggcacaaucacaagcggcuggacauuuggagcaggcgccgcucugcagauccccuuugcuaugcagauggccuaccgguucaacggcaucggagugacccagaaugugcuguacgagaaccagaagcugaucgccaaccaguucaacagcgccaucggcaagauccaggacagccugagcagcacagcaagcgcccugggaaagcugcaggacguggucaaccagaaugcccaggcacugaacacccuggucaagcagcuguccuccaacuucggcgccaucagcucugugcugaacgauauccugagcagacuggacccuccugaggccgaggugcagaucgacagacugaucacaggcagacugcagagccuccagacauacgugacccagcagcugaucagagccgccgagauuagagccucugccaaucuggccgccaccaagaugucugagugugugcugggccagagcaagagaguggacuuuugcggcaagggcuaccaccugaugagcuucccucagucugccccucacggcgugguguuucugcacgugacauaugugcccgcucaagagaagaauuucaccaccgcuccagccaucugccacgacggcaaagcccacuuuccuagagaaggcguguucguguccaacggcacccauugguucgugacacagcggaacuucuacgagccccagaucaucaccaccgacaacaccuucgugucuggcaacugcgacgucgugaucggcauugugaacaauaccguguacgacccucugcagcccgagcuggacagcuucaaagaggaacuggacaaguacuuuaagaaccacacaagccccgacguggaccugggcgauaucagcggaaucaaugccagcgucgugaacauccagaaagagaucgaccggcugaacgagguggccaagaaucugaacgagagccugaucgaccugcaagaacuggggaaguacgagcaguacaucaaguggcccugguacaucuggcugggcuuuaucgccggacugauugccaucgugauggucacaaucaugcuguguugcaugaccagcugcuguagcugccugaagggcuguuguagcuguggcagcugcugcaaguucgacgaggacgauucugagcccgugcugaagggcgugaaacugcacuacacaugaggacuaguuauaagacugacuagcccgaugggccucccaacgggcccuccuccccuccuugcaccgagauuaauaaaaaaaaaaaaaaaaaaaaaaaaaaaaaaaaaaaaaaaaaaaaaaaaaaaaaaaaaaaaaaaaugcaucccccccccccccccccccccccccccccccaaaggcucuuuucagagccaccagaauu

SEQ ID NO: 23390 - RNA, 4039 nt, Artificial Sequence
  SARS-CoV-2/Wuhan/WIV05/2019__EPI_ISL_402128 spike protein mRNA gc mod (1-1273)(K986P_V987P_N439K_D614G)
aggagaaagcuuaccauguucguguuccuggugcugcugccucugguguccagccagugugugaaccugaccaccagaacacagcugccuccagccuacaccaacagcuuuaccagaggcguguacuaccccgacaagguguucagauccagcgugcugcacucuacccaggaccuguuccugccuuucuucagcaacgugaccugguuccacgccauccacguguccggcaccaauggcaccaagagauucgacaaccccgugcugcccuucaacgacgggguguacuuugccagcaccgagaaguccaacaucaucagaggcuggaucuucggcaccacacuggacagcaagacccagagccugcugaucgugaacaacgccaccaacguggucaucaaagugugcgaguuccaguucugcaacgaccccuuccugggcgucuacuaccacaagaacaacaagagcuggauggaaagcgaguuccggguguacagcagcgccaacaacugcaccuucgaguacgugucccagccuuuccugauggaccuggaaggcaagcagggcaacuucaagaaccugcgcgaguucguguuuaagaacaucgacggcuacuucaagaucuacagcaagcacaccccuaucaaccucgugcgggaucugccucagggcuucucugcucuggaaccccugguggaucugcccaucggcaucaacaucacccgguuucagacacugcuggcccugcacagaagcuaccugacaccuggcgauagcagcagcggauggacagcuggugccgccgcuuacuaugugggcuaccugcagccuagaaccuuccugcugaaguacaacgagaacggcaccaucaccgacgccguggauugugcucuggauccucugagcgagacaaagugcacccugaaguccuucaccguggaaaagggcaucuaccagaccagcaacuuccgggugcagcccaccgaauccaucgugcgguuccccaauaucaccaaucugugccccuucggcgagguguucaaugccaccagauucgccucuguguacgccuggaaccggaagcggaucagcaauugcguggccgacuacuccgugcuguacaacuccgccagcuucagcaccuucaagugcuacggcguguccccuaccaagcugaacgaccugugcuucacaaacguguacgccgacagcuucgugauccggggagaugaagugcggcagauugccccuggacagacaggcaagaucgccgacuacaacuacaagcugcccgacgacuucaccggcugugugauugccuggaacagcaagaaccuggacuccaaagucggcggcaacuacaauuaccuguaccggcuguuccggaaguccaaucugaagcccuucgagcgggacaucuccaccgagaucuaucaggccggcagcaccccuuguaacggcguggaaggcuucaacugcuacuucccacugcaguccuacggcuuucagcccacaaauggcgugggcuaucagcccuacagagugguggugcugagcuucgaacugcugcaugccccugccacagugugcggcccuaagaaaagcaccaaucucgugaagaacaaaugcgugaacuucaacuucaacggccugaccggcaccggcgugcugacagagagcaacaagaaguuccugccauuccagcaguuuggccgggauaucgccgauaccacagacgccguuagagauccccagacacuggaaauccuggacaucaccccuugcagcuucggcggagugucugugaucaccccuggcaccaacaccagcaaucagguggcagugcuguaccagggcgugaacuguaccgaagugcccguggccauucacgccgaucagcugacaccuacauggcggguguacuccaccggcagcaauguguuucagaccagagccggcugucugaucggagccgagcacgugaacaauagcuacgagugcgacauccccaucggcgcuggaaucugcgccagcuaccagacacagacaaacagcccucggagagccagaagcguggccagccagagcaucauugccuacacaaugucucugggcgccgagaacagcguggccuacuccaacaacucuaucgcuauccccaccaacuucaccaucagcgugaccacagagauccugccuguguccaugaccaagaccagcguggacugcaccauguacaucugcggcgauuccaccgagugcuccaaccugcugcugcaguacggcagcuucugcacccagcugaauagagcccugacagggaucgccguggaacaggacaagaacacccaagagguguucgcccaagugaagcagaucuacaagaccccuccuaucaaggacuucggcggcuucaauuucagccagauucugcccgauccuagcaagcccagcaagcggagcuucaucgaggaccugcuguucaacaaagugacacuggccgacgccggcuucaucaagcaguauggcgauugucugggcgacauugccgccagggaucugauuugcgcccagaaguuuaacggacugacagugcugccuccucugcugaccgaugagaugaucgcccaguacacaucugcccugcuggccggcacaaucacaagcggcuggacauuuggagcaggcgccgcucugcagauccccuuugcuaugcagauggccuaccgguucaacggcaucggagugacccagaaugugcuguacgagaaccagaagcugaucgccaaccaguucaacagcgccaucggcaagauccaggacagccugagcagcacagcaagcgcccugggaaagcugcaggacguggucaaccagaaugcccaggcacugaacacccuggucaagcagcuguccuccaacuucggcgccaucagcucugugcugaacgauauccugagcagacuggacccuccugaggccgaggugcagaucgacagacugaucacaggcagacugcagagccuccagacauacgugacccagcagcugaucagagccgccgagauuagagccucugccaaucuggccgccaccaagaugucugagugugugcugggccagagcaagagaguggacuuuugcggcaagggcuaccaccugaugagcuucccucagucugccccucacggcgugguguuucugcacgugacauaugugcccgcucaagagaagaauuucaccaccgcuccagccaucugccacgacggcaaagcccacuuuccuagagaaggcguguucguguccaacggcacccauugguucgugacacagcggaacuucuacgagccccagaucaucaccaccgacaacaccuucgugucuggcaacugcgacgucgugaucggcauugugaacaauaccguguacgacccucugcagcccgagcuggacagcuucaaagaggaacuggacaaguacuuuaagaaccacacaagccccgacguggaccugggcgauaucagcggaaucaaugccagcgucgugaacauccagaaagagaucgaccggcugaacgagguggccaagaaucugaacgagagccugaucgaccugcaagaacuggggaaguacgagcaguacaucaaguggcccugguacaucuggcugggcuuuaucgccggacugauugccaucgugauggucacaaucaugcuguguugcaugaccagcugcuguagcugccugaagggcuguuguagcuguggcagcugcugcaaguucgacgaggacgauucugagcccgugcugaagggcgugaaacugcacuacacaugaggacuaguuauaagacugacuagcccgaugggccucccaacgggcccuccuccccuccuugcaccgagauuaauaaaaaaaaaaaaaaaaaaaaaaaaaaaaaaaaaaaaaaaaaaaaaaaaaaaaaaaaaaaaaaaaugcaucccccccccccccccccccccccccccccccaaaggcucuuuucagagccaccagaauu

SEQ ID NO: 23391 - RNA, 4039 nt, Artificial Sequence
  SARS-CoV-2/Wuhan/WIV05/2019__EPI_ISL_402128 spike protein mRNA gc mod (1-1273)(K986P_V987P_S477N_D614G)
aggagaaagcuuaccauguucguguuccuggugcugcugccucugguguccagccagugugugaaccugaccaccagaacacagcugccuccagccuacaccaacagcuuuaccagaggcguguacuaccccgacaagguguucagauccagcgugcugcacucuacccaggaccuguuccugccuuucuucagcaacgugaccugguuccacgccauccacguguccggcaccaauggcaccaagagauucgacaaccccgugcugcccuucaacgacgggguguacuuugccagcaccgagaaguccaacaucaucagaggcuggaucuucggcaccacacuggacagcaagacccagagccugcugaucgugaacaacgccaccaacguggucaucaaagugugcgaguuccaguucugcaacgaccccuuccugggcgucuacuaccacaagaacaacaagagcuggauggaaagcgaguuccggguguacagcagcgccaacaacugcaccuucgaguacgugucccagccuuuccugauggaccuggaaggcaagcagggcaacuucaagaaccugcgcgaguucguguuuaagaacaucgacggcuacuucaagaucuacagcaagcacaccccuaucaaccucgugcgggaucugccucagggcuucucugcucuggaaccccugguggaucugcccaucggcaucaacaucacccgguuucagacacugcuggcccugcacagaagcuaccugacaccuggcgauagcagcagcggauggacagcuggugccgccgcuuacuaugugggcuaccugcagccuagaaccuuccugcugaaguacaacgagaacggcaccaucaccgacgccguggauugugcucuggauccucugagcgagacaaagugcacccugaaguccuucaccguggaaaagggcaucuaccagaccagcaacuuccgggugcagcccaccgaauccaucgugcgguuccccaauaucaccaaucugugccccuucggcgagguguucaaugccaccagauucgccucuguguacgccuggaaccggaagcggaucagcaauugcguggccgacuacuccgugcuguacaacuccgccagcuucagcaccuucaagugcuacggcguguccccuaccaagcugaacgaccugugcuucacaaacguguacgccgacagcuucgugauccggggagaugaagugcggcagauugccccuggacagacaggcaagaucgccgacuacaacuacaagcugcccgacgacuucaccggcugugugauugccuggaacagcaacaaccuggacuccaaagucggcggcaacuacaauuaccuguaccggcuguuccggaaguccaaucugaagcccuucgagcgggacaucuccaccgagaucuaucaggccggcaacaccccuuguaacggcguggaaggcuucaacugcuacuucccacugcaguccuacggcuuucagcccacaaauggcgugggcuaucagcccuacagagugguggugcugagcuucgaacugcugcaugccccugccacagugugcggcccuaagaaaagcaccaaucucgugaagaacaaaugcgugaacuucaacuucaacggccugaccggcaccggcgugcugacagagagcaacaagaaguuccugccauuccagcaguuuggccgggauaucgccgauaccacagacgccguuagagauccccagacacuggaaauccuggacaucaccccuugcagcuucggcggagugucugugaucaccccuggcaccaacaccagcaaucagguggcagugcuguaccagggcgugaacuguaccgaagugcccguggccauucacgccgaucagcugacaccuacauggcggguguacuccaccggcagcaauguguuucagaccagagccggcugucugaucggagccgagcacgugaacaauagcuacgagugcgacauccccaucggcgcuggaaucugcgccagcuaccagacacagacaaacagcccucggagagccagaagcguggccagccagagcaucauugccuacacaaugucucugggcgccgagaacagcguggccuacuccaacaacucuaucgcuauccccaccaacuucaccaucagcgugaccacagagauccugccuguguccaugaccaagaccagcguggacugcaccauguacaucugcggcgauuccaccgagugcuccaaccugcugcugcaguacggcagcuucugcacccagcugaauagagcccugacagggaucgccguggaacaggacaagaacacccaagagguguucgcccaagugaagcagaucuacaagaccccuccuaucaaggacuucggcggcuucaauuucagccagauucugcccgauccuagcaagcccagcaagcggagcuucaucgaggaccugcuguucaacaaagugacacuggccgacgccggcuucaucaagcaguauggcgauugucugggcgacauugccgccagggaucugauuugcgcccagaaguuuaacggacugacagugcugccuccucugcugaccgaugagaugaucgcccaguacacaucugcccugcuggccggcacaaucacaagcggcuggacauuuggagcaggcgccgcucugcagauccccuuugcuaugcagauggccuaccgguucaacggcaucggagugacccagaaugugcuguacgagaaccagaagcugaucgccaaccaguucaacagcgccaucggcaagauccaggacagccugagcagcacagcaagcgcccugggaaagcugcaggacguggucaaccagaaugcccaggcacugaacacccuggucaagcagcuguccuccaacuucggcgccaucagcucugugcugaacgauauccugagcagacuggacccuccugaggccgaggugcagaucgacagacugaucacaggcagacugcagagccuccagacauacgugacccagcagcugaucagagccgccgagauuagagccucugccaaucuggccgccaccaagaugucugagugugugcugggccagagcaagagaguggacuuuugcggcaagggcuaccaccugaugagcuucccucagucugccccucacggcgugguguuucugcacgugacauaugugcccgcucaagagaagaauuucaccaccgcuccagccaucugccacgacggcaaagcccacuuuccuagagaaggcguguucguguccaacggcacccauugguucgugacacagcggaacuucuacgagccccagaucaucaccaccgacaacaccuucgugucuggcaacugcgacgucgugaucggcauugugaacaauaccguguacgacccucugcagcccgagcuggacagcuucaaagaggaacuggacaaguacuuuaagaaccacacaagccccgacguggaccugggcgauaucagcggaaucaaugccagcgucgugaacauccagaaagagaucgaccggcugaacgagguggccaagaaucugaacgagagccugaucgaccugcaagaacuggggaaguacgagcaguacaucaaguggcccugguacaucuggcugggcuuuaucgccggacugauugccaucgugauggucacaaucaugcuguguugcaugaccagcugcuguagcugccugaagggcuguuguagcuguggcagcugcugcaaguucgacgaggacgauucugagcccgugcugaagggcgugaaacugcacuacacaugaggacuaguuauaagacugacuagcccgaugggccucccaacgggcccuccuccccuccuugcaccgagauuaauaaaaaaaaaaaaaaaaaaaaaaaaaaaaaaaaaaaaaaaaaaaaaaaaaaaaaaaaaaaaaaaaugcaucccccccccccccccccccccccccccccccaaaggcucuuuucagagccaccagaauu

SEQ ID NO: 23392 - RNA, 4039 nt, Artificial Sequence
  SARS-CoV-2/Wuhan/WIV05/2019__EPI_ISL_402128 spike protein mRNA gc mod (1-1273)(K986P_V987P_N501Y_D614G)
aggagaaagcuuaccauguucguguuccuggugcugcugccucugguguccagccagugugugaaccugaccaccagaacacagcugccuccagccuacaccaacagcuuuaccagaggcguguacuaccccgacaagguguucagauccagcgugcugcacucuacccaggaccuguuccugccuuucuucagcaacgugaccugguuccacgccauccacguguccggcaccaauggcaccaagagauucgacaaccccgugcugcccuucaacgacgggguguacuuugccagcaccgagaaguccaacaucaucagaggcuggaucuucggcaccacacuggacagcaagacccagagccugcugaucgugaacaacgccaccaacguggucaucaaagugugcgaguuccaguucugcaacgaccccuuccugggcgucuacuaccacaagaacaacaagagcuggauggaaagcgaguuccggguguacagcagcgccaacaacugcaccuucgaguacgugucccagccuuuccugauggaccuggaaggcaagcagggcaacuucaagaaccugcgcgaguucguguuuaagaacaucgacggcuacuucaagaucuacagcaagcacaccccuaucaaccucgugcgggaucugccucagggcuucucugcucuggaaccccugguggaucugcccaucggcaucaacaucacccgguuucagacacugcuggcccugcacagaagcuaccugacaccuggcgauagcagcagcggauggacagcuggugccgccgcuuacuaugugggcuaccugcagccuagaaccuuccugcugaaguacaacgagaacggcaccaucaccgacgccguggauugugcucuggauccucugagcgagacaaagugcacccugaaguccuucaccguggaaaagggcaucuaccagaccagcaacuuccgggugcagcccaccgaauccaucgugcgguuccccaauaucaccaaucugugccccuucggcgagguguucaaugccaccagauucgccucuguguacgccuggaaccggaagcggaucagcaauugcguggccgacuacuccgugcuguacaacuccgccagcuucagcaccuucaagugcuacggcguguccccuaccaagcugaacgaccugugcuucacaaacguguacgccgacagcuucgugauccggggagaugaagugcggcagauugccccuggacagacaggcaagaucgccgacuacaacuacaagcugcccgacgacuucaccggcugugugauugccuggaacagcaacaaccuggacuccaaagucggcggcaacuacaauuaccuguaccggcuguuccggaaguccaaucugaagcccuucgagcgggacaucuccaccgagaucuaucaggccggcagcaccccuuguaacggcguggaaggcuucaacugcuacuucccacugcaguccuacggcuuucagcccacauacggcgugggcuaucagcccuacagagugguggugcugagcuucgaacugcugcaugccccugccacagugugcggcccuaagaaaagcaccaaucucgugaagaacaaaugcgugaacuucaacuucaacggccugaccggcaccggcgugcugacagagagcaacaagaaguuccugccauuccagcaguuuggccgggauaucgccgauaccacagacgccguuagagauccccagacacuggaaauccuggacaucaccccuugcagcuucggcggagugucugugaucaccccuggcaccaacaccagcaaucagguggcagugcuguaccagggcgugaacuguaccgaagugcccguggccauucacgccgaucagcugacaccuacauggcggguguacuccaccggcagcaauguguuucagaccagagccggcugucugaucggagccgagcacgugaacaauagcuacgagugcgacauccccaucggcgcuggaaucugcgccagcuaccagacacagacaaacagcccucggagagccagaagcguggccagccagagcaucauugccuacacaaugucucugggcgccgagaacagcguggccuacuccaacaacucuaucgcuauccccaccaacuucaccaucagcgugaccacagagauccugccuguguccaugaccaagaccagcguggacugcaccauguacaucugcggcgauuccaccgagugcuccaaccugcugcugcaguacggcagcuucugcacccagcugaauagagcccugacagggaucgccguggaacaggacaagaacacccaagagguguucgcccaagugaagcagaucuacaagaccccuccuaucaaggacuucggcggcuucaauuucagccagauucugcccgauccuagcaagcccagcaagcggagcuucaucgaggaccugcuguucaacaaagugacacuggccgacgccggcuucaucaagcaguauggcgauugucugggcgacauugccgccagggaucugauuugcgcccagaaguuuaacggacugacagugcugccuccucugcugaccgaugagaugaucgcccaguacacaucugcccugcuggccggcacaaucacaagcggcuggacauuuggagcaggcgccgcucugcagauccccuuugcuaugcagauggccuaccgguucaacggcaucggagugacccagaaugugcuguacgagaaccagaagcugaucgccaaccaguucaacagcgccaucggcaagauccaggacagccugagcagcacagcaagcgcccugggaaagcugcaggacguggucaaccagaaugcccaggcacugaacacccuggucaagcagcuguccuccaacuucggcgccaucagcucugugcugaacgauauccugagcagacuggacccuccugaggccgaggugcagaucgacagacugaucacaggcagacugcagagccuccagacauacgugacccagcagcugaucagagccgccgagauuagagccucugccaaucuggccgccaccaagaugucugagugugugcugggccagagcaagagaguggacuuuugcggcaagggcuaccaccugaugagcuucccucagucugccccucacggcgugguguuucugcacgugacauaugugcccgcucaagagaagaauuucaccaccgcuccagccaucugccacgacggcaaagcccacuuuccuagagaaggcguguucguguccaacggcacccauugguucgugacacagcggaacuucuacgagccccagaucaucaccaccgacaacaccuucgugucuggcaacugcgacgucgugaucggcauugugaacaauaccguguacgacccucugcagcccgagcuggacagcuucaaagaggaacuggacaaguacuuuaagaaccacacaagccccgacguggaccugggcgauaucagcggaaucaaugccagcgucgugaacauccagaaagagaucgaccggcugaacgagguggccaagaaucugaacgagagccugaucgaccugcaagaacuggggaaguacgagcaguacaucaaguggcccugguacaucuggcugggcuuuaucgccggacugauugccaucgugauggucacaaucaugcuguguugcaugaccagcugcuguagcugccugaagggcuguuguagcuguggcagcugcugcaaguucgacgaggacgauucugagcccgugcugaagggcgugaaacugcacuacacaugaggacuaguuauaagacugacuagcccgaugggccucccaacgggcccuccuccccuccuugcaccgagauuaauaaaaaaaaaaaaaaaaaaaaaaaaaaaaaaaaaaaaaaaaaaaaaaaaaaaaaaaaaaaaaaaaugcaucccccccccccccccccccccccccccccccaaaggcucuuuucagagccaccagaauu

SEQ ID NO: 23393 - RNA, 4033 nt, Artificial Sequence
  SARS-CoV-2/Wuhan/WIV05/2019__EPI_ISL_402128 spike protein mRNA gc mod (1-1273)(K986P_V987P_H69del_V70del_D614G)
aggagaaagcuuaccauguucguguuccuggugcugcugccucugguguccagccagugugugaaccugaccaccagaacacagcugccuccagccuacaccaacagcuuuaccagaggcguguacuaccccgacaagguguucagauccagcgugcugcacucuacccaggaccuguuccugccuuucuucagcaacgugaccugguuccacgccaucuccggcaccaauggcaccaagagauucgacaaccccgugcugcccuucaacgacgggguguacuuugccagcaccgagaaguccaacaucaucagaggcuggaucuucggcaccacacuggacagcaagacccagagccugcugaucgugaacaacgccaccaacguggucaucaaagugugcgaguuccaguucugcaacgaccccuuccugggcgucuacuaccacaagaacaacaagagcuggauggaaagcgaguuccggguguacagcagcgccaacaacugcaccuucgaguacgugucccagccuuuccugauggaccuggaaggcaagcagggcaacuucaagaaccugcgcgaguucguguuuaagaacaucgacggcuacuucaagaucuacagcaagcacaccccuaucaaccucgugcgggaucugccucagggcuucucugcucuggaaccccugguggaucugcccaucggcaucaacaucacccgguuucagacacugcuggcccugcacagaagcuaccugacaccuggcgauagcagcagcggauggacagcuggugccgccgcuuacuaugugggcuaccugcagccuagaaccuuccugcugaaguacaacgagaacggcaccaucaccgacgccguggauugugcucuggauccucugagcgagacaaagugcacccugaaguccuucaccguggaaaagggcaucuaccagaccagcaacuuccgggugcagcccaccgaauccaucgugcgguuccccaauaucaccaaucugugccccuucggcgagguguucaaugccaccagauucgccucuguguacgccuggaaccggaagcggaucagcaauugcguggccgacuacuccgugcuguacaacuccgccagcuucagcaccuucaagugcuacggcguguccccuaccaagcugaacgaccugugcuucacaaacguguacgccgacagcuucgugauccggggagaugaagugcggcagauugccccuggacagacaggcaagaucgccgacuacaacuacaagcugcccgacgacuucaccggcugugugauugccuggaacagcaacaaccuggacuccaaagucggcggcaacuacaauuaccuguaccggcuguuccggaaguccaaucugaagcccuucgagcgggacaucuccaccgagaucuaucaggccggcagcaccccuuguaacggcguggaaggcuucaacugcuacuucccacugcaguccuacggcuuucagcccacaaauggcgugggcuaucagcccuacagagugguggugcugagcuucgaacugcugcaugccccugccacagugugcggcccuaagaaaagcaccaaucucgugaagaacaaaugcgugaacuucaacuucaacggccugaccggcaccggcgugcugacagagagcaacaagaaguuccugccauuccagcaguuuggccgggauaucgccgauaccacagacgccguuagagauccccagacacuggaaauccuggacaucaccccuugcagcuucggcggagugucugugaucaccccuggcaccaacaccagcaaucagguggcagugcuguaccagggcgugaacuguaccgaagugcccguggccauucacgccgaucagcugacaccuacauggcggguguacuccaccggcagcaauguguuucagaccagagccggcugucugaucggagccgagcacgugaacaauagcuacgagugcgacauccccaucggcgcuggaaucugcgccagcuaccagacacagacaaacagcccucggagagccagaagcguggccagccagagcaucauugccuacacaaugucucugggcgccgagaacagcguggccuacuccaacaacucuaucgcuauccccaccaacuucaccaucagcgugaccacagagauccugccuguguccaugaccaagaccagcguggacugcaccauguacaucugcggcgauuccaccgagugcuccaaccugcugcugcaguacggcagcuucugcacccagcugaauagagcccugacagggaucgccguggaacaggacaagaacacccaagagguguucgcccaagugaagcagaucuacaagaccccuccuaucaaggacuucggcggcuucaauuucagccagauucugcccgauccuagcaagcccagcaagcggagcuucaucgaggaccugcuguucaacaaagugacacuggccgacgccggcuucaucaagcaguauggcgauugucugggcgacauugccgccagggaucugauuugcgcccagaaguuuaacggacugacagugcugccuccucugcugaccgaugagaugaucgcccaguacacaucugcccugcuggccggcacaaucacaagcggcuggacauuuggagcaggcgccgcucugcagauccccuuugcuaugcagauggccuaccgguucaacggcaucggagugacccagaaugugcuguacgagaaccagaagcugaucgccaaccaguucaacagcgccaucggcaagauccaggacagccugagcagcacagcaagcgcccugggaaagcugcaggacguggucaaccagaaugcccaggcacugaacacccuggucaagcagcuguccuccaacuucggcgccaucagcucugugcugaacgauauccugagcagacuggacccuccugaggccgaggugcagaucgacagacugaucacaggcagacugcagagccuccagacauacgugacccagcagcugaucagagccgccgagauuagagccucugccaaucuggccgccaccaagaugucugagugugugcugggccagagcaagagaguggacuuuugcggcaagggcuaccaccugaugagcuucccucagucugccccucacggcgugguguuucugcacgugacauaugugcccgcucaagagaagaauuucaccaccgcuccagccaucugccacgacggcaaagcccacuuuccuagagaaggcguguucguguccaacggcacccauugguucgugacacagcggaacuucuacgagccccagaucaucaccaccgacaacaccuucgugucuggcaacugcgacgucgugaucggcauugugaacaauaccguguacgacccucugcagcccgagcuggacagcuucaaagaggaacuggacaaguacuuuaagaaccacacaagccccgacguggaccugggcgauaucagcggaaucaaugccagcgucgugaacauccagaaagagaucgaccggcugaacgagguggccaagaaucugaacgagagccugaucgaccugcaagaacuggggaaguacgagcaguacaucaaguggcccugguacaucuggcugggcuuuaucgccggacugauugccaucgugauggucacaaucaugcuguguugcaugaccagcugcuguagcugccugaagggcuguuguagcuguggcagcugcugcaaguucgacgaggacgauucugagcccgugcugaagggcgugaaacugcacuacacaugaggacuaguuauaagacugacuagcccgaugggccucccaacgggcccuccuccccuccuugcaccgagauuaauaaaaaaaaaaaaaaaaaaaaaaaaaaaaaaaaaaaaaaaaaaaaaaaaaaaaaaaaaaaaaaaaugcaucccccccccccccccccccccccccccccccaaaggcucuuuucagagccaccagaauu

SEQ ID NO: 23394 - RNA, 4039 nt, Artificial Sequence
  SARS-CoV-2/Wuhan/WIV05/2019__EPI_ISL_402128 spike protein mRNA gc mod (1-1273)(K986P_V987P_Y453F_D614G)
aggagaaagcuuaccauguucguguuccuggugcugcugccucugguguccagccagugugugaaccugaccaccagaacacagcugccuccagccuacaccaacagcuuuaccagaggcguguacuaccccgacaagguguucagauccagcgugcugcacucuacccaggaccuguuccugccuuucuucagcaacgugaccugguuccacgccauccacguguccggcaccaauggcaccaagagauucgacaaccccgugcugcccuucaacgacgggguguacuuugccagcaccgagaaguccaacaucaucagaggcuggaucuucggcaccacacuggacagcaagacccagagccugcugaucgugaacaacgccaccaacguggucaucaaagugugcgaguuccaguucugcaacgaccccuuccugggcgucuacuaccacaagaacaacaagagcuggauggaaagcgaguuccggguguacagcagcgccaacaacugcaccuucgaguacgugucccagccuuuccugauggaccuggaaggcaagcagggcaacuucaagaaccugcgcgaguucguguuuaagaacaucgacggcuacuucaagaucuacagcaagcacaccccuaucaaccucgugcgggaucugccucagggcuucucugcucuggaaccccugguggaucugcccaucggcaucaacaucacccgguuucagacacugcuggcccugcacagaagcuaccugacaccuggcgauagcagcagcggauggacagcuggugccgccgcuuacuaugugggcuaccugcagccuagaaccuuccugcugaaguacaacgagaacggcaccaucaccgacgccguggauugugcucuggauccucugagcgagacaaagugcacccugaaguccuucaccguggaaaagggcaucuaccagaccagcaacuuccgggugcagcccaccgaauccaucgugcgguuccccaauaucaccaaucugugccccuucggcgagguguucaaugccaccagauucgccucuguguacgccuggaaccggaagcggaucagcaauugcguggccgacuacuccgugcuguacaacuccgccagcuucagcaccuucaagugcuacggcguguccccuaccaagcugaacgaccugugcuucacaaacguguacgccgacagcuucgugauccggggagaugaagugcggcagauugccccuggacagacaggcaagaucgccgacuacaacuacaagcugcccgacgacuucaccggcugugugauugccuggaacagcaacaaccuggacuccaaagucggcggcaacuacaauuaccuguuccggcuguuccggaaguccaaucugaagcccuucgagcgggacaucuccaccgagaucuaucaggccggcagcaccccuuguaacggcguggaaggcuucaacugcuacuucccacugcaguccuacggcuuucagcccacaaauggcgugggcuaucagcccuacagagugguggugcugagcuucgaacugcugcaugccccugccacagugugcggcccuaagaaaagcaccaaucucgugaagaacaaaugcgugaacuucaacuucaacggccugaccggcaccggcgugcugacagagagcaacaagaaguuccugccauuccagcaguuuggccgggauaucgccgauaccacagacgccguuagagauccccagacacuggaaauccuggacaucaccccuugcagcuucggcggagugucugugaucaccccuggcaccaacaccagcaaucagguggcagugcuguaccagggcgugaacuguaccgaagugcccguggccauucacgccgaucagcugacaccuacauggcggguguacuccaccggcagcaauguguuucagaccagagccggcugucugaucggagccgagcacgugaacaauagcuacgagugcgacauccccaucggcgcuggaaucugcgccagcuaccagacacagacaaacagcccucggagagccagaagcguggccagccagagcaucauugccuacacaaugucucugggcgccgagaacagcguggccuacuccaacaacucuaucgcuauccccaccaacuucaccaucagcgugaccacagagauccugccuguguccaugaccaagaccagcguggacugcaccauguacaucugcggcgauuccaccgagugcuccaaccugcugcugcaguacggcagcuucugcacccagcugaauagagcccugacagggaucgccguggaacaggacaagaacacccaagagguguucgcccaagugaagcagaucuacaagaccccuccuaucaaggacuucggcggcuucaauuucagccagauucugcccgauccuagcaagcccagcaagcggagcuucaucgaggaccugcuguucaacaaagugacacuggccgacgccggcuucaucaagcaguauggcgauugucugggcgacauugccgccagggaucugauuugcgcccagaaguuuaacggacugacagugcugccuccucugcugaccgaugagaugaucgcccaguacacaucugcccugcuggccggcacaaucacaagcggcuggacauuuggagcaggcgccgcucugcagauccccuuugcuaugcagauggccuaccgguucaacggcaucggagugacccagaaugugcuguacgagaaccagaagcugaucgccaaccaguucaacagcgccaucggcaagauccaggacagccugagcagcacagcaagcgcccugggaaagcugcaggacguggucaaccagaaugcccaggcacugaacacccuggucaagcagcuguccuccaacuucggcgccaucagcucugugcugaacgauauccugagcagacuggacccuccugaggccgaggugcagaucgacagacugaucacaggcagacugcagagccuccagacauacgugacccagcagcugaucagagccgccgagauuagagccucugccaaucuggccgccaccaagaugucugagugugugcugggccagagcaagagaguggacuuuugcggcaagggcuaccaccugaugagcuucccucagucugccccucacggcgugguguuucugcacgugacauaugugcccgcucaagagaagaauuucaccaccgcuccagccaucugccacgacggcaaagcccacuuuccuagagaaggcguguucguguccaacggcacccauugguucgugacacagcggaacuucuacgagccccagaucaucaccaccgacaacaccuucgugucuggcaacugcgacgucgugaucggcauugugaacaauaccguguacgacccucugcagcccgagcuggacagcuucaaagaggaacuggacaaguacuuuaagaaccacacaagccccgacguggaccugggcgauaucagcggaaucaaugccagcgucgugaacauccagaaagagaucgaccggcugaacgagguggccaagaaucugaacgagagccugaucgaccugcaagaacuggggaaguacgagcaguacaucaaguggcccugguacaucuggcugggcuuuaucgccggacugauugccaucgugauggucacaaucaugcuguguugcaugaccagcugcuguagcugccugaagggcuguuguagcuguggcagcugcugcaaguucgacgaggacgauucugagcccgugcugaagggcgugaaacugcacuacacaugaggacuaguuauaagacugacuagcccgaugggccucccaacgggcccuccuccccuccuugcaccgagauuaauaaaaaaaaaaaaaaaaaaaaaaaaaaaaaaaaaaaaaaaaaaaaaaaaaaaaaaaaaaaaaaaaugcaucccccccccccccccccccccccccccccccaaaggcucuuuucagagccaccagaauu

SEQ ID NO: 23395 - RNA, 4039 nt, Artificial Sequence
  SARS-CoV-2/Wuhan/WIV05/2019__EPI_ISL_402128 spike protein mRNA gc mod (1-1273)(K986P_V987P_D614G_I692V)
aggagaaagcuuaccauguucguguuccuggugcugcugccucugguguccagccagugugugaaccugaccaccagaacacagcugccuccagccuacaccaacagcuuuaccagaggcguguacuaccccgacaagguguucagauccagcgugcugcacucuacccaggaccuguuccugccuuucuucagcaacgugaccugguuccacgccauccacguguccggcaccaauggcaccaagagauucgacaaccccgugcugcccuucaacgacgggguguacuuugccagcaccgagaaguccaacaucaucagaggcuggaucuucggcaccacacuggacagcaagacccagagccugcugaucgugaacaacgccaccaacguggucaucaaagugugcgaguuccaguucugcaacgaccccuuccugggcgucuacuaccacaagaacaacaagagcuggauggaaagcgaguuccggguguacagcagcgccaacaacugcaccuucgaguacgugucccagccuuuccugauggaccuggaaggcaagcagggcaacuucaagaaccugcgcgaguucguguuuaagaacaucgacggcuacuucaagaucuacagcaagcacaccccuaucaaccucgugcgggaucugccucagggcuucucugcucuggaaccccugguggaucugcccaucggcaucaacaucacccgguuucagacacugcuggcccugcacagaagcuaccugacaccuggcgauagcagcagcggauggacagcuggugccgccgcuuacuaugugggcuaccugcagccuagaaccuuccugcugaaguacaacgagaacggcaccaucaccgacgccguggauugugcucuggauccucugagcgagacaaagugcacccugaaguccuucaccguggaaaagggcaucuaccagaccagcaacuuccgggugcagcccaccgaauccaucgugcgguuccccaauaucaccaaucugugccccuucggcgagguguucaaugccaccagauucgccucuguguacgccuggaaccggaagcggaucagcaauugcguggccgacuacuccgugcuguacaacuccgccagcuucagcaccuucaagugcuacggcguguccccuaccaagcugaacgaccugugcuucacaaacguguacgccgacagcuucgugauccggggagaugaagugcggcagauugccccuggacagacaggcaagaucgccgacuacaacuacaagcugcccgacgacuucaccggcugugugauugccuggaacagcaacaaccuggacuccaaagucggcggcaacuacaauuaccuguaccggcuguuccggaaguccaaucugaagcccuucgagcgggacaucuccaccgagaucuaucaggccggcagcaccccuuguaacggcguggaaggcuucaacugcuacuucccacugcaguccuacggcuuucagcccacaaauggcgugggcuaucagcccuacagagugguggugcugagcuucgaacugcugcaugccccugccacagugugcggcccuaagaaaagcaccaaucucgugaagaacaaaugcgugaacuucaacuucaacggccugaccggcaccggcgugcugacagagagcaacaagaaguuccugccauuccagcaguuuggccgggauaucgccgauaccacagacgccguuagagauccccagacacuggaaauccuggacaucaccccuugcagcuucggcggagugucugugaucaccccuggcaccaacaccagcaaucagguggcagugcuguaccagggcgugaacuguaccgaagugcccguggccauucacgccgaucagcugacaccuacauggcggguguacuccaccggcagcaauguguuucagaccagagccggcugucugaucggagccgagcacgugaacaauagcuacgagugcgacauccccaucggcgcuggaaucugcgccagcuaccagacacagacaaacagcccucggagagccagaagcguggccagccagagcgugauugccuacacaaugucucugggcgccgagaacagcguggccuacuccaacaacucuaucgcuauccccaccaacuucaccaucagcgugaccacagagauccugccuguguccaugaccaagaccagcguggacugcaccauguacaucugcggcgauuccaccgagugcuccaaccugcugcugcaguacggcagcuucugcacccagcugaauagagcccugacagggaucgccguggaacaggacaagaacacccaagagguguucgcccaagugaagcagaucuacaagaccccuccuaucaaggacuucggcggcuucaauuucagccagauucugcccgauccuagcaagcccagcaagcggagcuucaucgaggaccugcuguucaacaaagugacacuggccgacgccggcuucaucaagcaguauggcgauugucugggcgacauugccgccagggaucugauuugcgcccagaaguuuaacggacugacagugcugccuccucugcugaccgaugagaugaucgcccaguacacaucugcccugcuggccggcacaaucacaagcggcuggacauuuggagcaggcgccgcucugcagauccccuuugcuaugcagauggccuaccgguucaacggcaucggagugacccagaaugugcuguacgagaaccagaagcugaucgccaaccaguucaacagcgccaucggcaagauccaggacagccugagcagcacagcaagcgcccugggaaagcugcaggacguggucaaccagaaugcccaggcacugaacacccuggucaagcagcuguccuccaacuucggcgccaucagcucugugcugaacgauauccugagcagacuggacccuccugaggccgaggugcagaucgacagacugaucacaggcagacugcagagccuccagacauacgugacccagcagcugaucagagccgccgagauuagagccucugccaaucuggccgccaccaagaugucugagugugugcugggccagagcaagagaguggacuuuugcggcaagggcuaccaccugaugagcuucccucagucugccccucacggcgugguguuucugcacgugacauaugugcccgcucaagagaagaauuucaccaccgcuccagccaucugccacgacggcaaagcccacuuuccuagagaaggcguguucguguccaacggcacccauugguucgugacacagcggaacuucuacgagccccagaucaucaccaccgacaacaccuucgugucuggcaacugcgacgucgugaucggcauugugaacaauaccguguacgacccucugcagcccgagcuggacagcuucaaagaggaacuggacaaguacuuuaagaaccacacaagccccgacguggaccugggcgauaucagcggaaucaaugccagcgucgugaacauccagaaagagaucgaccggcugaacgagguggccaagaaucugaacgagagccugaucgaccugcaagaacuggggaaguacgagcaguacaucaaguggcccugguacaucuggcugggcuuuaucgccggacugauugccaucgugauggucacaaucaugcuguguugcaugaccagcugcuguagcugccugaagggcuguuguagcuguggcagcugcugcaaguucgacgaggacgauucugagcccgugcugaagggcgugaaacugcacuacacaugaggacuaguuauaagacugacuagcccgaugggccucccaacgggcccuccuccccuccuugcaccgagauuaauaaaaaaaaaaaaaaaaaaaaaaaaaaaaaaaaaaaaaaaaaaaaaaaaaaaaaaaaaaaaaaaaugcaucccccccccccccccccccccccccccccccaaaggcucuuuucagagccaccagaauu

SEQ ID NO: 23396 - RNA, 4039 nt, Artificial Sequence
  SARS-CoV-2/Wuhan/WIV05/2019__EPI_ISL_402128 spike protein mRNA gc mod (1-1273)(K986P_V987P_D614G_M1229I)
aggagaaagcuuaccauguucguguuccuggugcugcugccucugguguccagccagugugugaaccugaccaccagaacacagcugccuccagccuacaccaacagcuuuaccagaggcguguacuaccccgacaagguguucagauccagcgugcugcacucuacccaggaccuguuccugccuuucuucagcaacgugaccugguuccacgccauccacguguccggcaccaauggcaccaagagauucgacaaccccgugcugcccuucaacgacgggguguacuuugccagcaccgagaaguccaacaucaucagaggcuggaucuucggcaccacacuggacagcaagacccagagccugcugaucgugaacaacgccaccaacguggucaucaaagugugcgaguuccaguucugcaacgaccccuuccugggcgucuacuaccacaagaacaacaagagcuggauggaaagcgaguuccggguguacagcagcgccaacaacugcaccuucgaguacgugucccagccuuuccugauggaccuggaaggcaagcagggcaacuucaagaaccugcgcgaguucguguuuaagaacaucgacggcuacuucaagaucuacagcaagcacaccccuaucaaccucgugcgggaucugccucagggcuucucugcucuggaaccccugguggaucugcccaucggcaucaacaucacccgguuucagacacugcuggcccugcacagaagcuaccugacaccuggcgauagcagcagcggauggacagcuggugccgccgcuuacuaugugggcuaccugcagccuagaaccuuccugcugaaguacaacgagaacggcaccaucaccgacgccguggauugugcucuggauccucugagcgagacaaagugcacccugaaguccuucaccguggaaaagggcaucuaccagaccagcaacuuccgggugcagcccaccgaauccaucgugcgguuccccaauaucaccaaucugugccccuucggcgagguguucaaugccaccagauucgccucuguguacgccuggaaccggaagcggaucagcaauugcguggccgacuacuccgugcuguacaacuccgccagcuucagcaccuucaagugcuacggcguguccccuaccaagcugaacgaccugugcuucacaaacguguacgccgacagcuucgugauccggggagaugaagugcggcagauugccccuggacagacaggcaagaucgccgacuacaacuacaagcugcccgacgacuucaccggcugugugauugccuggaacagcaacaaccuggacuccaaagucggcggcaacuacaauuaccuguaccggcuguuccggaaguccaaucugaagcccuucgagcgggacaucuccaccgagaucuaucaggccggcagcaccccuuguaacggcguggaaggcuucaacugcuacuucccacugcaguccuacggcuuucagcccacaaauggcgugggcuaucagcccuacagagugguggugcugagcuucgaacugcugcaugccccugccacagugugcggcccuaagaaaagcaccaaucucgugaagaacaaaugcgugaacuucaacuucaacggccugaccggcaccggcgugcugacagagagcaacaagaaguuccugccauuccagcaguuuggccgggauaucgccgauaccacagacgccguuagagauccccagacacuggaaauccuggacaucaccccuugcagcuucggcggagugucugugaucaccccuggcaccaacaccagcaaucagguggcagugcuguaccagggcgugaacuguaccgaagugcccguggccauucacgccgaucagcugacaccuacauggcggguguacuccaccggcagcaauguguuucagaccagagccggcugucugaucggagccgagcacgugaacaauagcuacgagugcgacauccccaucggcgcuggaaucugcgccagcuaccagacacagacaaacagcccucggagagccagaagcguggccagccagagcaucauugccuacacaaugucucugggcgccgagaacagcguggccuacuccaacaacucuaucgcuauccccaccaacuucaccaucagcgugaccacagagauccugccuguguccaugaccaagaccagcguggacugcaccauguacaucugcggcgauuccaccgagugcuccaaccugcugcugcaguacggcagcuucugcacccagcugaauagagcccugacagggaucgccguggaacaggacaagaacacccaagagguguucgcccaagugaagcagaucuacaagaccccuccuaucaaggacuucggcggcuucaauuucagccagauucugcccgauccuagcaagcccagcaagcggagcuucaucgaggaccugcuguucaacaaagugacacuggccgacgccggcuucaucaagcaguauggcgauugucugggcgacauugccgccagggaucugauuugcgcccagaaguuuaacggacugacagugcugccuccucugcugaccgaugagaugaucgcccaguacacaucugcccugcuggccggcacaaucacaagcggcuggacauuuggagcaggcgccgcucugcagauccccuuugcuaugcagauggccuaccgguucaacggcaucggagugacccagaaugugcuguacgagaaccagaagcugaucgccaaccaguucaacagcgccaucggcaagauccaggacagccugagcagcacagcaagcgcccugggaaagcugcaggacguggucaaccagaaugcccaggcacugaacacccuggucaagcagcuguccuccaacuucggcgccaucagcucugugcugaacgauauccugagcagacuggacccuccugaggccgaggugcagaucgacagacugaucacaggcagacugcagagccuccagacauacgugacccagcagcugaucagagccgccgagauuagagccucugccaaucuggccgccaccaagaugucugagugugugcugggccagagcaagagaguggacuuuugcggcaagggcuaccaccugaugagcuucccucagucugccccucacggcgugguguuucugcacgugacauaugugcccgcucaagagaagaauuucaccaccgcuccagccaucugccacgacggcaaagcccacuuuccuagagaaggcguguucguguccaacggcacccauugguucgugacacagcggaacuucuacgagccccagaucaucaccaccgacaacaccuucgugucuggcaacugcgacgucgugaucggcauugugaacaauaccguguacgacccucugcagcccgagcuggacagcuucaaagaggaacuggacaaguacuuuaagaaccacacaagccccgacguggaccugggcgauaucagcggaaucaaugccagcgucgugaacauccagaaagagaucgaccggcugaacgagguggccaagaaucugaacgagagccugaucgaccugcaagaacuggggaaguacgagcaguacaucaaguggcccugguacaucuggcugggcuuuaucgccggacugauugccaucgugaucgucacaaucaugcuguguugcaugaccagcugcuguagcugccugaagggcuguuguagcuguggcagcugcugcaaguucgacgaggacgauucugagcccgugcugaagggcgugaaacugcacuacacaugaggacuaguuauaagacugacuagcccgaugggccucccaacgggcccuccuccccuccuugcaccgagauuaauaaaaaaaaaaaaaaaaaaaaaaaaaaaaaaaaaaaaaaaaaaaaaaaaaaaaaaaaaaaaaaaaugcaucccccccccccccccccccccccccccccccaaaggcucuuuucagagccaccagaauu

SEQ ID NO: 23397 - RNA, 4033 nt, Artificial Sequence
  SARS-CoV-2/Wuhan/WIV05/2019__EPI_ISL_402128 spike protein mRNA gc mod (1-1273)(K986P_V987P_H69del_V70del_A222V_Y453F_S477N_D614G_I692V)
aggagaaagcuuaccauguucguguuccuggugcugcugccucugguguccagccagugugugaaccugaccaccagaacacagcugccuccagccuacaccaacagcuuuaccagaggcguguacuaccccgacaagguguucagauccagcgugcugcacucuacccaggaccuguuccugccuuucuucagcaacgugaccugguuccacgccaucuccggcaccaauggcaccaagagauucgacaaccccgugcugcccuucaacgacgggguguacuuugccagcaccgagaaguccaacaucaucagaggcuggaucuucggcaccacacuggacagcaagacccagagccugcugaucgugaacaacgccaccaacguggucaucaaagugugcgaguuccaguucugcaacgaccccuuccugggcgucuacuaccacaagaacaacaagagcuggauggaaagcgaguuccggguguacagcagcgccaacaacugcaccuucgaguacgugucccagccuuuccugauggaccuggaaggcaagcagggcaacuucaagaaccugcgcgaguucguguuuaagaacaucgacggcuacuucaagaucuacagcaagcacaccccuaucaaccucgugcgggaucugccucagggcuucucugugcuggaaccccugguggaucugcccaucggcaucaacaucacccgguuucagacacugcuggcccugcacagaagcuaccugacaccuggcgauagcagcagcggauggacagcuggugccgccgcuuacuaugugggcuaccugcagccuagaaccuuccugcugaaguacaacgagaacggcaccaucaccgacgccguggauugugcucuggauccucugagcgagacaaagugcacccugaaguccuucaccguggaaaagggcaucuaccagaccagcaacuuccgggugcagcccaccgaauccaucgugcgguuccccaauaucaccaaucugugccccuucggcgagguguucaaugccaccagauucgccucuguguacgccuggaaccggaagcggaucagcaauugcguggccgacuacuccgugcuguacaacuccgccagcuucagcaccuucaagugcuacggcguguccccuaccaagcugaacgaccugugcuucacaaacguguacgccgacagcuucgugauccggggagaugaagugcggcagauugccccuggacagacaggcaagaucgccgacuacaacuacaagcugcccgacgacuucaccggcugugugauugccuggaacagcaacaaccuggacuccaaagucggcggcaacuacaauuaccuguuccggcuguuccggaaguccaaucugaagcccuucgagcgggacaucuccaccgagaucuaucaggccggcaacaccccuuguaacggcguggaaggcuucaacugcuacuucccacugcaguccuacggcuuucagcccacaaauggcgugggcuaucagcccuacagagugguggugcugagcuucgaacugcugcaugccccugccacagugugcggcccuaagaaaagcaccaaucucgugaagaacaaaugcgugaacuucaacuucaacggccugaccggcaccggcgugcugacagagagcaacaagaaguuccugccauuccagcaguuuggccgggauaucgccgauaccacagacgccguuagagauccccagacacuggaaauccuggacaucaccccuugcagcuucggcggagugucugugaucaccccuggcaccaacaccagcaaucagguggcagugcuguaccagggcgugaacuguaccgaagugcccguggccauucacgccgaucagcugacaccuacauggcggguguacuccaccggcagcaauguguuucagaccagagccggcugucugaucggagccgagcacgugaacaauagcuacgagugcgacauccccaucggcgcuggaaucugcgccagcuaccagacacagacaaacagcccucggagagccagaagcguggccagccagagcgugauugccuacacaaugucucugggcgccgagaacagcguggccuacuccaacaacucuaucgcuauccccaccaacuucaccaucagcgugaccacagagauccugccuguguccaugaccaagaccagcguggacugcaccauguacaucugcggcgauuccaccgagugcuccaaccugcugcugcaguacggcagcuucugcacccagcugaauagagcccugacagggaucgccguggaacaggacaagaacacccaagagguguucgcccaagugaagcagaucuacaagaccccuccuaucaaggacuucggcggcuucaauuucagccagauucugcccgauccuagcaagcccagcaagcggagcuucaucgaggaccugcuguucaacaaagugacacuggccgacgccggcuucaucaagcaguauggcgauugucugggcgacauugccgccagggaucugauuugcgcccagaaguuuaacggacugacagugcugccuccucugcugaccgaugagaugaucgcccaguacacaucugcccugcuggccggcacaaucacaagcggcuggacauuuggagcaggcgccgcucugcagauccccuuugcuaugcagauggccuaccgguucaacggcaucggagugacccagaaugugcuguacgagaaccagaagcugaucgccaaccaguucaacagcgccaucggcaagauccaggacagccugagcagcacagcaagcgcccugggaaagcugcaggacguggucaaccagaaugcccaggcacugaacacccuggucaagcagcuguccuccaacuucggcgccaucagcucugugcugaacgauauccugagcagacuggacccuccugaggccgaggugcagaucgacagacugaucacaggcagacugcagagccuccagacauacgugacccagcagcugaucagagccgccgagauuagagccucugccaaucuggccgccaccaagaugucugagugugugcugggccagagcaagagaguggacuuuugcggcaagggcuaccaccugaugagcuucccucagucugccccucacggcgugguguuucugcacgugacauaugugcccgcucaagagaagaauuucaccaccgcuccagccaucugccacgacggcaaagcccacuuuccuagagaaggcguguucguguccaacggcacccauugguucgugacacagcggaacuucuacgagccccagaucaucaccaccgacaacaccuucgugucuggcaacugcgacgucgugaucggcauugugaacaauaccguguacgacccucugcagcccgagcuggacagcuucaaagaggaacuggacaaguacuuuaagaaccacacaagccccgacguggaccugggcgauaucagcggaaucaaugccagcgucgugaacauccagaaagagaucgaccggcugaacgagguggccaagaaucugaacgagagccugaucgaccugcaagaacuggggaaguacgagcaguacaucaaguggcccugguacaucuggcugggcuuuaucgccggacugauugccaucgugauggucacaaucaugcuguguugcaugaccagcugcuguagcugccugaagggcuguuguagcuguggcagcugcugcaaguucgacgaggacgauucugagcccgugcugaagggcgugaaacugcacuacacaugaggacuaguuauaagacugacuagcccgaugggccucccaacgggcccuccuccccuccuugcaccgagauuaauaaaaaaaaaaaaaaaaaaaaaaaaaaaaaaaaaaaaaaaaaaaaaaaaaaaaaaaaaaaaaaaaugcaucccccccccccccccccccccccccccccccaaaggcucuuuucagagccaccagaauu

SEQ ID NO: 23398 - RNA, 4033 nt, Artificial Sequence
  SARS-CoV-2/Wuhan/WIV05/2019__EPI_ISL_402128 spike protein mRNA gc mod (1-1273)(K986P_V987P_H69del_V70del_Y453F_D614G_I692V_M1229I)
aggagaaagcuuaccauguucguguuccuggugcugcugccucugguguccagccagugugugaaccugaccaccagaacacagcugccuccagccuacaccaacagcuuuaccagaggcguguacuaccccgacaagguguucagauccagcgugcugcacucuacccaggaccuguuccugccuuucuucagcaacgugaccugguuccacgccaucuccggcaccaauggcaccaagagauucgacaaccccgugcugcccuucaacgacgggguguacuuugccagcaccgagaaguccaacaucaucagaggcuggaucuucggcaccacacuggacagcaagacccagagccugcugaucgugaacaacgccaccaacguggucaucaaagugugcgaguuccaguucugcaacgaccccuuccugggcgucuacuaccacaagaacaacaagagcuggauggaaagcgaguuccggguguacagcagcgccaacaacugcaccuucgaguacgugucccagccuuuccugauggaccuggaaggcaagcagggcaacuucaagaaccugcgcgaguucguguuuaagaacaucgacggcuacuucaagaucuacagcaagcacaccccuaucaaccucgugcgggaucugccucagggcuucucugcucuggaaccccugguggaucugcccaucggcaucaacaucacccgguuucagacacugcuggcccugcacagaagcuaccugacaccuggcgauagcagcagcggauggacagcuggugccgccgcuuacuaugugggcuaccugcagccuagaaccuuccugcugaaguacaacgagaacggcaccaucaccgacgccguggauugugcucuggauccucugagcgagacaaagugcacccugaaguccuucaccguggaaaagggcaucuaccagaccagcaacuuccgggugcagcccaccgaauccaucgugcgguuccccaauaucaccaaucugugccccuucggcgagguguucaaugccaccagauucgccucuguguacgccuggaaccggaagcggaucagcaauugcguggccgacuacuccgugcuguacaacuccgccagcuucagcaccuucaagugcuacggcguguccccuaccaagcugaacgaccugugcuucacaaacguguacgccgacagcuucgugauccggggagaugaagugcggcagauugccccuggacagacaggcaagaucgccgacuacaacuacaagcugcccgacgacuucaccggcugugugauugccuggaacagcaacaaccuggacuccaaagucggcggcaacuacaauuaccuguuccggcuguuccggaaguccaaucugaagcccuucgagcgggacaucuccaccgagaucuaucaggccggcagcaccccuuguaacggcguggaaggcuucaacugcuacuucccacugcaguccuacggcuuucagcccacaaauggcgugggcuaucagcccuacagagugguggugcugagcuucgaacugcugcaugccccugccacagugugcggcccuaagaaaagcaccaaucucgugaagaacaaaugcgugaacuucaacuucaacggccugaccggcaccggcgugcugacagagagcaacaagaaguuccugccauuccagcaguuuggccgggauaucgccgauaccacagacgccguuagagauccccagacacuggaaauccuggacaucaccccuugcagcuucggcggagugucugugaucaccccuggcaccaacaccagcaaucagguggcagugcuguaccagggcgugaacuguaccgaagugcccguggccauucacgccgaucagcugacaccuacauggcggguguacuccaccggcagcaauguguuucagaccagagccggcugucugaucggagccgagcacgugaacaauagcuacgagugcgacauccccaucggcgcuggaaucugcgccagcuaccagacacagacaaacagcccucggagagccagaagcguggccagccagagcgugauugccuacacaaugucucugggcgccgagaacagcguggccuacuccaacaacucuaucgcuauccccaccaacuucaccaucagcgugaccacagagauccugccuguguccaugaccaagaccagcguggacugcaccauguacaucugcggcgauuccaccgagugcuccaaccugcugcugcaguacggcagcuucugcacccagcugaauagagcccugacagggaucgccguggaacaggacaagaacacccaagagguguucgcccaagugaagcagaucuacaagaccccuccuaucaaggacuucggcggcuucaauuucagccagauucugcccgauccuagcaagcccagcaagcggagcuucaucgaggaccugcuguucaacaaagugacacuggccgacgccggcuucaucaagcaguauggcgauugucugggcgacauugccgccagggaucugauuugcgcccagaaguuuaacggacugacagugcugccuccucugcugaccgaugagaugaucgcccaguacacaucugcccugcuggccggcacaaucacaagcggcuggacauuuggagcaggcgccgcucugcagauccccuuugcuaugcagauggccuaccgguucaacggcaucggagugacccagaaugugcuguacgagaaccagaagcugaucgccaaccaguucaacagcgccaucggcaagauccaggacagccugagcagcacagcaagcgcccugggaaagcugcaggacguggucaaccagaaugcccaggcacugaacacccuggucaagcagcuguccuccaacuucggcgccaucagcucugugcugaacgauauccugagcagacuggacccuccugaggccgaggugcagaucgacagacugaucacaggcagacugcagagccuccagacauacgugacccagcagcugaucagagccgccgagauuagagccucugccaaucuggccgccaccaagaugucugagugugugcugggccagagcaagagaguggacuuuugcggcaagggcuaccaccugaugagcuucccucagucugccccucacggcgugguguuucugcacgugacauaugugcccgcucaagagaagaauuucaccaccgcuccagccaucugccacgacggcaaagcccacuuuccuagagaaggcguguucguguccaacggcacccauugguucgugacacagcggaacuucuacgagccccagaucaucaccaccgacaacaccuucgugucuggcaacugcgacgucgugaucggcauugugaacaauaccguguacgacccucugcagcccgagcuggacagcuucaaagaggaacuggacaaguacuuuaagaaccacacaagccccgacguggaccugggcgauaucagcggaaucaaugccagcgucgugaacauccagaaagagaucgaccggcugaacgagguggccaagaaucugaacgagagccugaucgaccugcaagaacuggggaaguacgagcaguacaucaaguggcccugguacaucuggcugggcuuuaucgccggacugauugccaucgugaucgucacaaucaugcuguguugcaugaccagcugcuguagcugccugaagggcuguuguagcuguggcagcugcugcaaguucgacgaggacgauucugagcccgugcugaagggcgugaaacugcacuacacaugaggacuaguuauaagacugacuagcccgaugggccucccaacgggcccuccuccccuccuugcaccgagauuaauaaaaaaaaaaaaaaaaaaaaaaaaaaaaaaaaaaaaaaaaaaaaaaaaaaaaaaaaaaaaaaaaugcaucccccccccccccccccccccccccccccccaaaggcucuuuucagagccaccagaauu

SEQ ID NO: 23399 - RNA, 4030 nt, Artificial Sequence
  SARS-CoV-2/Wuhan/WIV05/2019__EPI_ISL_402128 spike protein mRNA gc mod (1-1273)(K986P_V987P_K986P_V987P_H69del_V70del_Y144del_N501Y_A570 D_D614G_P681H_T716I_S982A_D1118H)
aggagaaagcuuaccauguucguguuccuggugcugcugccucugguguccagccagugugugaaccugaccaccagaacacagcugccuccagccuacaccaacagcuuuaccagaggcguguacuaccccgacaagguguucagauccagcgugcugcacucuacccaggaccuguuccugccuuucuucagcaacgugaccugguuccacgccaucuccggcaccaauggcaccaagagauucgacaaccccgugcugcccuucaacgacgggguguacuuugccagcaccgagaaguccaacaucaucagaggcuggaucuucggcaccacacuggacagcaagacccagagccugcugaucgugaacaacgccaccaacguggucaucaaagugugcgaguuccaguucugcaacgaccccuuccugggcgucuaccacaagaacaacaagagcuggauggaaagcgaguuccggguguacagcagcgccaacaacugcaccuucgaguacgugucccagccuuuccugauggaccuggaaggcaagcagggcaacuucaagaaccugcgcgaguucguguuuaagaacaucgacggcuacuucaagaucuacagcaagcacaccccuaucaaccucgugcgggaucugccucagggcuucucugcucuggaaccccugguggaucugcccaucggcaucaacaucacccgguuucagacacugcuggcccugcacagaagcuaccugacaccuggcgauagcagcagcggauggacagcuggugccgccgcuuacuaugugggcuaccugcagccuagaaccuuccugcugaaguacaacgagaacggcaccaucaccgacgccguggauugugcucuggauccucugagcgagacaaagugcacccugaaguccuucaccguggaaaagggcaucuaccagaccagcaacuuccgggugcagcccaccgaauccaucgugcgguuccccaauaucaccaaucugugccccuucggcgagguguucaaugccaccagauucgccucuguguacgccuggaaccggaagcggaucagcaauugcguggccgacuacuccgugcuguacaacuccgccagcuucagcaccuucaagugcuacggcguguccccuaccaagcugaacgaccugugcuucacaaacguguacgccgacagcuucgugauccggggagaugaagugcggcagauugccccuggacagacaggcaagaucgccgacuacaacuacaagcugcccgacgacuucaccggcugugugauugccuggaacagcaacaaccuggacuccaaagucggcggcaacuacaauuaccuguaccggcuguuccggaaguccaaucugaagcccuucgagcgggacaucuccaccgagaucuaucaggccggcagcaccccuuguaacggcguggaaggcuucaacugcuacuucccacugcaguccuacggcuuucagcccacauacggcgugggcuaucagcccuacagagugguggugcugagcuucgaacugcugcaugccccugccacagugugcggcccuaagaaaagcaccaaucucgugaagaacaaaugcgugaacuucaacuucaacggccugaccggcaccggcgugcugacagagagcaacaagaaguuccugccauuccagcaguuuggccgggauaucgacgauaccacagacgccguuagagauccccagacacuggaaauccuggacaucaccccuugcagcuucggcggagugucugugaucaccccuggcaccaacaccagcaaucagguggcagugcuguaccagggcgugaacuguaccgaagugcccguggccauucacgccgaucagcugacaccuacauggcggguguacuccaccggcagcaauguguuucagaccagagccggcugucugaucggagccgagcacgugaacaauagcuacgagugcgacauccccaucggcgcuggaaucugcgccagcuaccagacacagacaaacagccaccggagagccagaagcguggccagccagagcaucauugccuacacaaugucucugggcgccgagaacagcguggccuacuccaacaacucuaucgcuauccccaucaacuucaccaucagcgugaccacagagauccugccuguguccaugaccaagaccagcguggacugcaccauguacaucugcggcgauuccaccgagugcuccaaccugcugcugcaguacggcagcuucugcacccagcugaauagagcccugacagggaucgccguggaacaggacaagaacacccaagagguguucgcccaagugaagcagaucuacaagaccccuccuaucaaggacuucggcggcuucaauuucagccagauucugcccgauccuagcaagcccagcaagcggagcuucaucgaggaccugcuguucaacaaagugacacuggccgacgccggcuucaucaagcaguauggcgauugucugggcgacauugccgccagggaucugauuugcgcccagaaguuuaacggacugacagugcugccuccucugcugaccgaugagaugaucgcccaguacacaucugcccugcuggccggcacaaucacaagcggcuggacauuuggagcaggcgccgcucugcagauccccuuugcuaugcagauggccuaccgguucaacggcaucggagugacccagaaugugcuguacgagaaccagaagcugaucgccaaccaguucaacagcgccaucggcaagauccaggacagccugagcagcacagcaagcgcccugggaaagcugcaggacguggucaaccagaaugcccaggcacugaacacccuggucaagcagcuguccuccaacuucggcgccaucagcucugugcugaacgauauccuggccagacuggacccuccugaggccgaggugcagaucgacagacugaucacaggcagacugcagagccuccagacauacgugacccagcagcugaucagagccgccgagauuagagccucugccaaucuggccgccaccaagaugucugagugugugcugggccagagcaagagaguggacuuuugcggcaagggcuaccaccugaugagcuucccucagucugccccucacggcgugguguuucugcacgugacauaugugcccgcucaagagaagaauuucaccaccgcuccagccaucugccacgacggcaaagcccacuuuccuagagaaggcguguucguguccaacggcacccauugguucgugacacagcggaacuucuacgagccccagaucaucaccacccacaacaccuucgugucuggcaacugcgacgucgugaucggcauugugaacaauaccguguacgacccucugcagcccgagcuggacagcuucaaagaggaacuggacaaguacuuuaagaaccacacaagccccgacguggaccugggcgauaucagcggaaucaaugccagcgucgugaacauccagaaagagaucgaccggcugaacgagguggccaagaaucugaacgagagccugaucgaccugcaagaacuggggaaguacgagcaguacaucaaguggcccugguacaucuggcugggcuuuaucgccggacugauugccaucgugauggucacaaucaugcuguguugcaugaccagcugcuguagcugccugaagggcuguuguagcuguggcagcugcugcaaguucgacgaggacgauucugagcccgugcugaagggcgugaaacugcacuacacaugaggacuaguuauaagacugacuagcccgaugggccucccaacgggcccuccuccccuccuugcaccgagauuaauaaaaaaaaaaaaaaaaaaaaaaaaaaaaaaaaaaaaaaaaaaaaaaaaaaaaaaaaaaaaaaaaugcaucccccccccccccccccccccccccccccccaaaggcucuuuucagagccaccagaauu

SEQ ID NO: 23400 - RNA, 4039 nt, Artificial Sequence
  SARS-CoV-2/Wuhan/WIV05/2019__EPI_ISL_402128 spike protein mRNA gc mod (1-1273)(K986P_V987P_K986P_V987P_K417N_E484K_N501Y_D614G)
aggagaaagcuuaccauguucguguuccuggugcugcugccucugguguccagccagugugugaaccugaccaccagaacacagcugccuccagccuacaccaacagcuuuaccagaggcguguacuaccccgacaagguguucagauccagcgugcugcacucuacccaggaccuguuccugccuuucuucagcaacgugaccugguuccacgccauccacguguccggcaccaauggcaccaagagauucgacaaccccgugcugcccuucaacgacgggguguacuuugccagcaccgagaaguccaacaucaucagaggcuggaucuucggcaccacacuggacagcaagacccagagccugcugaucgugaacaacgccaccaacguggucaucaaagugugcgaguuccaguucugcaacgaccccuuccugggcgucuacuaccacaagaacaacaagagcuggauggaaagcgaguuccggguguacagcagcgccaacaacugcaccuucgaguacgugucccagccuuuccugauggaccuggaaggcaagcagggcaacuucaagaaccugcgcgaguucguguuuaagaacaucgacggcuacuucaagaucuacagcaagcacaccccuaucaaccucgugcgggaucugccucagggcuucucugcucuggaaccccugguggaucugcccaucggcaucaacaucacccgguuucagacacugcuggcccugcacagaagcuaccugacaccuggcgauagcagcagcggauggacagcuggugccgccgcuuacuaugugggcuaccugcagccuagaaccuuccugcugaaguacaacgagaacggcaccaucaccgacgccguggauugugcucuggauccucugagcgagacaaagugcacccugaaguccuucaccguggaaaagggcaucuaccagaccagcaacuuccgggugcagcccaccgaauccaucgugcgguuccccaauaucaccaaucugugccccuucggcgagguguucaaugccaccagauucgccucuguguacgccuggaaccggaagcggaucagcaauugcguggccgacuacuccgugcuguacaacuccgccagcuucagcaccuucaagugcuacggcguguccccuaccaagcugaacgaccugugcuucacaaacguguacgccgacagcuucgugauccggggagaugaagugcggcagauugccccuggacagacaggcaacaucgccgacuacaacuacaagcugcccgacgacuucaccggcugugugauugccuggaacagcaacaaccuggacuccaaagucggcggcaacuacaauuaccuguaccggcuguuccggaaguccaaucugaagcccuucgagcgggacaucuccaccgagaucuaucaggccggcagcaccccuuguaacggcgugaagggcuucaacugcuacuucccacugcaguccuacggcuuucagcccacauacggcgugggcuaucagcccuacagagugguggugcugagcuucgaacugcugcaugccccugccacagugugcggcccuaagaaaagcaccaaucucgugaagaacaaaugcgugaacuucaacuucaacggccugaccggcaccggcgugcugacagagagcaacaagaaguuccugccauuccagcaguuuggccgggauaucgccgauaccacagacgccguuagagauccccagacacuggaaauccuggacaucaccccuugcagcuucggcggagugucugugaucaccccuggcaccaacaccagcaaucagguggcagugcuguaccagggcgugaacuguaccgaagugcccguggccauucacgccgaucagcugacaccuacauggcggguguacuccaccggcagcaauguguuucagaccagagccggcugucugaucggagccgagcacgugaacaauagcuacgagugcgacauccccaucggcgcuggaaucugcgccagcuaccagacacagacaaacagcccucggagagccagaagcguggccagccagagcaucauugccuacacaaugucucugggcgccgagaacagcguggccuacuccaacaacucuaucgcuauccccaccaacuucaccaucagcgugaccacagagauccugccuguguccaugaccaagaccagcguggacugcaccauguacaucugcggcgauuccaccgagugcuccaaccugcugcugcaguacggcagcuucugcacccagcugaauagagcccugacagggaucgccguggaacaggacaagaacacccaagagguguucgcccaagugaagcagaucuacaagaccccuccuaucaaggacuucggcggcuucaauuucagccagauucugcccgauccuagcaagcccagcaagcggagcuucaucgaggaccugcuguucaacaaagugacacuggccgacgccggcuucaucaagcaguauggcgauugucugggcgacauugccgccagggaucugauuugcgcccagaaguuuaacggacugacagugcugccuccucugcugaccgaugagaugaucgcccaguacacaucugcccugcuggccggcacaaucacaagcggcuggacauuuggagcaggcgccgcucugcagauccccuuugcuaugcagauggccuaccgguucaacggcaucggagugacccagaaugugcuguacgagaaccagaagcugaucgccaaccaguucaacagcgccaucggcaagauccaggacagccugagcagcacagcaagcgcccugggaaagcugcaggacguggucaaccagaaugcccaggcacugaacacccuggucaagcagcuguccuccaacuucggcgccaucagcucugugcugaacgauauccugagcagacuggacccuccugaggccgaggugcagaucgacagacugaucacaggcagacugcagagccuccagacauacgugacccagcagcugaucagagccgccgagauuagagccucugccaaucuggccgccaccaagaugucugagugugugcugggccagagcaagagaguggacuuuugcggcaagggcuaccaccugaugagcuucccucagucugccccucacggcgugguguuucugcacgugacauaugugcccgcucaagagaagaauuucaccaccgcuccagccaucugccacgacggcaaagcccacuuuccuagagaaggcguguucguguccaacggcacccauugguucgugacacagcggaacuucuacgagccccagaucaucaccaccgacaacaccuucgugucuggcaacugcgacgucgugaucggcauugugaacaauaccguguacgacccucugcagcccgagcuggacagcuucaaagaggaacuggacaaguacuuuaagaaccacacaagccccgacguggaccugggcgauaucagcggaaucaaugccagcgucgugaacauccagaaagagaucgaccggcugaacgagguggccaagaaucugaacgagagccugaucgaccugcaagaacuggggaaguacgagcaguacaucaaguggcccugguacaucuggcugggcuuuaucgccggacugauugccaucgugauggucacaaucaugcuguguugcaugaccagcugcuguagcugccugaagggcuguuguagcuguggcagcugcugcaaguucgacgaggacgauucugagcccgugcugaagggcgugaaacugcacuacacaugaggacuaguuauaagacugacuagcccgaugggccucccaacgggcccuccuccccuccuugcaccgagauuaauaaaaaaaaaaaaaaaaaaaaaaaaaaaaaaaaaaaaaaaaaaaaaaaaaaaaaaaaaaaaaaaaugcaucccccccccccccccccccccccccccccccaaaggcucuuuucagagccaccagaauu

SEQ ID NO: 23401 - RNA, 4030 nt, Artificial Sequence
  SARS-CoV-2/Wuhan/WIV05/2019__EPI_ISL_402128 spike protein mRNA gc mod (1-1273)(K986P_V987P_K986P_V987P_L18F_D80A_D215G_L242del_A243del_ L244del_R246I_K417N_E484K_N501Y_D614G_A701V)
aggagaaagcuuaccauguucguguuccuggugcugcugccucugguguccagccagugugugaacuucaccaccagaacacagcugccuccagccuacaccaacagcuuuaccagaggcguguacuaccccgacaagguguucagauccagcgugcugcacucuacccaggaccuguuccugccuuucuucagcaacgugaccugguuccacgccauccacguguccggcaccaauggcaccaagagauucgccaaccccgugcugcccuucaacgacgggguguacuuugccagcaccgagaaguccaacaucaucagaggcuggaucuucggcaccacacuggacagcaagacccagagccugcugaucgugaacaacgccaccaacguggucaucaaagugugcgaguuccaguucugcaacgaccccuuccugggcgucuacuaccacaagaacaacaagagcuggauggaaagcgaguuccggguguacagcagcgccaacaacugcaccuucgaguacgugucccagccuuuccugauggaccuggaaggcaagcagggcaacuucaagaaccugcgcgaguucguguuuaagaacaucgacggcuacuucaagaucuacagcaagcacaccccuaucaaccucgugcggggccugccucagggcuucucugcucuggaaccccugguggaucugcccaucggcaucaacaucacccgguuucagacacugcacaucagcuaccugacaccuggcgauagcagcagcggauggacagcuggugccgccgcuuacuaugugggcuaccugcagccuagaaccuuccugcugaaguacaacgagaacggcaccaucaccgacgccguggauugugcucuggauccucugagcgagacaaagugcacccugaaguccuucaccguggaaaagggcaucuaccagaccagcaacuuccgggugcagcccaccgaauccaucgugcgguuccccaauaucaccaaucugugccccuucggcgagguguucaaugccaccagauucgccucuguguacgccuggaaccggaagcggaucagcaauugcguggccgacuacuccgugcuguacaacuccgccagcuucagcaccuucaagugcuacggcguguccccuaccaagcugaacgaccugugcuucacaaacguguacgccgacagcuucgugauccggggagaugaagugcggcagauugccccuggacagacaggcaacaucgccgacuacaacuacaagcugcccgacgacuucaccggcugugugauugccuggaacagcaacaaccuggacuccaaagucggcggcaacuacaauuaccuguaccggcuguuccggaaguccaaucugaagcccuucgagcgggacaucuccaccgagaucuaucaggccggcagcaccccuuguaacggcgugaagggcuucaacugcuacuucccacugcaguccuacggcuuucagcccacauacggcgugggcuaucagcccuacagagugguggugcugagcuucgaacugcugcaugccccugccacagugugcggcccuaagaaaagcaccaaucucgugaagaacaaaugcgugaacuucaacuucaacggccugaccggcaccggcgugcugacagagagcaacaagaaguuccugccauuccagcaguuuggccgggauaucgccgauaccacagacgccguuagagauccccagacacuggaaauccuggacaucaccccuugcagcuucggcggagugucugugaucaccccuggcaccaacaccagcaaucagguggcagugcuguaccagggcgugaacuguaccgaagugcccguggccauucacgccgaucagcugacaccuacauggcggguguacuccaccggcagcaauguguuucagaccagagccggcugucugaucggagccgagcacgugaacaauagcuacgagugcgacauccccaucggcgcuggaaucugcgccagcuaccagacacagacaaacagcccucggagagccagaagcguggccagccagagcaucauugccuacacaaugucucugggcguggagaacagcguggccuacuccaacaacucuaucgcuauccccaccaacuucaccaucagcgugaccacagagauccugccuguguccaugaccaagaccagcguggacugcaccauguacaucugcggcgauuccaccgagugcuccaaccugcugcugcaguacggcagcuucugcacccagcugaauagagcccugacagggaucgccguggaacaggacaagaacacccaagagguguucgcccaagugaagcagaucuacaagaccccuccuaucaaggacuucggcggcuucaauuucagccagauucugcccgauccuagcaagcccagcaagcggagcuucaucgaggaccugcuguucaacaaagugacacuggccgacgccggcuucaucaagcaguauggcgauugucugggcgacauugccgccagggaucugauuugcgcccagaaguuuaacggacugacagugcugccuccucugcugaccgaugagaugaucgcccaguacacaucugcccugcuggccggcacaaucacaagcggcuggacauuuggagcaggcgccgcucugcagauccccuuugcuaugcagauggccuaccgguucaacggcaucggagugacccagaaugugcuguacgagaaccagaagcugaucgccaaccaguucaacagcgccaucggcaagauccaggacagccugagcagcacagcaagcgcccugggaaagcugcaggacguggucaaccagaaugcccaggcacugaacacccuggucaagcagcuguccuccaacuucggcgccaucagcucugugcugaacgauauccugagcagacuggacccuccugaggccgaggugcagaucgacagacugaucacaggcagacugcagagccuccagacauacgugacccagcagcugaucagagccgccgagauuagagccucugccaaucuggccgccaccaagaugucugagugugugcugggccagagcaagagaguggacuuuugcggcaagggcuaccaccugaugagcuucccucagucugccccucacggcgugguguuucugcacgugacauaugugcccgcucaagagaagaauuucaccaccgcuccagccaucugccacgacggcaaagcccacuuuccuagagaaggcguguucguguccaacggcacccauugguucgugacacagcggaacuucuacgagccccagaucaucaccaccgacaacaccuucgugucuggcaacugcgacgucgugaucggcauugugaacaauaccguguacgacccucugcagcccgagcuggacagcuucaaagaggaacuggacaaguacuuuaagaaccacacaagccccgacguggaccugggcgauaucagcggaaucaaugccagcgucgugaacauccagaaagagaucgaccggcugaacgagguggccaagaaucugaacgagagccugaucgaccugcaagaacuggggaaguacgagcaguacaucaaguggcccugguacaucuggcugggcuuuaucgccggacugauugccaucgugauggucacaaucaugcuguguugcaugaccagcugcuguagcugccugaagggcuguuguagcuguggcagcugcugcaaguucgacgaggacgauucugagcccgugcugaagggcgugaaacugcacuacacaugaggacuaguuauaagacugacuagcccgaugggccucccaacgggcccuccuccccuccuugcaccgagauuaauaaaaaaaaaaaaaaaaaaaaaaaaaaaaaaaaaaaaaaaaaaaaaaaaaaaaaaaaaaaaaaaaugcaucccccccccccccccccccccccccccccccaaaggcucuuuucagagccaccagaauu

SEQ ID NO: 23402 - RNA, 4039 nt, Artificial Sequence
  SARS-CoV-2/Wuhan/WIV05/2019__EPI_ISL_402128 spike protein mRNA gc mod (1-1273)(K986P_V987P_K986P_V987P_E484K_D614G)
aggagaaagcuuaccauguucguguuccuggugcugcugccucugguguccagccagugugugaaccugaccaccagaacacagcugccuccagccuacaccaacagcuuuaccagaggcguguacuaccccgacaagguguucagauccagcgugcugcacucuacccaggaccuguuccugccuuucuucagcaacgugaccugguuccacgccauccacguguccggcaccaauggcaccaagagauucgacaaccccgugcugcccuucaacgacgggguguacuuugccagcaccgagaaguccaacaucaucagaggcuggaucuucggcaccacacuggacagcaagacccagagccugcugaucgugaacaacgccaccaacguggucaucaaagugugcgaguuccaguucugcaacgaccccuuccugggcgucuacuaccacaagaacaacaagagcuggauggaaagcgaguuccggguguacagcagcgccaacaacugcaccuucgaguacgugucccagccuuuccugauggaccuggaaggcaagcagggcaacuucaagaaccugcgcgaguucguguuuaagaacaucgacggcuacuucaagaucuacagcaagcacaccccuaucaaccucgugcgggaucugccucagggcuucucugcucuggaaccccugguggaucugcccaucggcaucaacaucacccgguuucagacacugcuggcccugcacagaagcuaccugacaccuggcgauagcagcagcggauggacagcuggugccgccgcuuacuaugugggcuaccugcagccuagaaccuuccugcugaaguacaacgagaacggcaccaucaccgacgccguggauugugcucuggauccucugagcgagacaaagugcacccugaaguccuucaccguggaaaagggcaucuaccagaccagcaacuuccgggugcagcccaccgaauccaucgugcgguuccccaauaucaccaaucugugccccuucggcgagguguucaaugccaccagauucgccucuguguacgccuggaaccggaagcggaucagcaauugcguggccgacuacuccgugcuguacaacuccgccagcuucagcaccuucaagugcuacggcguguccccuaccaagcugaacgaccugugcuucacaaacguguacgccgacagcuucgugauccggggagaugaagugcggcagauugccccuggacagacaggcaagaucgccgacuacaacuacaagcugcccgacgacuucaccggcugugugauugccuggaacagcaacaaccuggacuccaaagucggcggcaacuacaauuaccuguaccggcuguuccggaaguccaaucugaagcccuucgagcgggacaucuccaccgagaucuaucaggccggcagcaccccuuguaacggcgugaagggcuucaacugcuacuucccacugcaguccuacggcuuucagcccacaaauggcgugggcuaucagcccuacagagugguggugcugagcuucgaacugcugcaugccccugccacagugugcggcccuaagaaaagcaccaaucucgugaagaacaaaugcgugaacuucaacuucaacggccugaccggcaccggcgugcugacagagagcaacaagaaguuccugccauuccagcaguuuggccgggauaucgccgauaccacagacgccguuagagauccccagacacuggaaauccuggacaucaccccuugcagcuucggcggagugucugugaucaccccuggcaccaacaccagcaaucagguggcagugcuguaccagggcgugaacuguaccgaagugcccguggccauucacgccgaucagcugacaccuacauggcggguguacuccaccggcagcaauguguuucagaccagagccggcugucugaucggagccgagcacgugaacaauagcuacgagugcgacauccccaucggcgcuggaaucugcgccagcuaccagacacagacaaacagcccucggagagccagaagcguggccagccagagcaucauugccuacacaaugucucugggcgccgagaacagcguggccuacuccaacaacucuaucgcuauccccaccaacuucaccaucagcgugaccacagagauccugccuguguccaugaccaagaccagcguggacugcaccauguacaucugcggcgauuccaccgagugcuccaaccugcugcugcaguacggcagcuucugcacccagcugaauagagcccugacagggaucgccguggaacaggacaagaacacccaagagguguucgcccaagugaagcagaucuacaagaccccuccuaucaaggacuucggcggcuucaauuucagccagauucugcccgauccuagcaagcccagcaagcggagcuucaucgaggaccugcuguucaacaaagugacacuggccgacgccggcuucaucaagcaguauggcgauugucugggcgacauugccgccagggaucugauuugcgcccagaaguuuaacggacugacagugcugccuccucugcugaccgaugagaugaucgcccaguacacaucugcccugcuggccggcacaaucacaagcggcuggacauuuggagcaggcgccgcucugcagauccccuuugcuaugcagauggccuaccgguucaacggcaucggagugacccagaaugugcuguacgagaaccagaagcugaucgccaaccaguucaacagcgccaucggcaagauccaggacagccugagcagcacagcaagcgcccugggaaagcugcaggacguggucaaccagaaugcccaggcacugaacacccuggucaagcagcuguccuccaacuucggcgccaucagcucugugcugaacgauauccugagcagacuggacccuccugaggccgaggugcagaucgacagacugaucacaggcagacugcagagccuccagacauacgugacccagcagcugaucagagccgccgagauuagagccucugccaaucuggccgccaccaagaugucugagugugugcugggccagagcaagagaguggacuuuugcggcaagggcuaccaccugaugagcuucccucagucugccccucacggcgugguguuucugcacgugacauaugugcccgcucaagagaagaauuucaccaccgcuccagccaucugccacgacggcaaagcccacuuuccuagagaaggcguguucguguccaacggcacccauugguucgugacacagcggaacuucuacgagccccagaucaucaccaccgacaacaccuucgugucuggcaacugcgacgucgugaucggcauugugaacaauaccguguacgacccucugcagcccgagcuggacagcuucaaagaggaacuggacaaguacuuuaagaaccacacaagccccgacguggaccugggcgauaucagcggaaucaaugccagcgucgugaacauccagaaagagaucgaccggcugaacgagguggccaagaaucugaacgagagccugaucgaccugcaagaacuggggaaguacgagcaguacaucaaguggcccugguacaucuggcugggcuuuaucgccggacugauugccaucgugauggucacaaucaugcuguguugcaugaccagcugcuguagcugccugaagggcuguuguagcuguggcagcugcugcaaguucgacgaggacgauucugagcccgugcugaagggcgugaaacugcacuacacaugaggacuaguuauaagacugacuagcccgaugggccucccaacgggcccuccuccccuccuugcaccgagauuaauaaaaaaaaaaaaaaaaaaaaaaaaaaaaaaaaaaaaaaaaaaaaaaaaaaaaaaaaaaaaaaaaugcaucccccccccccccccccccccccccccccccaaaggcucuuuucagagccaccagaauu

SEQ ID NO: 23403 - RNA, 4039 nt, Artificial Sequence
  SARS-CoV-2/Wuhan/WIV05/2019__EPI_ISL_402128 spike protein mRNA gc mod (1-1273)(K986P_V987P_K986P_V987P_L18F_T20N_P26S_D138Y_R190S_K417T _E484K_N501Y_D614G_H655Y_T1027I)
aggagaaagcuuaccauguucguguuccuggugcugcugccucugguguccagccagugugugaacuucaccaacagaacacagcugccuagcgccuacaccaacagcuuuaccagaggcguguacuaccccgacaagguguucagauccagcgugcugcacucuacccaggaccuguuccugccuuucuucagcaacgugaccugguuccacgccauccacguguccggcaccaauggcaccaagagauucgacaaccccgugcugcccuucaacgacgggguguacuuugccagcaccgagaaguccaacaucaucagaggcuggaucuucggcaccacacuggacagcaagacccagagccugcugaucgugaacaacgccaccaacguggucaucaaagugugcgaguuccaguucugcaacuaccccuuccugggcgucuacuaccacaagaacaacaagagcuggauggaaagcgaguuccggguguacagcagcgccaacaacugcaccuucgaguacgugucccagccuuuccugauggaccuggaaggcaagcagggcaacuucaagaaccugagcgaguucguguuuaagaacaucgacggcuacuucaagaucuacagcaagcacaccccuaucaaccucgugcgggaucugccucagggcuucucugcucuggaaccccugguggaucugcccaucggcaucaacaucacccgguuucagacacugcuggcccugcacagaagcuaccugacaccuggcgauagcagcagcggauggacagcuggugccgccgcuuacuaugugggcuaccugcagccuagaaccuuccugcugaaguacaacgagaacggcaccaucaccgacgccguggauugugcucuggauccucugagcgagacaaagugcacccugaaguccuucaccguggaaaagggcaucuaccagaccagcaacuuccgggugcagcccaccgaauccaucgugcgguuccccaauaucaccaaucugugccccuucggcgagguguucaaugccaccagauucgccucuguguacgccuggaaccggaagcggaucagcaauugcguggccgacuacuccgugcuguacaacuccgccagcuucagcaccuucaagugcuacggcguguccccuaccaagcugaacgaccugugcuucacaaacguguacgccgacagcuucgugauccggggagaugaagugcggcagauugccccuggacagacaggcaccaucgccgacuacaacuacaagcugcccgacgacuucaccggcugugugauugccuggaacagcaacaaccuggacuccaaagucggcggcaacuacaauuaccuguaccggcuguuccggaaguccaaucugaagcccuucgagcgggacaucuccaccgagaucuaucaggccggcagcaccccuuguaacggcgugaagggcuucaacugcuacuucccacugcaguccuacggcuuucagcccacauacggcgugggcuaucagcccuacagagugguggugcugagcuucgaacugcugcaugccccugccacagugugcggcccuaagaaaagcaccaaucucgugaagaacaaaugcgugaacuucaacuucaacggccugaccggcaccggcgugcugacagagagcaacaagaaguuccugccauuccagcaguuuggccgggauaucgccgauaccacagacgccguuagagauccccagacacuggaaauccuggacaucaccccuugcagcuucggcggagugucugugaucaccccuggcaccaacaccagcaaucagguggcagugcuguaccagggcgugaacuguaccgaagugcccguggccauucacgccgaucagcugacaccuacauggcggguguacuccaccggcagcaauguguuucagaccagagccggcugucugaucggagccgaguacgugaacaauagcuacgagugcgacauccccaucggcgcuggaaucugcgccagcuaccagacacagacaaacagcccucggagagccagaagcguggccagccagagcaucauugccuacacaaugucucugggcgccgagaacagcguggccuacuccaacaacucuaucgcuauccccaccaacuucaccaucagcgugaccacagagauccugccuguguccaugaccaagaccagcguggacugcaccauguacaucugcggcgauuccaccgagugcuccaaccugcugcugcaguacggcagcuucugcacccagcugaauagagcccugacagggaucgccguggaacaggacaagaacacccaagagguguucgcccaagugaagcagaucuacaagaccccuccuaucaaggacuucggcggcuucaauuucagccagauucugcccgauccuagcaagcccagcaagcggagcuucaucgaggaccugcuguucaacaaagugacacuggccgacgccggcuucaucaagcaguauggcgauugucugggcgacauugccgccagggaucugauuugcgcccagaaguuuaacggacugacagugcugccuccucugcugaccgaugagaugaucgcccaguacacaucugcccugcuggccggcacaaucacaagcggcuggacauuuggagcaggcgccgcucugcagauccccuuugcuaugcagauggccuaccgguucaacggcaucggagugacccagaaugugcuguacgagaaccagaagcugaucgccaaccaguucaacagcgccaucggcaagauccaggacagccugagcagcacagcaagcgcccugggaaagcugcaggacguggucaaccagaaugcccaggcacugaacacccuggucaagcagcuguccuccaacuucggcgccaucagcucugugcugaacgauauccugagcagacuggacccuccugaggccgaggugcagaucgacagacugaucacaggcagacugcagagccuccagacauacgugacccagcagcugaucagagccgccgagauuagagccucugccaaucuggccgccaucaagaugucugagugugugcugggccagagcaagagaguggacuuuugcggcaagggcuaccaccugaugagcuucccucagucugccccucacggcgugguguuucugcacgugacauaugugcccgcucaagagaagaauuucaccaccgcuccagccaucugccacgacggcaaagcccacuuuccuagagaaggcguguucguguccaacggcacccauugguucgugacacagcggaacuucuacgagccccagaucaucaccaccgacaacaccuucgugucuggcaacugcgacgucgugaucggcauugugaacaauaccguguacgacccucugcagcccgagcuggacagcuucaaagaggaacuggacaaguacuuuaagaaccacacaagccccgacguggaccugggcgauaucagcggaaucaaugccagcgucgugaacauccagaaagagaucgaccggcugaacgagguggccaagaaucugaacgagagccugaucgaccugcaagaacuggggaaguacgagcaguacaucaaguggcccugguacaucuggcugggcuuuaucgccggacugauugccaucgugauggucacaaucaugcuguguugcaugaccagcugcuguagcugccugaagggcuguuguagcuguggcagcugcugcaaguucgacgaggacgauucugagcccgugcugaagggcgugaaacugcacuacacaugaggacuaguuauaagacugacuagcccgaugggccucccaacgggcccuccuccccuccuugcaccgagauuaauaaaaaaaaaaaaaaaaaaaaaaaaaaaaaaaaaaaaaaaaaaaaaaaaaaaaaaaaaaaaaaaaugcaucccccccccccccccccccccccccccccccaaaggcucuuuucagagccaccagaauu

SEQ ID NO: 23404 - RNA, 4039 nt, Artificial Sequence
  SARS-CoV-2/Wuhan/WIV05/2019__EPI_ISL_402128 spike protein mRNA gc mod (1-1273)(K986P_V987P_K986P_V987P_S13I_W152C_L452R_D614G)
aggagaaagcuuaccauguucguguuccuggugcugcugccucugguguccauccagugugugaaccugaccaccagaacacagcugccuccagccuacaccaacagcuuuaccagaggcguguacuaccccgacaagguguucagauccagcgugcugcacucuacccaggaccuguuccugccuuucuucagcaacgugaccugguuccacgccauccacguguccggcaccaauggcaccaagagauucgacaaccccgugcugcccuucaacgacgggguguacuuugccagcaccgagaaguccaacaucaucagaggcuggaucuucggcaccacacuggacagcaagacccagagccugcugaucgugaacaacgccaccaacguggucaucaaagugugcgaguuccaguucugcaacgaccccuuccugggcgucuacuaccacaagaacaacaagagcugcauggaaagcgaguuccggguguacagcagcgccaacaacugcaccuucgaguacgugucccagccuuuccugauggaccuggaaggcaagcagggcaacuucaagaaccugcgcgaguucguguuuaagaacaucgacggcuacuucaagaucuacagcaagcacaccccuaucaaccucgugcgggaucugccucagggcuucucugcucuggaaccccugguggaucugcccaucggcaucaacaucacccgguuucagacacugcuggcccugcacagaagcuaccugacaccuggcgauagcagcagcggauggacagcuggugccgccgcuuacuaugugggcuaccugcagccuagaaccuuccugcugaaguacaacgagaacggcaccaucaccgacgccguggauugugcucuggauccucugagcgagacaaagugcacccugaaguccuucaccguggaaaagggcaucuaccagaccagcaacuuccgggugcagcccaccgaauccaucgugcgguuccccaauaucaccaaucugugccccuucggcgagguguucaaugccaccagauucgccucuguguacgccuggaaccggaagcggaucagcaauugcguggccgacuacuccgugcuguacaacuccgccagcuucagcaccuucaagugcuacggcguguccccuaccaagcugaacgaccugugcuucacaaacguguacgccgacagcuucgugauccggggagaugaagugcggcagauugccccuggacagacaggcaagaucgccgacuacaacuacaagcugcccgacgacuucaccggcugugugauugccuggaacagcaacaaccuggacuccaaagucggcggcaacuacaauuaccgcuaccggcuguuccggaaguccaaucugaagcccuucgagcgggacaucuccaccgagaucuaucaggccggcagcaccccuuguaacggcguggaaggcuucaacugcuacuucccacugcaguccuacggcuuucagcccacaaauggcgugggcuaucagcccuacagagugguggugcugagcuucgaacugcugcaugccccugccacagugugcggcccuaagaaaagcaccaaucucgugaagaacaaaugcgugaacuucaacuucaacggccugaccggcaccggcgugcugacagagagcaacaagaaguuccugccauuccagcaguuuggccgggauaucgccgauaccacagacgccguuagagauccccagacacuggaaauccuggacaucaccccuugcagcuucggcggagugucugugaucaccccuggcaccaacaccagcaaucagguggcagugcuguaccagggcgugaacuguaccgaagugcccguggccauucacgccgaucagcugacaccuacauggcggguguacuccaccggcagcaauguguuucagaccagagccggcugucugaucggagccgagcacgugaacaauagcuacgagugcgacauccccaucggcgcuggaaucugcgccagcuaccagacacagacaaacagcccucggagagccagaagcguggccagccagagcaucauugccuacacaaugucucugggcgccgagaacagcguggccuacuccaacaacucuaucgcuauccccaccaacuucaccaucagcgugaccacagagauccugccuguguccaugaccaagaccagcguggacugcaccauguacaucugcggcgauuccaccgagugcuccaaccugcugcugcaguacggcagcuucugcacccagcugaauagagcccugacagggaucgccguggaacaggacaagaacacccaagagguguucgcccaagugaagcagaucuacaagaccccuccuaucaaggacuucggcggcuucaauuucagccagauucugcccgauccuagcaagcccagcaagcggagcuucaucgaggaccugcuguucaacaaagugacacuggccgacgccggcuucaucaagcaguauggcgauugucugggcgacauugccgccagggaucugauuugcgcccagaaguuuaacggacugacagugcugccuccucugcugaccgaugagaugaucgcccaguacacaucugcccugcuggccggcacaaucacaagcggcuggacauuuggagcaggcgccgcucugcagauccccuuugcuaugcagauggccuaccgguucaacggcaucggagugacccagaaugugcuguacgagaaccagaagcugaucgccaaccaguucaacagcgccaucggcaagauccaggacagccugagcagcacagcaagcgcccugggaaagcugcaggacguggucaaccagaaugcccaggcacugaacacccuggucaagcagcuguccuccaacuucggcgccaucagcucugugcugaacgauauccugagcagacuggacccuccugaggccgaggugcagaucgacagacugaucacaggcagacugcagagccuccagacauacgugacccagcagcugaucagagccgccgagauuagagccucugccaaucuggccgccaccaagaugucugagugugugcugggccagagcaagagaguggacuuuugcggcaagggcuaccaccugaugagcuucccucagucugccccucacggcgugguguuucugcacgugacauaugugcccgcucaagagaagaauuucaccaccgcuccagccaucugccacgacggcaaagcccacuuuccuagagaaggcguguucguguccaacggcacccauugguucgugacacagcggaacuucuacgagccccagaucaucaccaccgacaacaccuucgugucuggcaacugcgacgucgugaucggcauugugaacaauaccguguacgacccucugcagcccgagcuggacagcuucaaagaggaacuggacaaguacuuuaagaaccacacaagccccgacguggaccugggcgauaucagcggaaucaaugccagcgucgugaacauccagaaagagaucgaccggcugaacgagguggccaagaaucugaacgagagccugaucgaccugcaagaacuggggaaguacgagcaguacaucaaguggcccugguacaucuggcugggcuuuaucgccggacugauugccaucgugauggucacaaucaugcuguguugcaugaccagcugcuguagcugccugaagggcuguuguagcuguggcagcugcugcaaguucgacgaggacgauucugagcccgugcugaagggcgugaaacugcacuacacaugaggacuaguuauaagacugacuagcccgaugggccucccaacgggcccuccuccccuccuugcaccgagauuaauaaaaaaaaaaaaaaaaaaaaaaaaaaaaaaaaaaaaaaaaaaaaaaaaaaaaaaaaaaaaaaaaugcaucccccccccccccccccccccccccccccccaaaggcucuuuucagagccaccagaauu

SEQ ID NO: 23405 - RNA, 1424 nt, Artificial Sequence; identical to SEQ ID NO: 22787
  SARS-CoV-2/Wuhan/WIV05/2019__EPI_ISL_402128 spike protein mRNA gc (1-15,334-528) Ferritin construct R10340

SEQ ID NO: 23406 - RNA, 1022 nt, Artificial Sequence; identical to SEQ ID NO: 22788
  SARS-CoV-2/Wuhan/WIV05/2019__EPI_ISL_402128 spike protein mRNA gc (334-528) Foldon construct R9927

SEQ ID NO: 23407 - RNA, 1400 nt, Artificial Sequence; identical to SEQ ID NO: 22789
  SARS-CoV-2/Wuhan/WIV05/2019__EPI_ISL_402128 spike protein mRNA gc (1-15,334-528) LumSynth construct R10338

SEQ ID NO: 23408 - RNA, 1361 nt, Artificial Sequence; identical to SEQ ID NO: 22790
  SARS-CoV-2/Wuhan/WIV05/2019__EPI_ISL_402128 spike protein mRNA gc (334-528) LumSynth construct R10339

SEQ ID NO: 23409 - RNA, 4094 nt, Artificial Sequence; identical to SEQ ID NO: 148
  SARS-CoV-2/Wuhan/WIV05/2019__EPI_ISL_402128 spike protein mRNA gc (1-1273) R9488, R9492, R10161

SEQ ID NO: 23410 - RNA, 4094 nt, Artificial Sequence; identical to SEQ ID NO: 22791
  SARS-CoV-2/Wuhan/WIV05/2019__EPI_ISL_402128 spike protein mRNA gc (1-1273)(D614G) R10182

SEQ ID NO: 23411 - RNA, 4094 nt, Artificial Sequence; identical to SEQ ID NO: 22793
  SARS-CoV-2/Wuhan/WIV05/2019__EPI_ISL_402128 spike protein mRNA gc (1-1273)(A222V_D614G) R10278

SEQ ID NO: 23412 - RNA, 4094 nt, Artificial Sequence; identical to SEQ ID NO: 22795
  SARS-CoV-2/Wuhan/WIV05/2019__EPI_ISL_402128 spike protein mRNA gc (1-1273)(N439K_D614G) R10298

SEQ ID NO: 23413 - RNA, 4094 nt, Artificial Sequence; identical to SEQ ID NO: 22797
  SARS-CoV-2/Wuhan/WIV05/2019__EPI_ISL_402128 spike protein mRNA gc (1-1273)(S477N_D614G) R10287

SEQ ID NO: 23414 - RNA, 4094 nt, Artificial Sequence; identical to SEQ ID NO: 22799
  SARS-CoV-2/Wuhan/WIV05/2019__EPI_ISL_402128 spike protein mRNA gc (1-1273)(N501Y_D614G)

SEQ ID NO: 23415 - RNA, 4088 nt, Artificial Sequence; identical to SEQ ID NO: 22801
  SARS-CoV-2/Wuhan/WIV05/2019__EPI_ISL_402128 spike protein mRNA gc (1-1273)(H69del_V70del_D614G) R10274

SEQ ID NO: 23416 - RNA, 4094 nt, Artificial Sequence; identical to SEQ ID NO: 22803
  SARS-CoV-2/Wuhan/WIV05/2019__EPI_ISL_402128 spike protein mRNA gc (1-1273)(Y453F_D614G) R10282

SEQ ID NO: 23417 - RNA, 4094 nt, Artificial Sequence; identical to SEQ ID NO: 22805
  SARS-CoV-2/Wuhan/WIV05/2019__EPI_ISL_402128 spike protein mRNA gc (1-1273)(D614G_I692V) R10290

SEQ ID NO: 23418 - RNA, 4094 nt, Artificial Sequence; identical to SEQ ID NO: 22807
  SARS-CoV-2/Wuhan/WIV05/2019__EPI_ISL_402128 spike protein mRNA gc (1-1273)(D614G_M1229I)

SEQ ID NO: 23419 - RNA, 4088 nt, Artificial Sequence; identical to SEQ ID NO: 22809
  SARS-CoV-2/Wuhan/WIV05/2019__EPI_ISL_402128 spike protein mRNA gc (1-1273)(H69del_V70del_A222V_Y453F_S477N_D614G_I692V) R10294

SEQ ID NO: 23420 - RNA, 4088 nt, Artificial Sequence; identical to SEQ ID NO: 22811
  SARS-CoV-2/Wuhan/WIV05/2019__EPI_ISL_402128 spike protein mRNA gc (1-1273)(H69del_V70del_Y453F_D614G_I692V_M1229I)

SEQ ID NO: 23421 - RNA, 4085 nt, Artificial Sequence
  SARS-CoV-2/Wuhan/WIV05/2019__EPI_ISL_402128 spike protein mRNA gc (1-1273)(H69del_V70del_Y144del_N501Y_A570D_D614G_P681H_T716I_S982 A_D1118H) R10356
aggagagucccgcagucggcguccagcggcucugcuuguucgugugugugucguugcaggccuuauucaagcuuaccauguucguguuccugguccuccugccccuggugagcucccagugcgugaaccucaccacccgcacgcagcugccgcccgccuacaccaacagcuucacccggggcgucuacuaccccgacaagguguuccgcuccagcgugcugcacuccacccaggaccucuuccugcccuucuucagcaacgucacgugguuccacgccaucuccgggaccaacggcaccaagcgguucgacaacccggugcugcccuucaacgacggggucuacuucgcgagcaccgagaaguccaacaucauccgcggcuggaucuucgggacgacccucgacagcaagacccagucccugcugaucgugaacaacgccaccaacguggucaucaaggugugcgaguuccaguucugcaacgaccccuuccucggcguguaccacaagaacaacaagagcuggauggaguccgaguuccgggucuacagcuccgccaacaacugcacguucgaguacgugagccagcccuuccugauggaccuggagggcaagcaggggaacuucaagaaccuccgcgaguucguguucaagaacaucgacggcuacuucaagaucuacuccaagcacaccccgaucaaccugguccgggaccugccccagggguucagcgcccucgagccccugguggaccugcccaucggcaucaacaucacccgcuuccagacccuccuggcccugcaccgguccuaccucacgccgggggacagcagcuccggcuggaccgcgggcgccgccgccuacuacgugggguaccugcagccccgcaccuuccugcucaaguacaacgagaacggcaccaucacggacgcggucgacugcgcccuggacccccugagcgagaccaagugcacccucaaguccuucaccguggagaaggggaucuaccagacgagcaacuuccgggugcagcccaccgaguccaucguccgcuucccgaacaucaccaaccugugccccuucggcgagguguucaacgccacccgguucgccagcgucuacgccuggaaccgcaagcggaucuccaacugcguggcggacuacagcgugcuguacaacuccgccagcuucuccacguucaagugcuacggcgucagccccaccaagcucaacgaccugugcuucaccaacguguacgccgacuccuucgugauccgcggggacgagguccggcagaucgcccccggccagaccgggaagaucgccgacuacaacuacaagcugccggacgacuucacgggcugcgugaucgcguggaacagcaacaaccucgacuccaaggucgggggcaacuacaacuaccuguaccgccuguuccgcaagagcaaccucaagcccuucgagcgggacaucuccaccgagaucuaccaggccggcagcacccccugcaacgggguggagggcuucaacugcuacuucccccugcaguccuacggguuccagccgaccuacggcgugggguaccagcccuaccggguggucgugcugagcuucgagcuccugcacgcccccgccacggugugcggccccaagaaguccaccaaccuggucaagaacaagugcgugaacuucaacuucaacggccucaccgggaccggcgugcugaccgagagcaacaagaaguuccugccguuccagcaguucgggcgcgacaucgacgacacgaccgacgcgguccgcgacccccagacccuggagauccucgacaucacccccugcagcuucggcgggguguccgugaucacgccgggcaccaacaccagcaaccaggucgccgugcuguaccagggcgugaacugcaccgagguccccguggccauccacgccgaccagcugacgcccaccuggcggguguacuccaccggcagcaacgucuuccagacccgcgccgggugccucaucggcgcggagcacgugaacaacuccuacgagugcgacauccccaucggggccggcaucugcgccagcuaccagacgcagaccaacucccaccggcgcgcccggagcguggcgucccagagcaucaucgccuacaccaugucccugggcgccgagaacagcgucgccuacuccaacaacagcaucgccauccccaucaacuucacgaucuccgugaccaccgagauccugcccgugagcaugaccaagacgagcgucgacugcaccauguacaucugcggggacuccaccgagugcagcaaccuccugcugcaguacggcuccuucugcacccagcucaaccgcgcgcugacggggaucgccguggagcaggacaagaacacccaggagguguucgcccaggucaagcagaucuacaagacgcccccgaucaaggacuucggcggguucaacuucagccagauccugcccgaccccuccaagcccagcaagcgguccuucaucgaggaccuccuguucaacaaggugacccuggccgacgccggcuucaucaagcaguacggcgacugccucggggacaucgcggcccgcgaccugaucugcgcccagaaguucaacggccugaccgugcucccgccccugcugaccgacgagaugaucgcccaguacaccagcgcccuccuggcggggaccaucacguccggcuggaccuucggggccggcgccgcccugcagauccccuucgcgaugcagauggccuaccgguucaacggcaucggggucacccagaacgugcucuacgagaaccagaagcugaucgccaaccaguucaacagcgccaucggcaagauccaggacucccugagcuccaccgccagcgcgcucgggaagcugcaggacguggucaaccagaacgcccaggcccugaacacgcucgugaagcagcuguccagcaacuucggcgccaucuccagcgugcugaacgacauccucgcccgccuggacaaggucgaggccgaggugcagaucgaccggcugaucaccgggcgccuccagagccugcagaccuacgugacccagcagcugauccgggcggccgagauccgcgccagcgccaaccucgccgcgaccaagauguccgagugcguccugggccagagcaagcggguggacuucugcggcaagggguaccaccugauguccuucccccagagcgccccgcacggcguggucuuccuccacgugacguacguccccgcccaggagaagaacuucaccaccgcccccgcgaucugccacgacgggaaggcccacuucccccgcgagggcguguucguguccaacgggacccacugguucgucacgcagcggaacuucuacgagccgcagaucaucaccacccacaacaccuucgugagcggcaacugcgacguggucaucggcaucgugaacaacacgguguacgacccccugcagcccgagcuggacuccuucaaggaggagcucgacaaguacuucaagaaccacaccagccccgacgucgaccugggggacaucuccggcaucaacgccagcguggugaacauccagaaggagaucgaccgccugaacgaggucgccaagaaccucaacgagucccugaucgaccugcaggagcucgggaaguacgagcaguacaucaaguggccgugguacaucuggcugggcuucaucgccggccugaucgcgaucgugauggugaccaucaugcucugcugcaugaccagcugcugcuccugccugaaggggugcugcagcugcggcuccugcugcaaguucgacgaggacgacagcgagcccguccugaagggggugaagcuccacuacacgugaggacuagucccuguucccagagcccacuuuuuuuucuuuuuuugaaauaaaauagccugucuuucagaucucaaaggcucuuuucagagccaccaaaaaaaaaaaaaaaaaaaaaaaaaaaaaaaaaaaaaaaaaaaaaaaaaaaaaaaaaaaaaaaaaaaaaaaaaaaaaaaaaaaaaaaaaaaaaaaaaaaaa

SEQ ID NO: 23422 - RNA, 4094 nt, Artificial Sequence
  SARS-CoV-2/Wuhan/WIV05/2019__EPI_ISL_402128 spike protein mRNA gc (1-1273)(K417N_E484K_N501Y_D614G) R10359
aggagagucccgcagucggcguccagcggcucugcuuguucgugugugugucguugcaggccuuauucaagcuuaccauguucguguuccugguccuccugccccuggugagcucccagugcgugaaccucaccacccgcacgcagcugccgcccgccuacaccaacagcuucacccggggcgucuacuaccccgacaagguguuccgcuccagcgugcugcacuccacccaggaccucuuccugcccuucuucagcaacgucacgugguuccacgccauccacguguccgggaccaacggcaccaagcgguucgacaacccggugcugcccuucaacgacggggucuacuucgcgagcaccgagaaguccaacaucauccgcggcuggaucuucgggacgacccucgacagcaagacccagucccugcugaucgugaacaacgccaccaacguggucaucaaggugugcgaguuccaguucugcaacgaccccuuccucggcguguacuaccacaagaacaacaagagcuggauggaguccgaguuccgggucuacagcuccgccaacaacugcacguucgaguacgugagccagcccuuccugauggaccuggagggcaagcaggggaacuucaagaaccuccgcgaguucguguucaagaacaucgacggcuacuucaagaucuacuccaagcacaccccgaucaaccugguccgggaccugccccagggguucagcgcccucgagccccugguggaccugcccaucggcaucaacaucacccgcuuccagacccuccuggcccugcaccgguccuaccucacgccgggggacagcagcuccggcuggaccgcgggcgccgccgccuacuacgugggguaccugcagccccgcaccuuccugcucaaguacaacgagaacggcaccaucacggacgcggucgacugcgcccuggacccccugagcgagaccaagugcacccucaaguccuucaccguggagaaggggaucuaccagacgagcaacuuccgggugcagcccaccgaguccaucguccgcuucccgaacaucaccaaccugugccccuucggcgagguguucaacgccacccgguucgccagcgucuacgccuggaaccgcaagcggaucuccaacugcguggcggacuacagcgugcuguacaacuccgccagcuucuccacguucaagugcuacggcgucagccccaccaagcucaacgaccugugcuucaccaacguguacgccgacuccuucgugauccgcggggacgagguccggcagaucgcccccggccagaccgggaacaucgccgacuacaacuacaagcugccggacgacuucacgggcugcgugaucgcguggaacagcaacaaccucgacuccaaggucgggggcaacuacaacuaccuguaccgccuguuccgcaagagcaaccucaagcccuucgagcgggacaucuccaccgagaucuaccaggccggcagcacccccugcaacggggugaagggcuucaacugcuacuucccccugcaguccuacggguuccagccgaccuacggcgugggguaccagcccuaccggguggucgugcugagcuucgagcuccugcacgcccccgccacggugugcggccccaagaaguccaccaaccuggucaagaacaagugcgugaacuucaacuucaacggccucaccgggaccggcgugcugaccgagagcaacaagaaguuccugccguuccagcaguucgggcgcgacaucgccgacacgaccgacgcgguccgcgacccccagacccuggagauccucgacaucacccccugcagcuucggcgggguguccgugaucacgccgggcaccaacaccagcaaccaggucgccgugcuguaccagggcgugaacugcaccgagguccccguggccauccacgccgaccagcugacgcccaccuggcggguguacuccaccggcagcaacgucuuccagacccgcgccgggugccucaucggcgcggagcacgugaacaacuccuacgagugcgacauccccaucggggccggcaucugcgccagcuaccagacgcagaccaacuccccgcggcgcgcccggagcguggcgucccagagcaucaucgccuacaccaugucccugggcgccgagaacagcgucgccuacuccaacaacagcaucgccauccccaccaacuucacgaucuccgugaccaccgagauccugcccgugagcaugaccaagacgagcgucgacugcaccauguacaucugcggggacuccaccgagugcagcaaccuccugcugcaguacggcuccuucugcacccagcucaaccgcgcgcugacggggaucgccguggagcaggacaagaacacccaggagguguucgcccaggucaagcagaucuacaagacgcccccgaucaaggacuucggcggguucaacuucagccagauccugcccgaccccuccaagcccagcaagcgguccuucaucgaggaccuccuguucaacaaggugacccuggccgacgccggcuucaucaagcaguacggcgacugccucggggacaucgcggcccgcgaccugaucugcgcccagaaguucaacggccugaccgugcucccgccccugcugaccgacgagaugaucgcccaguacaccagcgcccuccuggcggggaccaucacguccggcuggaccuucggggccggcgccgcccugcagauccccuucgcgaugcagauggccuaccgguucaacggcaucggggucacccagaacgugcucuacgagaaccagaagcugaucgccaaccaguucaacagcgccaucggcaagauccaggacucccugagcuccaccgccagcgcgcucgggaagcugcaggacguggucaaccagaacgcccaggcccugaacacgcucgugaagcagcuguccagcaacuucggcgccaucuccagcgugcugaacgacauccucucccgccuggacaaggucgaggccgaggugcagaucgaccggcugaucaccgggcgccuccagagccugcagaccuacgugacccagcagcugauccgggcggccgagauccgcgccagcgccaaccucgccgcgaccaagauguccgagugcguccugggccagagcaagcggguggacuucugcggcaagggguaccaccugauguccuucccccagagcgccccgcacggcguggucuuccuccacgugacguacguccccgcccaggagaagaacuucaccaccgcccccgcgaucugccacgacgggaaggcccacuucccccgcgagggcguguucguguccaacgggacccacugguucgucacgcagcggaacuucuacgagccgcagaucaucaccaccgacaacaccuucgugagcggcaacugcgacguggucaucggcaucgugaacaacacgguguacgacccccugcagcccgagcuggacuccuucaaggaggagcucgacaaguacuucaagaaccacaccagccccgacgucgaccugggggacaucuccggcaucaacgccagcguggugaacauccagaaggagaucgaccgccugaacgaggucgccaagaaccucaacgagucccugaucgaccugcaggagcucgggaaguacgagcaguacaucaaguggccgugguacaucuggcugggcuucaucgccggccugaucgcgaucgugauggugaccaucaugcucugcugcaugaccagcugcugcuccugccugaaggggugcugcagcugcggcuccugcugcaaguucgacgaggacgacagcgagcccguccugaagggggugaagcuccacuacacgugaggacuagucccuguucccagagcccacuuuuuuuucuuuuuuugaaauaaaauagccugucuuucagaucucaaaggcucuuuucagagccaccaaaaaaaaaaaaaaaaaaaaaaaaaaaaaaaaaaaaaaaaaaaaaaaaaaaaaaaaaaaaaaaaaaaaaaaaaaaaaaaaaaaaaaaaaaaaaaaaaaaaa

SEQ ID NO: 23423 - RNA, 4085 nt, Artificial Sequence
  SARS-CoV-2/Wuhan/WIV05/2019__EPI_ISL_402128 spike protein mRNA gc (1-1273)(L18F_D80A_D215G_L242del_A243del_L244del_R246I_K417N_E484 K_N501Y_D614G_A701V)
aggagagucccgcagucggcguccagcggcucugcuuguucgugugugugucguugcaggccuuauucaagcuuaccauguucguguuccugguccuccugccccuggugagcucccagugcgugaacuucaccacccgcacgcagcugccgcccgccuacaccaacagcuucacccggggcgucuacuaccccgacaagguguuccgcuccagcgugcugcacuccacccaggaccucuuccugcccuucuucagcaacgucacgugguuccacgccauccacguguccgggaccaacggcaccaagcgguucgccaacccggugcugcccuucaacgacggggucuacuucgcgagcaccgagaaguccaacaucauccgcggcuggaucuucgggacgacccucgacagcaagacccagucccugcugaucgugaacaacgccaccaacguggucaucaaggugugcgaguuccaguucugcaacgaccccuuccucggcguguacuaccacaagaacaacaagagcuggauggaguccgaguuccgggucuacagcuccgccaacaacugcacguucgaguacgugagccagcccuuccugauggaccuggagggcaagcaggggaacuucaagaaccuccgcgaguucguguucaagaacaucgacggcuacuucaagaucuacuccaagcacaccccgaucaaccugguccggggccugccccagggguucagcgcccucgagccccugguggaccugcccaucggcaucaacaucacccgcuuccagacccuccacaucuccuaccucacgccgggggacagcagcuccggcuggaccgcgggcgccgccgccuacuacgugggguaccugcagccccgcaccuuccugcucaaguacaacgagaacggcaccaucacggacgcggucgacugcgcccuggacccccugagcgagaccaagugcacccucaaguccuucaccguggagaaggggaucuaccagacgagcaacuuccgggugcagcccaccgaguccaucguccgcuucccgaacaucaccaaccugugccccuucggcgagguguucaacgccacccgguucgccagcgucuacgccuggaaccgcaagcggaucuccaacugcguggcggacuacagcgugcuguacaacuccgccagcuucuccacguucaagugcuacggcgucagccccaccaagcucaacgaccugugcuucaccaacguguacgccgacuccuucgugauccgcggggacgagguccggcagaucgcccccggccagaccgggaacaucgccgacuacaacuacaagcugccggacgacuucacgggcugcgugaucgcguggaacagcaacaaccucgacuccaaggucgggggcaacuacaacuaccuguaccgccuguuccgcaagagcaaccucaagcccuucgagcgggacaucuccaccgagaucuaccaggccggcagcacccccugcaacggggugaagggcuucaacugcuacuucccccugcaguccuacggguuccagccgaccuacggcgugggguaccagcccuaccggguggucgugcugagcuucgagcuccugcacgcccccgccacggugugcggccccaagaaguccaccaaccuggucaagaacaagugcgugaacuucaacuucaacggccucaccgggaccggcgugcugaccgagagcaacaagaaguuccugccguuccagcaguucgggcgcgacaucgccgacacgaccgacgcgguccgcgacccccagacccuggagauccucgacaucacccccugcagcuucggcgggguguccgugaucacgccgggcaccaacaccagcaaccaggucgccgugcuguaccagggcgugaacugcaccgagguccccguggccauccacgccgaccagcugacgcccaccuggcggguguacuccaccggcagcaacgucuuccagacccgcgccgggugccucaucggcgcggagcacgugaacaacuccuacgagugcgacauccccaucggggccggcaucugcgccagcuaccagacgcagaccaacuccccgcggcgcgcccggagcguggcgucccagagcaucaucgccuacaccaugucccugggcguggagaacagcgucgccuacuccaacaacagcaucgccauccccaccaacuucacgaucuccgugaccaccgagauccugcccgugagcaugaccaagacgagcgucgacugcaccauguacaucugcggggacuccaccgagugcagcaaccuccugcugcaguacggcuccuucugcacccagcucaaccgcgcgcugacggggaucgccguggagcaggacaagaacacccaggagguguucgcccaggucaagcagaucuacaagacgcccccgaucaaggacuucggcggguucaacuucagccagauccugcccgaccccuccaagcccagcaagcgguccuucaucgaggaccuccuguucaacaaggugacccuggccgacgccggcuucaucaagcaguacggcgacugccucggggacaucgcggcccgcgaccugaucugcgcccagaaguucaacggccugaccgugcucccgccccugcugaccgacgagaugaucgcccaguacaccagcgcccuccuggcggggaccaucacguccggcuggaccuucggggccggcgccgcccugcagauccccuucgcgaugcagauggccuaccgguucaacggcaucggggucacccagaacgugcucuacgagaaccagaagcugaucgccaaccaguucaacagcgccaucggcaagauccaggacucccugagcuccaccgccagcgcgcucgggaagcugcaggacguggucaaccagaacgcccaggcccugaacacgcucgugaagcagcuguccagcaacuucggcgccaucuccagcgugcugaacgacauccucucccgccuggacaaggucgaggccgaggugcagaucgaccggcugaucaccgggcgccuccagagccugcagaccuacgugacccagcagcugauccgggcggccgagauccgcgccagcgccaaccucgccgcgaccaagauguccgagugcguccugggccagagcaagcggguggacuucugcggcaagggguaccaccugauguccuucccccagagcgccccgcacggcguggucuuccuccacgugacguacguccccgcccaggagaagaacuucaccaccgcccccgcgaucugccacgacgggaaggcccacuucccccgcgagggcguguucguguccaacgggacccacugguucgucacgcagcggaacuucuacgagccgcagaucaucaccaccgacaacaccuucgugagcggcaacugcgacguggucaucggcaucgugaacaacacgguguacgacccccugcagcccgagcuggacuccuucaaggaggagcucgacaaguacuucaagaaccacaccagccccgacgucgaccugggggacaucuccggcaucaacgccagcguggugaacauccagaaggagaucgaccgccugaacgaggucgccaagaaccucaacgagucccugaucgaccugcaggagcucgggaaguacgagcaguacaucaaguggccgugguacaucuggcugggcuucaucgccggccugaucgcgaucgugauggugaccaucaugcucugcugcaugaccagcugcugcuccugccugaaggggugcugcagcugcggcuccugcugcaaguucgacgaggacgacagcgagcccguccugaagggggugaagcuccacuacacgugaggacuagucccuguucccagagcccacuuuuuuuucuuuuuuugaaauaaaauagccugucuuucagaucucaaaggcucuuuucagagccaccaaaaaaaaaaaaaaaaaaaaaaaaaaaaaaaaaaaaaaaaaaaaaaaaaaaaaaaaaaaaaaaaaaaaaaaaaaaaaaaaaaaaaaaaaaaaaaaaaaaaa

SEQ ID NO: 23424 - RNA, 4094 nt, Artificial Sequence
  SARS-CoV-2/Wuhan/WIV05/2019__EPI_ISL_402128 spike protein mRNA gc (1-1273)(E484K_D614G)
aggagagucccgcagucggcguccagcggcucugcuuguucgugugugugucguugcaggccuuauucaagcuuaccauguucguguuccugguccuccugccccuggugagcucccagugcgugaaccucaccacccgcacgcagcugccgcccgccuacaccaacagcuucacccggggcgucuacuaccccgacaagguguuccgcuccagcgugcugcacuccacccaggaccucuuccugcccuucuucagcaacgucacgugguuccacgccauccacguguccgggaccaacggcaccaagcgguucgacaacccggugcugcccuucaacgacggggucuacuucgcgagcaccgagaaguccaacaucauccgcggcuggaucuucgggacgacccucgacagcaagacccagucccugcugaucgugaacaacgccaccaacguggucaucaaggugugcgaguuccaguucugcaacgaccccuuccucggcguguacuaccacaagaacaacaagagcuggauggaguccgaguuccgggucuacagcuccgccaacaacugcacguucgaguacgugagccagcccuuccugauggaccuggagggcaagcaggggaacuucaagaaccuccgcgaguucguguucaagaacaucgacggcuacuucaagaucuacuccaagcacaccccgaucaaccugguccgggaccugccccagggguucagcgcccucgagccccugguggaccugcccaucggcaucaacaucacccgcuuccagacccuccuggcccugcaccgguccuaccucacgccgggggacagcagcuccggcuggaccgcgggcgccgccgccuacuacgugggguaccugcagccccgcaccuuccugcucaaguacaacgagaacggcaccaucacggacgcggucgacugcgcccuggacccccugagcgagaccaagugcacccucaaguccuucaccguggagaaggggaucuaccagacgagcaacuuccgggugcagcccaccgaguccaucguccgcuucccgaacaucaccaaccugugccccuucggcgagguguucaacgccacccgguucgccagcgucuacgccuggaaccgcaagcggaucuccaacugcguggcggacuacagcgugcuguacaacuccgccagcuucuccacguucaagugcuacggcgucagccccaccaagcucaacgaccugugcuucaccaacguguacgccgacuccuucgugauccgcggggacgagguccggcagaucgcccccggccagaccgggaagaucgccgacuacaacuacaagcugccggacgacuucacgggcugcgugaucgcguggaacagcaacaaccucgacuccaaggucgggggcaacuacaacuaccuguaccgccuguuccgcaagagcaaccucaagcccuucgagcgggacaucuccaccgagaucuaccaggccggcagcacccccugcaacggggugaagggcuucaacugcuacuucccccugcaguccuacggguuccagccgaccaacggcgugggguaccagcccuaccggguggucgugcugagcuucgagcuccugcacgcccccgccacggugugcggccccaagaaguccaccaaccuggucaagaacaagugcgugaacuucaacuucaacggccucaccgggaccggcgugcugaccgagagcaacaagaaguuccugccguuccagcaguucgggcgcgacaucgccgacacgaccgacgcgguccgcgacccccagacccuggagauccucgacaucacccccugcagcuucggcgggguguccgugaucacgccgggcaccaacaccagcaaccaggucgccgugcuguaccagggcgugaacugcaccgagguccccguggccauccacgccgaccagcugacgcccaccuggcggguguacuccaccggcagcaacgucuuccagacccgcgccgggugccucaucggcgcggagcacgugaacaacuccuacgagugcgacauccccaucggggccggcaucugcgccagcuaccagacgcagaccaacuccccgcggcgcgcccggagcguggcgucccagagcaucaucgccuacaccaugucccugggcgccgagaacagcgucgccuacuccaacaacagcaucgccauccccaccaacuucacgaucuccgugaccaccgagauccugcccgugagcaugaccaagacgagcgucgacugcaccauguacaucugcggggacuccaccgagugcagcaaccuccugcugcaguacggcuccuucugcacccagcucaaccgcgcgcugacggggaucgccguggagcaggacaagaacacccaggagguguucgcccaggucaagcagaucuacaagacgcccccgaucaaggacuucggcggguucaacuucagccagauccugcccgaccccuccaagcccagcaagcgguccuucaucgaggaccuccuguucaacaaggugacccuggccgacgccggcuucaucaagcaguacggcgacugccucggggacaucgcggcccgcgaccugaucugcgcccagaaguucaacggccugaccgugcucccgccccugcugaccgacgagaugaucgcccaguacaccagcgcccuccuggcggggaccaucacguccggcuggaccuucggggccggcgccgcccugcagauccccuucgcgaugcagauggccuaccgguucaacggcaucggggucacccagaacgugcucuacgagaaccagaagcugaucgccaaccaguucaacagcgccaucggcaagauccaggacucccugagcuccaccgccagcgcgcucgggaagcugcaggacguggucaaccagaacgcccaggcccugaacacgcucgugaagcagcuguccagcaacuucggcgccaucuccagcgugcugaacgacauccucucccgccuggacaaggucgaggccgaggugcagaucgaccggcugaucaccgggcgccuccagagccugcagaccuacgugacccagcagcugauccgggcggccgagauccgcgccagcgccaaccucgccgcgaccaagauguccgagugcguccugggccagagcaagcggguggacuucugcggcaagggguaccaccugauguccuucccccagagcgccccgcacggcguggucuuccuccacgugacguacguccccgcccaggagaagaacuucaccaccgcccccgcgaucugccacgacgggaaggcccacuucccccgcgagggcguguucguguccaacgggacccacugguucgucacgcagcggaacuucuacgagccgcagaucaucaccaccgacaacaccuucgugagcggcaacugcgacguggucaucggcaucgugaacaacacgguguacgacccccugcagcccgagcuggacuccuucaaggaggagcucgacaaguacuucaagaaccacaccagccccgacgucgaccugggggacaucuccggcaucaacgccagcguggugaacauccagaaggagaucgaccgccugaacgaggucgccaagaaccucaacgagucccugaucgaccugcaggagcucgggaaguacgagcaguacaucaaguggccgugguacaucuggcugggcuucaucgccggccugaucgcgaucgugauggugaccaucaugcucugcugcaugaccagcugcugcuccugccugaaggggugcugcagcugcggcuccugcugcaaguucgacgaggacgacagcgagcccguccugaagggggugaagcuccacuacacgugaggacuagucccuguucccagagcccacuuuuuuuucuuuuuuugaaauaaaauagccugucuuucagaucucaaaggcucuuuucagagccaccaaaaaaaaaaaaaaaaaaaaaaaaaaaaaaaaaaaaaaaaaaaaaaaaaaaaaaaaaaaaaaaaaaaaaaaaaaaaaaaaaaaaaaaaaaaaaaaaaaaaa

SEQ ID NO: 23425 - RNA, 4094 nt, Artificial Sequence
  SARS-CoV-2/Wuhan/WIV05/2019__EPI_ISL_402128 spike protein mRNA gc (1-1273)(L18F_T20N_P26S_D138Y_R190S_K417T_E484K_N501Y_D614G_H655Y _T1027I)
aggagagucccgcagucggcguccagcggcucugcuuguucgugugugugucguugcaggccuuauucaagcuuaccauguucguguuccugguccuccugccccuggugagcucccagugcgugaacuucaccaaccgcacgcagcugccgagcgccuacaccaacagcuucacccggggcgucuacuaccccgacaagguguuccgcuccagcgugcugcacuccacccaggaccucuuccugcccuucuucagcaacgucacgugguuccacgccauccacguguccgggaccaacggcaccaagcgguucgacaacccggugcugcccuucaacgacggggucuacuucgcgagcaccgagaaguccaacaucauccgcggcuggaucuucgggacgacccucgacagcaagacccagucccugcugaucgugaacaacgccaccaacguggucaucaaggugugcgaguuccaguucugcaacuaccccuuccucggcguguacuaccacaagaacaacaagagcuggauggaguccgaguuccgggucuacagcuccgccaacaacugcacguucgaguacgugagccagcccuuccugauggaccuggagggcaagcaggggaacuucaagaaccucagcgaguucguguucaagaacaucgacggcuacuucaagaucuacuccaagcacaccccgaucaaccugguccgggaccugccccagggguucagcgcccucgagccccugguggaccugcccaucggcaucaacaucacccgcuuccagacccuccuggcccugcaccgguccuaccucacgccgggggacagcagcuccggcuggaccgcgggcgccgccgccuacuacgugggguaccugcagccccgcaccuuccugcucaaguacaacgagaacggcaccaucacggacgcggucgacugcgcccuggacccccugagcgagaccaagugcacccucaaguccuucaccguggagaaggggaucuaccagacgagcaacuuccgggugcagcccaccgaguccaucguccgcuucccgaacaucaccaaccugugccccuucggcgagguguucaacgccacccgguucgccagcgucuacgccuggaaccgcaagcggaucuccaacugcguggcggacuacagcgugcuguacaacuccgccagcuucuccacguucaagugcuacggcgucagccccaccaagcucaacgaccugugcuucaccaacguguacgccgacuccuucgugauccgcggggacgagguccggcagaucgcccccggccagaccgggaccaucgccgacuacaacuacaagcugccggacgacuucacgggcugcgugaucgcguggaacagcaacaaccucgacuccaaggucgggggcaacuacaacuaccuguaccgccuguuccgcaagagcaaccucaagcccuucgagcgggacaucuccaccgagaucuaccaggccggcagcacccccugcaacggggugaagggcuucaacugcuacuucccccugcaguccuacggguuccagccgaccuacggcgugggguaccagcccuaccggguggucgugcugagcuucgagcuccugcacgcccccgccacggugugcggccccaagaaguccaccaaccuggucaagaacaagugcgugaacuucaacuucaacggccucaccgggaccggcgugcugaccgagagcaacaagaaguuccugccguuccagcaguucgggcgcgacaucgccgacacgaccgacgcgguccgcgacccccagacccuggagauccucgacaucacccccugcagcuucggcgggguguccgugaucacgccgggcaccaacaccagcaaccaggucgccgugcuguaccagggcgugaacugcaccgagguccccguggccauccacgccgaccagcugacgcccaccuggcggguguacuccaccggcagcaacgucuuccagacccgcgccgggugccucaucggcgcggaguacgugaacaacuccuacgagugcgacauccccaucggggccggcaucugcgccagcuaccagacgcagaccaacuccccgcggcgcgcccggagcguggcgucccagagcaucaucgccuacaccaugucccugggcgccgagaacagcgucgccuacuccaacaacagcaucgccauccccaccaacuucacgaucuccgugaccaccgagauccugcccgugagcaugaccaagacgagcgucgacugcaccauguacaucugcggggacuccaccgagugcagcaaccuccugcugcaguacggcuccuucugcacccagcucaaccgcgcgcugacggggaucgccguggagcaggacaagaacacccaggagguguucgcccaggucaagcagaucuacaagacgcccccgaucaaggacuucggcggguucaacuucagccagauccugcccgaccccuccaagcccagcaagcgguccuucaucgaggaccuccuguucaacaaggugacccuggccgacgccggcuucaucaagcaguacggcgacugccucggggacaucgcggcccgcgaccugaucugcgcccagaaguucaacggccugaccgugcucccgccccugcugaccgacgagaugaucgcccaguacaccagcgcccuccuggcggggaccaucacguccggcuggaccuucggggccggcgccgcccugcagauccccuucgcgaugcagauggccuaccgguucaacggcaucggggucacccagaacgugcucuacgagaaccagaagcugaucgccaaccaguucaacagcgccaucggcaagauccaggacucccugagcuccaccgccagcgcgcucgggaagcugcaggacguggucaaccagaacgcccaggcccugaacacgcucgugaagcagcuguccagcaacuucggcgccaucuccagcgugcugaacgacauccucucccgccuggacaaggucgaggccgaggugcagaucgaccggcugaucaccgggcgccuccagagccugcagaccuacgugacccagcagcugauccgggcggccgagauccgcgccagcgccaaccucgccgcgaucaagauguccgagugcguccugggccagagcaagcggguggacuucugcggcaagggguaccaccugauguccuucccccagagcgccccgcacggcguggucuuccuccacgugacguacguccccgcccaggagaagaacuucaccaccgcccccgcgaucugccacgacgggaaggcccacuucccccgcgagggcguguucguguccaacgggacccacugguucgucacgcagcggaacuucuacgagccgcagaucaucaccaccgacaacaccuucgugagcggcaacugcgacguggucaucggcaucgugaacaacacgguguacgacccccugcagcccgagcuggacuccuucaaggaggagcucgacaaguacuucaagaaccacaccagccccgacgucgaccugggggacaucuccggcaucaacgccagcguggugaacauccagaaggagaucgaccgccugaacgaggucgccaagaaccucaacgagucccugaucgaccugcaggagcucgggaaguacgagcaguacaucaaguggccgugguacaucuggcugggcuucaucgccggccugaucgcgaucgugauggugaccaucaugcucugcugcaugaccagcugcugcuccugccugaaggggugcugcagcugcggcuccugcugcaaguucgacgaggacgacagcgagcccguccugaagggggugaagcuccacuacacgugaggacuagucccuguucccagagcccacuuuuuuuucuuuuuuugaaauaaaauagccugucuuucagaucucaaaggcucuuuucagagccaccaaaaaaaaaaaaaaaaaaaaaaaaaaaaaaaaaaaaaaaaaaaaaaaaaaaaaaaaaaaaaaaaaaaaaaaaaaaaaaaaaaaaaaaaaaaaaaaaaaaaa

SEQ ID NO: 23426 - RNA, 4094 nt, Artificial Sequence
  SARS-CoV-2/Wuhan/WIV05/2019__EPI_ISL_402128 spike protein mRNA gc (1-1273)(S13I_W152C_L452R_D614G)
aggagagucccgcagucggcguccagcggcucugcuuguucgugugugugucguugcaggccuuauucaagcuuaccauguucguguuccugguccuccugccccuggugagcauccagugcgugaaccucaccacccgcacgcagcugccgcccgccuacaccaacagcuucacccggggcgucuacuaccccgacaagguguuccgcuccagcgugcugcacuccacccaggaccucuuccugcccuucuucagcaacgucacgugguuccacgccauccacguguccgggaccaacggcaccaagcgguucgacaacccggugcugcccuucaacgacggggucuacuucgcgagcaccgagaaguccaacaucauccgcggcuggaucuucgggacgacccucgacagcaagacccagucccugcugaucgugaacaacgccaccaacguggucaucaaggugugcgaguuccaguucugcaacgaccccuuccucggcguguacuaccacaagaacaacaagagcugcauggaguccgaguuccgggucuacagcuccgccaacaacugcacguucgaguacgugagccagcccuuccugauggaccuggagggcaagcaggggaacuucaagaaccuccgcgaguucguguucaagaacaucgacggcuacuucaagaucuacuccaagcacaccccgaucaaccugguccgggaccugccccagggguucagcgcccucgagccccugguggaccugcccaucggcaucaacaucacccgcuuccagacccuccuggcccugcaccgguccuaccucacgccgggggacagcagcuccggcuggaccgcgggcgccgccgccuacuacgugggguaccugcagccccgcaccuuccugcucaaguacaacgagaacggcaccaucacggacgcggucgacugcgcccuggacccccugagcgagaccaagugcacccucaaguccuucaccguggagaaggggaucuaccagacgagcaacuuccgggugcagcccaccgaguccaucguccgcuucccgaacaucaccaaccugugccccuucggcgagguguucaacgccacccgguucgccagcgucuacgccuggaaccgcaagcggaucuccaacugcguggcggacuacagcgugcuguacaacuccgccagcuucuccacguucaagugcuacggcgucagccccaccaagcucaacgaccugugcuucaccaacguguacgccgacuccuucgugauccgcggggacgagguccggcagaucgcccccggccagaccgggaagaucgccgacuacaacuacaagcugccggacgacuucacgggcugcgugaucgcguggaacagcaacaaccucgacuccaaggucgggggcaacuacaacuaccgcuaccgccuguuccgcaagagcaaccucaagcccuucgagcgggacaucuccaccgagaucuaccaggccggcagcacccccugcaacgggguggagggcuucaacugcuacuucccccugcaguccuacggguuccagccgaccaacggcgugggguaccagcccuaccggguggucgugcugagcuucgagcuccugcacgcccccgccacggugugcggccccaagaaguccaccaaccuggucaagaacaagugcgugaacuucaacuucaacggccucaccgggaccggcgugcugaccgagagcaacaagaaguuccugccguuccagcaguucgggcgcgacaucgccgacacgaccgacgcgguccgcgacccccagacccuggagauccucgacaucacccccugcagcuucggcgggguguccgugaucacgccgggcaccaacaccagcaaccaggucgccgugcuguaccagggcgugaacugcaccgagguccccguggccauccacgccgaccagcugacgcccaccuggcggguguacuccaccggcagcaacgucuuccagacccgcgccgggugccucaucggcgcggagcacgugaacaacuccuacgagugcgacauccccaucggggccggcaucugcgccagcuaccagacgcagaccaacuccccgcggcgcgcccggagcguggcgucccagagcaucaucgccuacaccaugucccugggcgccgagaacagcgucgccuacuccaacaacagcaucgccauccccaccaacuucacgaucuccgugaccaccgagauccugcccgugagcaugaccaagacgagcgucgacugcaccauguacaucugcggggacuccaccgagugcagcaaccuccugcugcaguacggcuccuucugcacccagcucaaccgcgcgcugacggggaucgccguggagcaggacaagaacacccaggagguguucgcccaggucaagcagaucuacaagacgcccccgaucaaggacuucggcggguucaacuucagccagauccugcccgaccccuccaagcccagcaagcgguccuucaucgaggaccuccuguucaacaaggugacccuggccgacgccggcuucaucaagcaguacggcgacugccucggggacaucgcggcccgcgaccugaucugcgcccagaaguucaacggccugaccgugcucccgccccugcugaccgacgagaugaucgcccaguacaccagcgcccuccuggcggggaccaucacguccggcuggaccuucggggccggcgccgcccugcagauccccuucgcgaugcagauggccuaccgguucaacggcaucggggucacccagaacgugcucuacgagaaccagaagcugaucgccaaccaguucaacagcgccaucggcaagauccaggacucccugagcuccaccgccagcgcgcucgggaagcugcaggacguggucaaccagaacgcccaggcccugaacacgcucgugaagcagcuguccagcaacuucggcgccaucuccagcgugcugaacgacauccucucccgccuggacaaggucgaggccgaggugcagaucgaccggcugaucaccgggcgccuccagagccugcagaccuacgugacccagcagcugauccgggcggccgagauccgcgccagcgccaaccucgccgcgaccaagauguccgagugcguccugggccagagcaagcggguggacuucugcggcaagggguaccaccugauguccuucccccagagcgccccgcacggcguggucuuccuccacgugacguacguccccgcccaggagaagaacuucaccaccgcccccgcgaucugccacgacgggaaggcccacuucccccgcgagggcguguucguguccaacgggacccacugguucgucacgcagcggaacuucuacgagccgcagaucaucaccaccgacaacaccuucgugagcggcaacugcgacguggucaucggcaucgugaacaacacgguguacgacccccugcagcccgagcuggacuccuucaaggaggagcucgacaaguacuucaagaaccacaccagccccgacgucgaccugggggacaucuccggcaucaacgccagcguggugaacauccagaaggagaucgaccgccugaacgaggucgccaagaaccucaacgagucccugaucgaccugcaggagcucgggaaguacgagcaguacaucaaguggccgugguacaucuggcugggcuucaucgccggccugaucgcgaucgugauggugaccaucaugcucugcugcaugaccagcugcugcuccugccugaaggggugcugcagcugcggcuccugcugcaaguucgacgaggacgacagcgagcccguccugaagggggugaagcuccacuacacgugaggacuagucccuguucccagagcccacuuuuuuuucuuuuuuugaaauaaaauagccugucuuucagaucucaaaggcucuuuucagagccaccaaaaaaaaaaaaaaaaaaaaaaaaaaaaaaaaaaaaaaaaaaaaaaaaaaaaaaaaaaaaaaaaaaaaaaaaaaaaaaaaaaaaaaaaaaaaaaaaaaaaa

SEQ ID NO: 23427 - RNA, 4094 nt, Artificial Sequence; identical to SEQ ID NO: 148
  SARS-CoV-2/Wuhan/WIV05/2019__EPI_ISL_402128 spike protein mRNA gc (1-1273) R9488, R9492, R10161

SEQ ID NO: 23428 - RNA, 4094 nt, Artificial Sequence; identical to SEQ ID NO: 12279
  SARS-CoV-2/Wuhan/WIV05/2019__EPI_ISL_402128 spike protein mRNA gc (1-1273)(D614G)

SEQ ID NO: 23429 - RNA, 4094 nt, Artificial Sequence
  SARS-CoV-2/Wuhan/WIV05/2019__EPI_ISL_402128 spike protein mRNA gc (1-1273)(A222V_D614G)
aggagagucccgcagucggcguccagcggcucugcuuguucgugugugugucguugcaggccuuauucaagcuuaccauguucguguuccugguccuccugccccuggugagcucccagugcgugaaccucaccacccgcacgcagcugccgcccgccuacaccaacagcuucacccggggcgucuacuaccccgacaagguguuccgcuccagcgugcugcacuccacccaggaccucuuccugcccuucuucagcaacgucacgugguuccacgccauccacguguccgggaccaacggcaccaagcgguucgacaacccggugcugcccuucaacgacggggucuacuucgcgagcaccgagaaguccaacaucauccgcggcuggaucuucgggacgacccucgacagcaagacccagucccugcugaucgugaacaacgccaccaacguggucaucaaggugugcgaguuccaguucugcaacgaccccuuccucggcguguacuaccacaagaacaacaagagcuggauggaguccgaguuccgggucuacagcuccgccaacaacugcacguucgaguacgugagccagcccuuccugauggaccuggagggcaagcaggggaacuucaagaaccuccgcgaguucguguucaagaacaucgacggcuacuucaagaucuacuccaagcacaccccgaucaaccugguccgggaccugccccagggguucagcgugcucgagccccugguggaccugcccaucggcaucaacaucacccgcuuccagacccuccuggcccugcaccgguccuaccucacgccgggggacagcagcuccggcuggaccgccggcgcggccgccuacuacgucggguaccugcagccccgcaccuuccugcucaaguacaacgagaacggcaccaucacggacgccguggacugcgcgcuggacccccugagcgagaccaagugcacccucaaguccuucaccguggagaaggggaucuaccagacgagcaacuuccggguccagcccaccgaguccaucgugcgcuucccgaacaucaccaaccugugccccuucggcgaggucuucaacgccacccgguucgccagcguguacgccuggaaccgcaagcggaucuccaacugcguggccgacuacagcguccuguacaacuccgcgagcuucuccacguucaagugcuacggcgugagccccaccaagcucaacgaccugugcuucaccaacguguacgccgacuccuucgucauccgcggggacgaggugcggcagaucgcccccggccagaccgggaagaucgccgacuacaacuacaagcugccggacgacuucacgggcugcgugaucgccuggaacagcaacaaccucgacuccaaggucgggggcaacuacaacuaccuguaccgccuguuccgcaagagcaaccucaagcccuucgagcgggacaucuccaccgagaucuaccaggcgggcagcacccccugcaacgggguggagggcuucaacugcuacuucccccugcaguccuacggguuccagccgaccaacggcgugggguaccagcccuaccgggucguggugcugagcuucgagcuccugcacgcccccgccacggucugcggccccaagaaguccaccaaccuggugaagaacaagugcgugaacuucaacuucaacggccucaccgggaccggcguccugaccgagagcaacaagaaguuccugccguuccagcaguucgggcgcgacaucgccgacacgaccgacgccgugcgcgacccccagacccuggagauccucgacaucacccccugcagcuucggcgggguguccgucaucacgccgggcaccaacaccagcaaccagguggcggugcuguaccagggcgucaacugcaccgaggugcccguggccauccacgccgaccagcugacgcccaccuggcgggucuacuccaccgggagcaacguguuccagacccgcgccggcugccucaucggggccgagcacgugaacaacuccuacgagugcgacauccccaucggcgcgggcaucugcgccagcuaccagacgcagaccaacuccccgcggcgcgcccggagcgucgccucccagagcaucaucgcguacaccaugucccugggggccgagaacagcguggccuacuccaacaacagcaucgccauccccaccaacuucacgaucuccgugaccaccgagauccugcccgucagcaugaccaagacgagcguggacugcaccauguacaucugcggcgacuccaccgagugcagcaaccuccugcugcaguacggguccuucugcacccagcucaaccgcgcccugacgggcaucgcgguggagcaggacaagaacacccaggaggucuucgcccaggugaagcagaucuacaagacgcccccgaucaaggacuucgggggcuucaacuucagccagauccugcccgaccccuccaagcccagcaagcgguccuucaucgaggaccuccuguucaacaaggugacccuggccgacgccggcuucaucaagcaguacggggacugccucggcgacaucgccgcgcgcgaccugaucugcgcccagaaguucaacgggcugaccguccucccgccccugcugaccgacgagaugaucgcccaguacaccagcgcccuccuggccggcaccaucacguccggguggaccuucggcgcgggcgccgcccugcagauccccuucgccaugcagauggcguaccgguucaacgggaucggcgugacccagaacgugcucuacgagaaccagaagcugaucgccaaccaguucaacagcgccaucgggaagauccaggacucccugagcuccaccgccagcgcccucggcaagcugcaggacgucgugaaccagaacgcgcaggcccugaacacgcucgugaagcagcuguccagcaacuucggggccaucuccagcguccugaacgacauccucucccgccuggacaagguggaggccgaggugcagaucgaccggcugaucaccggccgccuccagagccugcagaccuacgucacccagcagcugauccgggccgcggagauccgcgccagcgccaaccucgccgccaccaagauguccgagugcgugcugggccagagcaagcggguggacuucugcgggaagggcuaccaccugauguccuucccccagagcgcgccgcacggggucguguuccuccacgucacguacgugcccgcccaggagaagaacuucaccaccgcccccgccaucugccacgacggcaaggcgcacuucccccgcgaggggguguucgucuccaacggcacccacugguucgugacgcagcggaacuucuacgagccgcagaucaucaccaccgacaacaccuucgugagcggcaacugcgacgucgugaucgggaucgugaacaacacggucuacgacccccugcagcccgagcuggacuccuucaaggaggagcucgacaaguacuucaagaaccacaccagccccgacguggaccugggcgacaucuccgggaucaacgccagcguggucaacauccagaaggagaucgaccgccugaacgagguggccaagaaccucaacgagucccugaucgaccugcaggagcucggcaaguacgagcaguacaucaaguggccgugguacaucuggcugggcuucaucgccgggcugaucgccaucgugauggucaccaucaugcucugcugcaugaccagcugcugcuccugccugaagggcugcugcagcugcggguccugcugcaaguucgacgaggacgacagcgagcccgugcugaagggcgugaagcuccacuacacgugaggacuagucccuguucccagagcccacuuuuuuuucuuuuuuugaaauaaaauagccugucuuucagaucucaaaggcucuuuucagagccaccaaaaaaaaaaaaaaaaaaaaaaaaaaaaaaaaaaaaaaaaaaaaaaaaaaaaaaaaaaaaaaaaaaaaaaaaaaaaaaaaaaaaaaaaaaaaaaaaaaaaa

SEQ ID NO: 23430 - RNA, 4094 nt, Artificial Sequence
  SARS-CoV-2/Wuhan/WIV05/2019__EPI_ISL_402128 spike protein mRNA gc (1-1273)(N439K_D614G)
aggagagucccgcagucggcguccagcggcucugcuuguucgugugugugucguugcaggccuuauucaagcuuaccauguucguguuccugguccuccugccccuggugagcucccagugcgugaaccucaccacccgcacgcagcugccgcccgccuacaccaacagcuucacccggggcgucuacuaccccgacaagguguuccgcuccagcgugcugcacuccacccaggaccucuuccugcccuucuucagcaacgucacgugguuccacgccauccacguguccgggaccaacggcaccaagcgguucgacaacccggugcugcccuucaacgacggggucuacuucgcgagcaccgagaaguccaacaucauccgcggcuggaucuucgggacgacccucgacagcaagacccagucccugcugaucgugaacaacgccaccaacguggucaucaaggugugcgaguuccaguucugcaacgaccccuuccucggcguguacuaccacaagaacaacaagagcuggauggaguccgaguuccgggucuacagcuccgccaacaacugcacguucgaguacgugagccagcccuuccugauggaccuggagggcaagcaggggaacuucaagaaccuccgcgaguucguguucaagaacaucgacggcuacuucaagaucuacuccaagcacaccccgaucaaccugguccgggaccugccccagggguucagcgcccucgagccccugguggaccugcccaucggcaucaacaucacccgcuuccagacccuccuggcccugcaccgguccuaccucacgccgggggacagcagcuccggcuggaccgcgggcgccgccgccuacuacgugggguaccugcagccccgcaccuuccugcucaaguacaacgagaacggcaccaucacggacgcggucgacugcgcccuggacccccugagcgagaccaagugcacccucaaguccuucaccguggagaaggggaucuaccagacgagcaacuuccgggugcagcccaccgaguccaucguccgcuucccgaacaucaccaaccugugccccuucggcgagguguucaacgccacccgguucgccagcgucuacgccuggaaccgcaagcggaucuccaacugcguggcggacuacagcgugcuguacaacuccgccagcuucuccacguucaagugcuacggcgucagccccaccaagcucaacgaccugugcuucaccaacguguacgccgacuccuucgugauccgcggggacgagguccggcagaucgcccccggccagaccgggaagaucgccgacuacaacuacaagcugccggacgacuucacgggcugcgugaucgcguggaacagcaagaaccucgacuccaaggucgggggcaacuacaacuaccuguaccgccuguuccgcaagagcaaccucaagcccuucgagcgggacaucuccaccgagaucuaccaggccggcagcacccccugcaacgggguggagggcuucaacugcuacuucccccugcaguccuacggguuccagccgaccaacggcgugggguaccagcccuaccggguggucgugcugagcuucgagcuccugcacgcccccgccacggugugcggccccaagaaguccaccaaccuggucaagaacaagugcgugaacuucaacuucaacggccucaccgggaccggcgugcugaccgagagcaacaagaaguuccugccguuccagcaguucgggcgcgacaucgccgacacgaccgacgcgguccgcgacccccagacccuggagauccucgacaucacccccugcagcuucggcgggguguccgugaucacgccgggcaccaacaccagcaaccaggucgccgugcuguaccagggcgugaacugcaccgagguccccguggccauccacgccgaccagcugacgcccaccuggcggguguacuccaccgggagcaacgucuuccagacccgcgccggcugccucaucggggcggagcacgugaacaacuccuacgagugcgacauccccaucggcgccggcaucugcgccagcuaccagacgcagaccaacuccccgcggcgcgcccggagcguggcgucccagagcaucaucgccuacaccaugucccugggggccgagaacagcgucgccuacuccaacaacagcaucgccauccccaccaacuucacgaucuccgugaccaccgagauccugcccgugagcaugaccaagacgagcgucgacugcaccauguacaucugcggcgacuccaccgagugcagcaaccuccugcugcaguacggguccuucugcacccagcucaaccgcgcgcugacgggcaucgccguggagcaggacaagaacacccaggagguguucgcccaggucaagcagaucuacaagacgcccccgaucaaggacuucgggggcuucaacuucagccagauccugcccgaccccuccaagcccagcaagcgguccuucaucgaggaccuccuguucaacaaggugacccuggccgacgccggcuucaucaagcaguacggggacugccucggcgacaucgcggcccgcgaccugaucugcgcccagaaguucaacgggcugaccgugcucccgccccugcugaccgacgagaugaucgcccaguacaccagcgcccuccuggcgggcaccaucacguccggguggaccuucggcgccggcgccgcccugcagauccccuucgcgaugcagauggccuaccgguucaacgggaucggcgucacccagaacgugcucuacgagaaccagaagcugaucgccaaccaguucaacagcgccaucgggaagauccaggacucccugagcuccaccgccagcgcgcucggcaagcugcaggacguggucaaccagaacgcccaggcccugaacacgcucgugaagcagcuguccagcaacuucggggccaucuccagcgugcugaacgacauccucucccgccuggacaaggucgaggccgaggugcagaucgaccggcugaucaccggccgccuccagagccugcagaccuacgugacccagcagcugauccgggcggccgagauccgcgccagcgccaaccucgccgcgaccaagauguccgagugcguccugggccagagcaagcggguggacuucugcgggaagggcuaccaccugauguccuucccccagagcgccccgcacgggguggucuuccuccacgugacguacguccccgcccaggagaagaacuucaccaccgcccccgcgaucugccacgacggcaaggcccacuucccccgcgaggggguguucguguccaacggcacccacugguucgucacgcagcggaacuucuacgagccgcagaucaucaccaccgacaacaccuucgugagcggcaacugcgacguggucaucgggaucgugaacaacacgguguacgacccccugcagcccgagcuggacuccuucaaggaggagcucgacaaguacuucaagaaccacaccagccccgacgucgaccugggcgacaucuccgggaucaacgccagcguggugaacauccagaaggagaucgaccgccugaacgaggucgccaagaaccucaacgagucccugaucgaccugcaggagcucggcaaguacgagcaguacaucaaguggccgugguacaucuggcugggcuucaucgccgggcugaucgcgaucgugauggugaccaucaugcucugcugcaugaccagcugcugcuccugccugaagggcugcugcagcugcggguccugcugcaaguucgacgaggacgacagcgagcccguccugaagggcgugaagcuccacuacacgugaggacuagucccuguucccagagcccacuuuuuuuucuuuuuuugaaauaaaauagccugucuuucagaucucaaaggcucuuuucagagccaccaaaaaaaaaaaaaaaaaaaaaaaaaaaaaaaaaaaaaaaaaaaaaaaaaaaaaaaaaaaaaaaaaaaaaaaaaaaaaaaaaaaaaaaaaaaaaaaaaaaaa

SEQ ID NO: 23431 - RNA, 4094 nt, Artificial Sequence
  SARS-CoV-2/Wuhan/WIV05/2019__EPI_ISL_402128 spike protein mRNA gc (1-1273)(S477N_D614G)
aggagagucccgcagucggcguccagcggcucugcuuguucgugugugugucguugcaggccuuauucaagcuuaccauguucguguuccugguccuccugccccuggugagcucccagugcgugaaccucaccacccgcacgcagcugccgcccgccuacaccaacagcuucacccggggcgucuacuaccccgacaagguguuccgcuccagcgugcugcacuccacccaggaccucuuccugcccuucuucagcaacgucacgugguuccacgccauccacguguccgggaccaacggcaccaagcgguucgacaacccggugcugcccuucaacgacggggucuacuucgcgagcaccgagaaguccaacaucauccgcggcuggaucuucgggacgacccucgacagcaagacccagucccugcugaucgugaacaacgccaccaacguggucaucaaggugugcgaguuccaguucugcaacgaccccuuccucggcguguacuaccacaagaacaacaagagcuggauggaguccgaguuccgggucuacagcuccgccaacaacugcacguucgaguacgugagccagcccuuccugauggaccuggagggcaagcaggggaacuucaagaaccuccgcgaguucguguucaagaacaucgacggcuacuucaagaucuacuccaagcacaccccgaucaaccugguccgggaccugccccagggguucagcgcccucgagccccugguggaccugcccaucggcaucaacaucacccgcuuccagacccuccuggcccugcaccgguccuaccucacgccgggggacagcagcuccggcuggaccgcgggcgccgccgccuacuacgugggguaccugcagccccgcaccuuccugcucaaguacaacgagaacggcaccaucacggacgcggucgacugcgcccuggacccccugagcgagaccaagugcacccucaaguccuucaccguggagaaggggaucuaccagacgagcaacuuccgggugcagcccaccgaguccaucguccgcuucccgaacaucaccaaccugugccccuucggcgagguguucaacgccacccgguucgccagcgucuacgccuggaaccgcaagcggaucuccaacugcguggcggacuacagcgugcuguacaacuccgccagcuucuccacguucaagugcuacggcgucagccccaccaagcucaacgaccugugcuucaccaacguguacgccgacuccuucgugauccgcggggacgagguccggcagaucgcccccggccagaccgggaagaucgccgacuacaacuacaagcugccggacgacuucacgggcugcgugaucgcguggaacagcaacaaccucgacuccaaggucgggggcaacuacaacuaccuguaccgccuguuccgcaagagcaaccucaagcccuucgagcgggacaucuccaccgagaucuaccaggccggcaacacccccugcaacgggguggagggcuucaacugcuacuucccccugcagagcuacggguuccagccgaccaacggcgugggguaccagcccuaccggguggucgugcuguccuucgagcuccugcacgcccccgccacggugugcggccccaagaaguccaccaaccuggucaagaacaagugcgugaacuucaacuucaacggccucaccgggaccggcgugcugaccgagagcaacaagaaguuccugccguuccagcaguucgggcgcgacaucgccgacacgaccgacgcgguccgcgacccccagacccuggagauccucgacaucacccccugcagcuucggcggggugagcgugaucacgccgggcaccaacaccuccaaccaggucgccgugcuguaccagggcgugaacugcaccgagguccccguggccauccacgccgaccagcugacgcccaccuggcggguguacagcaccggguccaacgucuuccagacccgcgccggcugccucaucggggcggagcacgugaacaacagcuacgagugcgacauccccaucggcgccggcaucugcgccuccuaccagacgcagaccaacagcccgcggcgcgcccgguccguggcgagccaguccaucaucgccuacaccaugagccugggggccgagaacuccgucgccuacagcaacaacuccaucgccauccccaccaacuucacgaucagcgugaccaccgagauccugcccguguccaugaccaagacgagcgucgacugcaccauguacaucugcggcgacagcaccgagugcuccaaccuccugcugcaguacgggagcuucugcacccagcucaaccgcgcgcugacgggcaucgccguggagcaggacaagaacacccaggagguguucgcccaggucaagcagaucuacaagacgcccccgaucaaggacuucgggggcuucaacuucucccagauccugcccgaccccagcaagcccuccaagcggagcuucaucgaggaccuccuguucaacaaggugacccuggccgacgccggcuucaucaagcaguacggggacugccucggcgacaucgcggcccgcgaccugaucugcgcccagaaguucaacgggcugaccgugcucccgccccugcugaccgacgagaugaucgcccaguacaccuccgcccuccuggcgggcaccaucacgagcggguggaccuucggcgccggcgccgcccugcagauccccuucgcgaugcagauggccuaccgguucaacgggaucggcgucacccagaacgugcucuacgagaaccagaagcugaucgccaaccaguucaacuccgccaucgggaagauccaggacagccuguccagcaccgccuccgcgcucggcaagcugcaggacguggucaaccagaacgcccaggcccugaacacgcucgugaagcagcugagcuccaacuucggggccaucagcuccgugcugaacgacauccucagccgccuggacaaggucgaggccgaggugcagaucgaccggcugaucaccggccgccuccagucccugcagaccuacgugacccagcagcugauccgggcggccgagauccgcgccagcgccaaccucgccgcgaccaagaugagcgagugcguccugggccaguccaagcggguggacuucugcgggaagggcuaccaccugaugagcuucccccaguccgccccgcacgggguggucuuccuccacgugacguacguccccgcccaggagaagaacuucaccaccgcccccgcgaucugccacgacggcaaggcccacuucccccgcgaggggguguucgugagcaacggcacccacugguucgucacgcagcggaacuucuacgagccgcagaucaucaccaccgacaacaccuucguguccggcaacugcgacguggucaucgggaucgugaacaacacgguguacgacccccugcagcccgagcuggacagcuucaaggaggagcucgacaaguacuucaagaaccacaccucccccgacgucgaccugggcgacaucagcgggaucaacgccuccguggugaacauccagaaggagaucgaccgccugaacgaggucgccaagaaccucaacgagagccugaucgaccugcaggagcucggcaaguacgagcaguacaucaaguggccgugguacaucuggcugggcuucaucgccgggcugaucgcgaucgugauggugaccaucaugcucugcugcaugaccuccugcugcagcugccugaagggcugcugcuccugcgggagcugcugcaaguucgacgaggacgacuccgagcccguccugaagggcgugaagcuccacuacacgugaggacuagucccuguucccagagcccacuuuuuuuucuuuuuuugaaauaaaauagccugucuuucagaucucaaaggcucuuuucagagccaccaaaaaaaaaaaaaaaaaaaaaaaaaaaaaaaaaaaaaaaaaaaaaaaaaaaaaaaaaaaaaaaaaaaaaaaaaaaaaaaaaaaaaaaaaaaaaaaaaaaaa

SEQ ID NO: 23432 - RNA, 4094 nt, Artificial Sequence
  SARS-CoV-2/Wuhan/WIV05/2019__EPI_ISL_402128 spike protein mRNA gc (1-1273)(N501Y_D614G)
aggagagucccgcagucggcguccagcggcucugcuuguucgugugugugucguugcaggccuuauucaagcuuaccauguucguguuccugguccuccugccccuggugagcucccagugcgugaaccucaccacccgcacgcagcugccgcccgccuacaccaacagcuucacccggggcgucuacuaccccgacaagguguuccgcuccagcgugcugcacuccacccaggaccucuuccugcccuucuucagcaacgucacgugguuccacgccauccacguguccgggaccaacggcaccaagcgguucgacaacccggugcugcccuucaacgacggggucuacuucgcgagcaccgagaaguccaacaucauccgcggcuggaucuucgggacgacccucgacagcaagacccagucccugcugaucgugaacaacgccaccaacguggucaucaaggugugcgaguuccaguucugcaacgaccccuuccucggcguguacuaccacaagaacaacaagagcuggauggaguccgaguuccgggucuacagcuccgccaacaacugcacguucgaguacgugagccagcccuuccugauggaccuggagggcaagcaggggaacuucaagaaccuccgcgaguucguguucaagaacaucgacggcuacuucaagaucuacuccaagcacaccccgaucaaccugguccgggaccugccccagggguucagcgcccucgagccccugguggaccugcccaucggcaucaacaucacccgcuuccagacccuccuggcccugcaccgguccuaccucacgccgggggacagcagcuccggcuggaccgcgggcgccgccgccuacuacgugggguaccugcagccccgcaccuuccugcucaaguacaacgagaacggcaccaucacggacgcggucgacugcgcccuggacccccugagcgagaccaagugcacccucaaguccuucaccguggagaaggggaucuaccagacgagcaacuuccgggugcagcccaccgaguccaucguccgcuucccgaacaucaccaaccugugccccuucggcgagguguucaacgccacccgguucgccagcgucuacgccuggaaccgcaagcggaucuccaacugcguggcggacuacagcgugcuguacaacuccgccagcuucuccacguucaagugcuacggcgucagccccaccaagcucaacgaccugugcuucaccaacguguacgccgacuccuucgugauccgcggggacgagguccggcagaucgcccccggccagaccgggaagaucgccgacuacaacuacaagcugccggacgacuucacgggcugcgugaucgcguggaacagcaacaaccucgacuccaaggucgggggcaacuacaacuaccuguaccgccuguuccgcaagagcaaccucaagcccuucgagcgggacaucuccaccgagaucuaccaggccggcagcacccccugcaacgggguggagggcuucaacugcuacuucccccugcaguccuacggguuccagccgaccuacggcgugggguaccagcccuaccggguggucgugcugagcuucgagcuccugcacgcccccgccacggugugcggccccaagaaguccaccaaccuggucaagaacaagugcgugaacuucaacuucaacggccucaccgggaccggcgugcugaccgagagcaacaagaaguuccugccguuccagcaguucgggcgcgacaucgccgacacgaccgacgcgguccgcgacccccagacccuggagauccucgacaucacccccugcagcuucggcgggguguccgugaucacgccgggcaccaacaccagcaaccaggucgccgugcuguaccagggcgugaacugcaccgagguccccguggccauccacgccgaccagcugacgcccaccuggcggguguacuccaccgggagcaacgucuuccagacccgcgccggcugccucaucggggcggagcacgugaacaacuccuacgagugcgacauccccaucggcgccggcaucugcgccagcuaccagacgcagaccaacuccccgcggcgcgcccggagcguggcgucccagagcaucaucgccuacaccaugucccugggggccgagaacagcgucgccuacuccaacaacagcaucgccauccccaccaacuucacgaucuccgugaccaccgagauccugcccgugagcaugaccaagacgagcgucgacugcaccauguacaucugcggcgacuccaccgagugcagcaaccuccugcugcaguacggguccuucugcacccagcucaaccgcgcgcugacgggcaucgccguggagcaggacaagaacacccaggagguguucgcccaggucaagcagaucuacaagacgcccccgaucaaggacuucgggggcuucaacuucagccagauccugcccgaccccuccaagcccagcaagcgguccuucaucgaggaccuccuguucaacaaggugacccuggccgacgccggcuucaucaagcaguacggggacugccucggcgacaucgcggcccgcgaccugaucugcgcccagaaguucaacgggcugaccgugcucccgccccugcugaccgacgagaugaucgcccaguacaccagcgcccuccuggcgggcaccaucacguccggguggaccuucggcgccggcgccgcccugcagauccccuucgcgaugcagauggccuaccgguucaacgggaucggcgucacccagaacgugcucuacgagaaccagaagcugaucgccaaccaguucaacagcgccaucgggaagauccaggacucccugagcuccaccgccagcgcgcucggcaagcugcaggacguggucaaccagaacgcccaggcccugaacacgcucgugaagcagcuguccagcaacuucggggccaucuccagcgugcugaacgacauccucucccgccuggacaaggucgaggccgaggugcagaucgaccggcugaucaccggccgccuccagagccugcagaccuacgugacccagcagcugauccgggcggccgagauccgcgccagcgccaaccucgccgcgaccaagauguccgagugcguccugggccagagcaagcggguggacuucugcgggaagggcuaccaccugauguccuucccccagagcgccccgcacgggguggucuuccuccacgugacguacguccccgcccaggagaagaacuucaccaccgcccccgcgaucugccacgacggcaaggcccacuucccccgcgaggggguguucguguccaacggcacccacugguucgucacgcagcggaacuucuacgagccgcagaucaucaccaccgacaacaccuucgugagcggcaacugcgacguggucaucgggaucgugaacaacacgguguacgacccccugcagcccgagcuggacuccuucaaggaggagcucgacaaguacuucaagaaccacaccagccccgacgucgaccugggcgacaucuccgggaucaacgccagcguggugaacauccagaaggagaucgaccgccugaacgaggucgccaagaaccucaacgagucccugaucgaccugcaggagcucggcaaguacgagcaguacaucaaguggccgugguacaucuggcugggcuucaucgccgggcugaucgcgaucgugauggugaccaucaugcucugcugcaugaccagcugcugcuccugccugaagggcugcugcagcugcggguccugcugcaaguucgacgaggacgacagcgagcccguccugaagggcgugaagcuccacuacacgugaggacuagucccuguucccagagcccacuuuuuuuucuuuuuuugaaauaaaauagccugucuuucagaucucaaaggcucuuuucagagccaccaaaaaaaaaaaaaaaaaaaaaaaaaaaaaaaaaaaaaaaaaaaaaaaaaaaaaaaaaaaaaaaaaaaaaaaaaaaaaaaaaaaaaaaaaaaaaaaaaaaaa

SEQ ID NO: 23433 - RNA, 4088 nt, Artificial Sequence
  SARS-CoV-2/Wuhan/WIV05/2019__EPI_ISL_402128 spike protein mRNA gc (1-1273)(H69del_V70del_D614G)
aggagagucccgcagucggcguccagcggcucugcuuguucgugugugugucguugcaggccuuauucaagcuuaccauguucguguuccugguccuccugccccuggugagcucccagugcgugaaccucaccacccgcacgcagcugccgcccgccuacaccaacagcuucacccggggcgucuacuaccccgacaagguguuccgcuccagcgugcugcacuccacccaggaccucuuccugcccuucuucagcaacgucacgugguuccacgccaucuccgggaccaacggcaccaagcgguucgacaacccggugcugcccuucaacgacgggguguacuucgcgagcaccgagaaguccaacaucauccgcggcuggaucuucgggacgacccucgacagcaagacccagucccugcugaucgucaacaacgccaccaacguggugaucaaggucugcgaguuccaguucugcaacgaccccuuccucggcguguacuaccacaagaacaacaagagcuggauggaguccgaguuccggguguacagcuccgccaacaacugcacguucgaguacgucagccagcccuuccugauggaccuggagggcaagcaggggaacuucaagaaccuccgcgaguucguguucaagaacaucgacggcuacuucaagaucuacuccaagcacaccccgaucaaccuggugcgggaccugccccagggguucagcgcccucgagccccuggucgaccugcccaucggcaucaacaucacccgcuuccagacccuccuggcccugcaccgguccuaccucacgccgggggacagcagcuccggcuggaccgcgggcgccgccgccuacuacgugggguaccugcagccccgcaccuuccugcucaaguacaacgagaacggcaccaucacggacgcgguggacugcgcccuggacccccugagcgagaccaagugcacccucaaguccuucaccgucgagaaggggaucuaccagacgagcaacuuccgggugcagcccaccgaguccaucgugcgcuucccgaacaucaccaaccugugccccuucggcgaggucuucaacgccacccgguucgccagcguguacgccuggaaccgcaagcggaucuccaacugcgucgcggacuacagcgugcuguacaacuccgccagcuucuccacguucaagugcuacggcgugagccccaccaagcucaacgaccugugcuucaccaacgucuacgccgacuccuucgugauccgcggggacgaggugcggcagaucgcccccggccagaccgggaagaucgccgacuacaacuacaagcugccggacgacuucacgggcugcgucaucgcguggaacagcaacaaccucgacuccaaggucgggggcaacuacaacuaccuguaccgccuguuccgcaagagcaaccucaagcccuucgagcgggacaucuccaccgagaucuaccaggccggcagcacccccugcaacgggguggagggcuucaacugcuacuucccccugcaguccuacggguuccagccgaccaacggcgugggguaccagcccuaccggguggugguccugagcuucgagcuccugcacgcccccgccacggugugcggccccaagaaguccaccaaccuggugaagaacaagugcgucaacuucaacuucaacggccucaccgggaccggcgugcugaccgagagcaacaagaaguuccugccguuccagcaguucgggcgcgacaucgccgacacgaccgacgcggugcgcgacccccagacccuggagauccucgacaucacccccugcagcuucggcggggucuccgugaucacgccgggcaccaacaccagcaaccagguggccguccuguaccagggcgugaacugcaccgaggugcccgucgccauccacgccgaccagcugacgcccaccuggcggguguacuccaccgggagcaacguguuccagacccgcgccggcugccucaucggggcggagcacgucaacaacuccuacgagugcgacauccccaucggcgccggcaucugcgccagcuaccagacgcagaccaacuccccgcggcgcgcccggagcguggcgucccagagcaucaucgccuacaccaugucccugggggccgagaacagcguggccuacuccaacaacagcaucgccauccccaccaacuucacgaucuccgucaccaccgagauccugcccgugagcaugaccaagacgagcguggacugcaccauguacaucugcggcgacuccaccgagugcagcaaccuccugcugcaguacggguccuucugcacccagcucaaccgcgcgcugacgggcaucgccgucgagcaggacaagaacacccaggagguguucgcccaggugaagcagaucuacaagacgcccccgaucaaggacuucgggggcuucaacuucagccagauccugcccgaccccuccaagcccagcaagcgguccuucaucgaggaccuccuguucaacaaggucacccuggccgacgccggcuucaucaagcaguacggggacugccucggcgacaucgcggcccgcgaccugaucugcgcccagaaguucaacgggcugaccgugcucccgccccugcugaccgacgagaugaucgcccaguacaccagcgcccuccuggcgggcaccaucacguccggguggaccuucggcgccggcgccgcccugcagauccccuucgcgaugcagauggccuaccgguucaacgggaucggcgugacccagaacguccucuacgagaaccagaagcugaucgccaaccaguucaacagcgccaucgggaagauccaggacucccugagcuccaccgccagcgcgcucggcaagcugcaggacguggugaaccagaacgcccaggcccugaacacgcucgucaagcagcuguccagcaacuucggggccaucuccagcgugcugaacgacauccucucccgccuggacaagguggaggccgagguccagaucgaccggcugaucaccggccgccuccagagccugcagaccuacgugacccagcagcugauccgggcggccgagauccgcgccagcgccaaccucgccgcgaccaagauguccgagugcgugcugggccagagcaagcgggucgacuucugcgggaagggcuaccaccugauguccuucccccagagcgccccgcacggggugguguuccuccacgucacguacgugcccgcccaggagaagaacuucaccaccgcccccgcgaucugccacgacggcaaggcccacuucccccgcgagggggucuucguguccaacggcacccacugguucgugacgcagcggaacuucuacgagccgcagaucaucaccaccgacaacaccuucgucagcggcaacugcgacguggugaucgggaucgucaacaacacgguguacgacccccugcagcccgagcuggacuccuucaaggaggagcucgacaaguacuucaagaaccacaccagccccgacguggaccugggcgacaucuccgggaucaacgccagcgucgugaacauccagaaggagaucgaccgccugaacgagguggccaagaaccucaacgagucccugaucgaccugcaggagcucggcaaguacgagcaguacaucaaguggccgugguacaucuggcugggcuucaucgccgggcugaucgcgaucgucauggugaccaucaugcucugcugcaugaccagcugcugcuccugccugaagggcugcugcagcugcggguccugcugcaaguucgacgaggacgacagcgagcccgugcugaagggcgucaagcuccacuacacgugaggacuagucccuguucccagagcccacuuuuuuuucuuuuuuugaaauaaaauagccugucuuucagaucucaaaggcucuuuucagagccaccaaaaaaaaaaaaaaaaaaaaaaaaaaaaaaaaaaaaaaaaaaaaaaaaaaaaaaaaaaaaaaaaaaaaaaaaaaaaaaaaaaaaaaaaaaaaaaaaaaaaa

SEQ ID NO: 23434 - RNA, 4094 nt, Artificial Sequence
  SARS-CoV-2/Wuhan/WIV05/2019__EPI_ISL_402128 spike protein mRNA gc (1-1273)(Y453F_D614G)
aggagagucccgcagucggcguccagcggcucugcuuguucgugugugugucguugcaggccuuauucaagcuuaccauguucguguuccugguccuccugccccuggugagcucccagugcgugaaccucaccacccgcacgcagcugccgcccgccuacaccaacagcuucacccggggcgucuacuaccccgacaagguguuccgcuccagcgugcugcacuccacccaggaccucuuccugcccuucuucagcaacgucacgugguuccacgccauccacguguccgggaccaacggcaccaagcgguucgacaacccggugcugcccuucaacgacggggucuacuucgcgagcaccgagaaguccaacaucauccgcggcuggaucuucgggacgacccucgacagcaagacccagucccugcugaucgugaacaacgccaccaacguggucaucaaggugugcgaguuccaguucugcaacgaccccuuccucggcguguacuaccacaagaacaacaagagcuggauggaguccgaguuccgggucuacagcuccgccaacaacugcacguucgaguacgugagccagcccuuccugauggaccuggagggcaagcaggggaacuucaagaaccuccgcgaguucguguucaagaacaucgacggcuacuucaagaucuacuccaagcacaccccgaucaaccugguccgggaccugccccagggguucagcgcccucgagccccugguggaccugcccaucggcaucaacaucacccgcuuccagacccuccuggcccugcaccgguccuaccucacgccgggggacagcagcuccggcuggaccgcgggcgccgccgccuacuacgugggguaccugcagccccgcaccuuccugcucaaguacaacgagaacggcaccaucacggacgcggucgacugcgcccuggacccccugagcgagaccaagugcacccucaaguccuucaccguggagaaggggaucuaccagacgagcaacuuccgggugcagcccaccgaguccaucguccgcuucccgaacaucaccaaccugugccccuucggcgagguguucaacgccacccgguucgccagcgucuacgccuggaaccgcaagcggaucuccaacugcguggcggacuacagcgugcuguacaacuccgccagcuucuccacguucaagugcuacggcgucagccccaccaagcucaacgaccugugcuucaccaacguguacgccgacuccuucgugauccgcggggacgagguccggcagaucgcccccggccagaccgggaagaucgccgacuacaacuacaagcugccggacgacuucacgggcugcgugaucgcguggaacagcaacaaccucgacuccaaggucgggggcaacuacaacuaccuguuccgccuguuccgcaagagcaaccucaagcccuucgagcgggacaucuccaccgagaucuaccaggccggcagcacccccugcaacgggguggagggcuucaacugcuacuucccccugcaguccuacggguuccagccgaccaacggcgugggguaccagcccuaccggguggucgugcugagcuucgagcuccugcacgcccccgccacggugugcggccccaagaaguccaccaaccuggucaagaacaagugcgugaacuucaacuucaacggccucaccgggaccggcgugcugaccgagagcaacaagaaguuccugccguuccagcaguucgggcgcgacaucgccgacacgaccgacgcgguccgcgacccccagacccuggagauccucgacaucacccccugcagcuucggcgggguguccgugaucacgccgggcaccaacaccagcaaccaggucgccgugcuguaccagggcgugaacugcaccgagguccccguggccauccacgccgaccagcugacgcccaccuggcggguguacuccaccgggagcaacgucuuccagacccgcgccggcugccucaucggggcggagcacgugaacaacuccuacgagugcgacauccccaucggcgccggcaucugcgccagcuaccagacgcagaccaacuccccgcggcgcgcccggagcguggcgucccagagcaucaucgccuacaccaugucccugggggccgagaacagcgucgccuacuccaacaacagcaucgccauccccaccaacuucacgaucuccgugaccaccgagauccugcccgugagcaugaccaagacgagcgucgacugcaccauguacaucugcggcgacuccaccgagugcagcaaccuccugcugcaguacggguccuucugcacccagcucaaccgcgcgcugacgggcaucgccguggagcaggacaagaacacccaggagguguucgcccaggucaagcagaucuacaagacgcccccgaucaaggacuucgggggcuucaacuucagccagauccugcccgaccccuccaagcccagcaagcgguccuucaucgaggaccuccuguucaacaaggugacccuggccgacgccggcuucaucaagcaguacggggacugccucggcgacaucgcggcccgcgaccugaucugcgcccagaaguucaacgggcugaccgugcucccgccccugcugaccgacgagaugaucgcccaguacaccagcgcccuccuggcgggcaccaucacguccggguggaccuucggcgccggcgccgcccugcagauccccuucgcgaugcagauggccuaccgguucaacgggaucggcgucacccagaacgugcucuacgagaaccagaagcugaucgccaaccaguucaacagcgccaucgggaagauccaggacucccugagcuccaccgccagcgcgcucggcaagcugcaggacguggucaaccagaacgcccaggcccugaacacgcucgugaagcagcuguccagcaacuucggggccaucuccagcgugcugaacgacauccucucccgccuggacaaggucgaggccgaggugcagaucgaccggcugaucaccggccgccuccagagccugcagaccuacgugacccagcagcugauccgggcggccgagauccgcgccagcgccaaccucgccgcgaccaagauguccgagugcguccugggccagagcaagcggguggacuucugcgggaagggcuaccaccugauguccuucccccagagcgccccgcacgggguggucuuccuccacgugacguacguccccgcccaggagaagaacuucaccaccgcccccgcgaucugccacgacggcaaggcccacuucccccgcgaggggguguucguguccaacggcacccacugguucgucacgcagcggaacuucuacgagccgcagaucaucaccaccgacaacaccuucgugagcggcaacugcgacguggucaucgggaucgugaacaacacgguguacgacccccugcagcccgagcuggacuccuucaaggaggagcucgacaaguacuucaagaaccacaccagccccgacgucgaccugggcgacaucuccgggaucaacgccagcguggugaacauccagaaggagaucgaccgccugaacgaggucgccaagaaccucaacgagucccugaucgaccugcaggagcucggcaaguacgagcaguacaucaaguggccgugguacaucuggcugggcuucaucgccgggcugaucgcgaucgugauggugaccaucaugcucugcugcaugaccagcugcugcuccugccugaagggcugcugcagcugcggguccugcugcaaguucgacgaggacgacagcgagcccguccugaagggcgugaagcuccacuacacgugaggacuagucccuguucccagagcccacuuuuuuuucuuuuuuugaaauaaaauagccugucuuucagaucucaaaggcucuuuucagagccaccaaaaaaaaaaaaaaaaaaaaaaaaaaaaaaaaaaaaaaaaaaaaaaaaaaaaaaaaaaaaaaaaaaaaaaaaaaaaaaaaaaaaaaaaaaaaaaaaaaaaa

SEQ ID NO: 23435 - RNA, 4094 nt, Artificial Sequence
  SARS-CoV-2/Wuhan/WIV05/2019__EPI_ISL_402128 spike protein mRNA gc (1-1273)(D614G_I692V)
aggagagucccgcagucggcguccagcggcucugcuuguucgugugugugucguugcaggccuuauucaagcuuaccauguucguguuccugguccuccugccccuggugagcucccagugcgugaaccucaccacccgcacgcagcugccgcccgccuacaccaacagcuucacccggggcgucuacuaccccgacaagguguuccgcuccagcgugcugcacuccacccaggaccucuuccugcccuucuucagcaacgucacgugguuccacgccauccacguguccgggaccaacggcaccaagcgguucgacaacccggugcugcccuucaacgacggggucuacuucgcgagcaccgagaaguccaacaucauccgcggcuggaucuucgggacgacccucgacagcaagacccagucccugcugaucgugaacaacgccaccaacguggucaucaaggugugcgaguuccaguucugcaacgaccccuuccucggcguguacuaccacaagaacaacaagagcuggauggaguccgaguuccgggucuacagcuccgccaacaacugcacguucgaguacgugagccagcccuuccugauggaccuggagggcaagcaggggaacuucaagaaccuccgcgaguucguguucaagaacaucgacggcuacuucaagaucuacuccaagcacaccccgaucaaccugguccgggaccugccccagggguucagcgcccucgagccccugguggaccugcccaucggcaucaacaucacccgcuuccagacccuccuggcccugcaccgguccuaccucacgccgggggacagcagcuccggcuggaccgcgggcgccgccgccuacuacgugggguaccugcagccccgcaccuuccugcucaaguacaacgagaacggcaccaucacggacgcggucgacugcgcccuggacccccugagcgagaccaagugcacccucaaguccuucaccguggagaaggggaucuaccagacgagcaacuuccgggugcagcccaccgaguccaucguccgcuucccgaacaucaccaaccugugccccuucggcgagguguucaacgccacccgguucgccagcgucuacgccuggaaccgcaagcggaucuccaacugcguggcggacuacagcgugcuguacaacuccgccagcuucuccacguucaagugcuacggcgucagccccaccaagcucaacgaccugugcuucaccaacguguacgccgacuccuucgugauccgcggggacgagguccggcagaucgcccccggccagaccgggaagaucgccgacuacaacuacaagcugccggacgacuucacgggcugcgugaucgcguggaacagcaacaaccucgacuccaaggucgggggcaacuacaacuaccuguaccgccuguuccgcaagagcaaccucaagcccuucgagcgggacaucuccaccgagaucuaccaggccggcagcacccccugcaacgggguggagggcuucaacugcuacuucccccugcaguccuacggguuccagccgaccaacggcgugggguaccagcccuaccggguggucgugcugagcuucgagcuccugcacgcccccgccacggugugcggccccaagaaguccaccaaccuggucaagaacaagugcgugaacuucaacuucaacggccucaccgggaccggcgugcugaccgagagcaacaagaaguuccugccguuccagcaguucgggcgcgacaucgccgacacgaccgacgcgguccgcgacccccagacccuggagauccucgacaucacccccugcagcuucggcgggguguccgugaucacgccgggcaccaacaccagcaaccaggucgccgugcuguaccagggcgugaacugcaccgagguccccguggccauccacgccgaccagcugacgcccaccuggcggguguacuccaccgggagcaacgucuuccagacccgcgccggcugccucaucggggcggagcacgugaacaacuccuacgagugcgacauccccaucggcgccggcaucugcgccagcuaccagacgcagaccaacuccccgcggcgcgcccggagcguggcgucccagagcgucaucgccuacaccaugucccugggggccgagaacagcguggccuacuccaacaacagcaucgccauccccaccaacuucacgaucuccgugaccaccgagauccugcccgucagcaugaccaagacgagcguggacugcaccauguacaucugcggcgacuccaccgagugcagcaaccuccugcugcaguacggguccuucugcacccagcucaaccgcgcgcugacgggcaucgccguggagcaggacaagaacacccaggaggucuucgcccaggugaagcagaucuacaagacgcccccgaucaaggacuucgggggcuucaacuucagccagauccugcccgaccccuccaagcccagcaagcgguccuucaucgaggaccuccuguucaacaaggugacccuggccgacgccggcuucaucaagcaguacggggacugccucggcgacaucgcggcccgcgaccugaucugcgcccagaaguucaacgggcugaccguccucccgccccugcugaccgacgagaugaucgcccaguacaccagcgcccuccuggcgggcaccaucacguccggguggaccuucggcgccggcgccgcccugcagauccccuucgcgaugcagauggccuaccgguucaacgggaucggcgugacccagaacgugcucuacgagaaccagaagcugaucgccaaccaguucaacagcgccaucgggaagauccaggacucccugagcuccaccgccagcgcgcucggcaagcugcaggacgucgugaaccagaacgcccaggcccugaacacgcucgugaagcagcuguccagcaacuucggggccaucuccagcguccugaacgacauccucucccgccuggacaagguggaggccgaggugcagaucgaccggcugaucaccggccgccuccagagccugcagaccuacgucacccagcagcugauccgggcggccgagauccgcgccagcgccaaccucgccgcgaccaagauguccgagugcgugcugggccagagcaagcggguggacuucugcgggaagggcuaccaccugauguccuucccccagagcgccccgcacggggucguguuccuccacgucacguacgugcccgcccaggagaagaacuucaccaccgcccccgcgaucugccacgacggcaaggcccacuucccccgcgaggggguguucgucuccaacggcacccacugguucgugacgcagcggaacuucuacgagccgcagaucaucaccaccgacaacaccuucgugagcggcaacugcgacgucgugaucgggaucgugaacaacacggucuacgacccccugcagcccgagcuggacuccuucaaggaggagcucgacaaguacuucaagaaccacaccagccccgacguggaccugggcgacaucuccgggaucaacgccagcguggucaacauccagaaggagaucgaccgccugaacgagguggccaagaaccucaacgagucccugaucgaccugcaggagcucggcaaguacgagcaguacaucaaguggccgugguacaucuggcugggcuucaucgccgggcugaucgcgaucgugauggucaccaucaugcucugcugcaugaccagcugcugcuccugccugaagggcugcugcagcugcggguccugcugcaaguucgacgaggacgacagcgagcccgugcugaagggcgugaagcuccacuacacgugaggacuagucccuguucccagagcccacuuuuuuuucuuuuuuugaaauaaaauagccugucuuucagaucucaaaggcucuuuucagagccaccaaaaaaaaaaaaaaaaaaaaaaaaaaaaaaaaaaaaaaaaaaaaaaaaaaaaaaaaaaaaaaaaaaaaaaaaaaaaaaaaaaaaaaaaaaaaaaaaaaaaa

SEQ ID NO: 23436 - RNA, 4094 nt, Artificial Sequence; identical to SEQ ID NO: 12324
  SARS-CoV-2/Wuhan/WIV05/2019__EPI_ISL_402128 spike protein mRNA gc (1-1273)(D614G_M1229I)

SEQ ID NO: 23437 - RNA, 4088 nt, Artificial Sequence
  SARS-CoV-2/Wuhan/WIV05/2019__EPI_ISL_402128 spike protein mRNA gc (1-1273)(H69del_V70del_A222V_Y453F_S477N_D614G_I692V)
aggagagucccgcagucggcguccagcggcucugcuuguucgugugugugucguugcaggccuuauucaagcuuaccauguucguguuccugguccuccugccccuggugagcucccagugcgugaaccucaccacccgcacgcagcugccgcccgccuacaccaacagcuucacccggggcgucuacuaccccgacaagguguuccgcuccagcgugcugcacuccacccaggaccucuuccugcccuucuucagcaacgucacgugguuccacgccaucuccgggaccaacggcaccaagcgguucgacaacccggugcugcccuucaacgacgggguguacuucgcgagcaccgagaaguccaacaucauccgcggcuggaucuucgggacgacccucgacagcaagacccagucccugcugaucgucaacaacgccaccaacguggugaucaaggucugcgaguuccaguucugcaacgaccccuuccucggcguguacuaccacaagaacaacaagagcuggauggaguccgaguuccggguguacagcuccgccaacaacugcacguucgaguacgucagccagcccuuccugauggaccuggagggcaagcaggggaacuucaagaaccuccgcgaguucguguucaagaacaucgacggcuacuucaagaucuacuccaagcacaccccgaucaaccuggugcgggaccugccccagggguucagcguccucgagccccugguggaccugcccaucggcaucaacaucacccgcuuccagacccuccuggcccugcaccgguccuaccucacgccgggggacagcagcuccggcuggaccgccggcgcggccgccuacuacgugggguaccugcagccccgcaccuuccugcucaaguacaacgagaacggcaccaucacggacgccgucgacugcgcgcuggacccccugagcgagaccaagugcacccucaaguccuucaccguggagaaggggaucuaccagacgagcaacuuccgggugcagcccaccgaguccaucguccgcuucccgaacaucaccaaccugugccccuucggcgagguguucaacgccacccgguucgccagcgucuacgccuggaaccgcaagcggaucuccaacugcguggccgacuacagcgugcuguacaacuccgcgagcuucuccacguucaagugcuacggcgucagccccaccaagcucaacgaccugugcuucaccaacguguacgccgacuccuucgugauccgcggggacgagguccggcagaucgcccccggccagaccgggaagaucgccgacuacaacuacaagcugccggacgacuucacgggcugcgugaucgccuggaacagcaacaaccucgacuccaaggucgggggcaacuacaacuaccuguuccgccuguuccgcaagagcaaccucaagcccuucgagcgggacaucuccaccgagaucuaccaggcgggcaacacccccugcaacgggguggagggcuucaacugcuacuucccccugcagagcuacggguuccagccgaccaacggcgugggguaccagcccuaccggguggucgugcuguccuucgagcuccugcacgcccccgccacggugugcggccccaagaaguccaccaaccuggucaagaacaagugcgugaacuucaacuucaacggccucaccgggaccggcgugcugaccgagagcaacaagaaguuccugccguuccagcaguucgggcgcgacaucgccgacacgaccgacgccguccgcgacccccagacccuggagauccucgacaucacccccugcagcuucggcggggugagcgugaucacgccgggcaccaacaccuccaaccaggucgcggugcuguaccagggcgugaacugcaccgagguccccguggccauccacgccgaccagcugacgcccaccuggcggguguacagcaccggguccaacgucuuccagacccgcgccggcugccucaucggggccgagcacgugaacaacagcuacgagugcgacauccccaucggcgcgggcaucugcgccuccuaccagacgcagaccaacagcccgcggcgcgcccgguccguggccagccaguccgucaucgcguacaccaugagccugggggccgagaacuccguggccuacagcaacaacuccaucgccauccccaccaacuucacgaucagcgugaccaccgagauccugcccgucuccaugaccaagacgagcguggacugcaccauguacaucugcggcgacagcaccgagugcuccaaccuccugcugcaguacgggagcuucugcacccagcucaaccgcgcccugacgggcaucgcgguggagcaggacaagaacacccaggaggucuucgcccaggugaagcagaucuacaagacgcccccgaucaaggacuucgggggcuucaacuucucccagauccugcccgaccccagcaagcccuccaagcggagcuucaucgaggaccuccuguucaacaaggugacccuggccgacgccggcuucaucaagcaguacggggacugccucggcgacaucgccgcgcgcgaccugaucugcgcccagaaguucaacgggcugaccguccucccgccccugcugaccgacgagaugaucgcccaguacaccuccgcccuccuggccggcaccaucacgagcggguggaccuucggcgcgggcgccgcccugcagauccccuucgccaugcagauggcguaccgguucaacgggaucggcgugacccagaacgugcucuacgagaaccagaagcugaucgccaaccaguucaacuccgccaucgggaagauccaggacagccuguccagcaccgccuccgcccucggcaagcugcaggacgucgugaaccagaacgcgcaggcccugaacacgcucgugaagcagcugagcuccaacuucggggccaucagcuccguccugaacgacauccucagccgccuggacaagguggaggccgaggugcagaucgaccggcugaucaccggccgccuccagucccugcagaccuacgucacccagcagcugauccgggccgcggagauccgcgccagcgccaaccucgccgccaccaagaugagcgagugcgugcugggccaguccaagcggguggacuucugcgggaagggcuaccaccugaugagcuucccccaguccgcgccgcacggggucguguuccuccacgucacguacgugcccgcccaggagaagaacuucaccaccgcccccgccaucugccacgacggcaaggcgcacuucccccgcgaggggguguucgucagcaacggcacccacugguucgugacgcagcggaacuucuacgagccgcagaucaucaccaccgacaacaccuucguguccggcaacugcgacgucgugaucgggaucgugaacaacacggucuacgacccccugcagcccgagcuggacagcuucaaggaggagcucgacaaguacuucaagaaccacaccucccccgacguggaccugggcgacaucagcgggaucaacgccuccguggucaacauccagaaggagaucgaccgccugaacgagguggccaagaaccucaacgagagccugaucgaccugcaggagcucggcaaguacgagcaguacaucaaguggccgugguacaucuggcugggcuucaucgccgggcugaucgccaucgugauggucaccaucaugcucugcugcaugaccuccugcugcagcugccugaagggcugcugcuccugcgggagcugcugcaaguucgacgaggacgacuccgagcccgugcugaagggcgugaagcuccacuacacgugaggacuagucccuguucccagagcccacuuuuuuuucuuuuuuugaaauaaaauagccugucuuucagaucucaaaggcucuuuucagagccaccaaaaaaaaaaaaaaaaaaaaaaaaaaaaaaaaaaaaaaaaaaaaaaaaaaaaaaaaaaaaaaaaaaaaaaaaaaaaaaaaaaaaaaaaaaaaaaaaaaaaa

SEQ ID NO: 23438 - RNA, 4088 nt, Artificial Sequence
  SARS-CoV-2/Wuhan/WIV05/2019__EPI_ISL_402128 spike protein mRNA gc (1-1273)(H69del_V70del_Y453F_D614G_I692V_M1229I)
aggagagucccgcagucggcguccagcggcucugcuuguucgugugugugucguugcaggccuuauucaagcuuaccauguucguguuccugguccuccugccccuggugagcucccagugcgugaaccucaccacccgcacgcagcugccgcccgccuacaccaacagcuucacccggggcgucuacuaccccgacaagguguuccgcuccagcgugcugcacuccacccaggaccucuuccugcccuucuucagcaacgucacgugguuccacgccaucuccgggaccaacggcaccaagcgguucgacaacccggugcugcccuucaacgacgggguguacuucgcgagcaccgagaaguccaacaucauccgcggcuggaucuucgggacgacccucgacagcaagacccagucccugcugaucgucaacaacgccaccaacguggugaucaaggucugcgaguuccaguucugcaacgaccccuuccucggcguguacuaccacaagaacaacaagagcuggauggaguccgaguuccggguguacagcuccgccaacaacugcacguucgaguacgucagccagcccuuccugauggaccuggagggcaagcaggggaacuucaagaaccuccgcgaguucguguucaagaacaucgacggcuacuucaagaucuacuccaagcacaccccgaucaaccuggugcgggaccugccccagggguucagcgcccucgagccccuggucgaccugcccaucggcaucaacaucacccgcuuccagacccuccuggcccugcaccgguccuaccucacgccgggggacagcagcuccggcuggaccgcgggcgccgccgccuacuacgugggguaccugcagccccgcaccuuccugcucaaguacaacgagaacggcaccaucacggacgcgguggacugcgcccuggacccccugagcgagaccaagugcacccucaaguccuucaccgucgagaaggggaucuaccagacgagcaacuuccgggugcagcccaccgaguccaucgugcgcuucccgaacaucaccaaccugugccccuucggcgaggucuucaacgccacccgguucgccagcguguacgccuggaaccgcaagcggaucuccaacugcgucgcggacuacagcgugcuguacaacuccgccagcuucuccacguucaagugcuacggcgugagccccaccaagcucaacgaccugugcuucaccaacgucuacgccgacuccuucgugauccgcggggacgaggugcggcagaucgcccccggccagaccgggaagaucgccgacuacaacuacaagcugccggacgacuucacgggcugcgucaucgcguggaacagcaacaaccucgacuccaaggucgggggcaacuacaacuaccuguuccgccuguuccgcaagagcaaccucaagcccuucgagcgggacaucuccaccgagaucuaccaggccggcagcacccccugcaacgggguggagggcuucaacugcuacuucccccugcaguccuacggguuccagccgaccaacggcgugggguaccagcccuaccggguggugguccugagcuucgagcuccugcacgcccccgccacggugugcggccccaagaaguccaccaaccuggugaagaacaagugcgucaacuucaacuucaacggccucaccgggaccggcgugcugaccgagagcaacaagaaguuccugccguuccagcaguucgggcgcgacaucgccgacacgaccgacgcggugcgcgacccccagacccuggagauccucgacaucacccccugcagcuucggcggggucuccgugaucacgccgggcaccaacaccagcaaccagguggccguccuguaccagggcgugaacugcaccgaggugcccgucgccauccacgccgaccagcugacgcccaccuggcggguguacuccaccgggagcaacguguuccagacccgcgccggcugccucaucggggcggagcacgucaacaacuccuacgagugcgacauccccaucggcgccggcaucugcgccagcuaccagacgcagaccaacuccccgcggcgcgcccggagcguggcgucccagagcgugaucgccuacaccaugucccugggggccgagaacagcgucgccuacuccaacaacagcaucgccauccccaccaacuucacgaucuccgugaccaccgagauccugcccgugagcaugaccaagacgagcgucgacugcaccauguacaucugcggcgacuccaccgagugcagcaaccuccugcugcaguacggguccuucugcacccagcucaaccgcgcgcugacgggcaucgccguggagcaggacaagaacacccaggagguguucgcccaggucaagcagaucuacaagacgcccccgaucaaggacuucgggggcuucaacuucagccagauccugcccgaccccuccaagcccagcaagcgguccuucaucgaggaccuccuguucaacaaggugacccuggccgacgccggcuucaucaagcaguacggggacugccucggcgacaucgcggcccgcgaccugaucugcgcccagaaguucaacgggcugaccgugcucccgccccugcugaccgacgagaugaucgcccaguacaccagcgcccuccuggcgggcaccaucacguccggguggaccuucggcgccggcgccgcccugcagauccccuucgcgaugcagauggccuaccgguucaacgggaucggcgucacccagaacgugcucuacgagaaccagaagcugaucgccaaccaguucaacagcgccaucgggaagauccaggacucccugagcuccaccgccagcgcgcucggcaagcugcaggacguggucaaccagaacgcccaggcccugaacacgcucgugaagcagcuguccagcaacuucggggccaucuccagcgugcugaacgacauccucucccgccuggacaaggucgaggccgaggugcagaucgaccggcugaucaccggccgccuccagagccugcagaccuacgugacccagcagcugauccgggcggccgagauccgcgccagcgccaaccucgccgcgaccaagauguccgagugcguccugggccagagcaagcggguggacuucugcgggaagggcuaccaccugauguccuucccccagagcgccccgcacgggguggucuuccuccacgugacguacguccccgcccaggagaagaacuucaccaccgcccccgcgaucugccacgacggcaaggcccacuucccccgcgaggggguguucguguccaacggcacccacugguucgucacgcagcggaacuucuacgagccgcagaucaucaccaccgacaacaccuucgugagcggcaacugcgacguggucaucgggaucgugaacaacacgguguacgacccccugcagcccgagcuggacuccuucaaggaggagcucgacaaguacuucaagaaccacaccagccccgacgucgaccugggcgacaucuccgggaucaacgccagcguggugaacauccagaaggagaucgaccgccugaacgaggucgccaagaaccucaacgagucccugaucgaccugcaggagcucggcaaguacgagcaguacaucaaguggccgugguacaucuggcugggcuucaucgccgggcugaucgcgaucgugaucgugaccaucaugcucugcugcaugaccagcugcugcuccugccugaagggcugcugcagcugcggguccugcugcaaguucgacgaggacgacagcgagcccguccugaagggcgugaagcuccacuacacgugaggacuagucccuguucccagagcccacuuuuuuuucuuuuuuugaaauaaaauagccugucuuucagaucucaaaggcucuuuucagagccaccaaaaaaaaaaaaaaaaaaaaaaaaaaaaaaaaaaaaaaaaaaaaaaaaaaaaaaaaaaaaaaaaaaaaaaaaaaaaaaaaaaaaaaaaaaaaaaaaaaaaa

SEQ ID NO: 23439 - RNA, 4085 nt, Artificial Sequence
  SARS-CoV-2/Wuhan/WIV05/2019__EPI_ISL_402128 spike protein mRNA gc (1-1273)(H69del_V70del_Y144del_N501Y_A570D_D614G_P681H_T716I_S982 A_D1118H)
aggagagucccgcagucggcguccagcggcucugcuuguucgugugugugucguugcaggccuuauucaagcuuaccauguucguguuccugguccuccugccccuggugagcucccagugcgugaaccucaccacccgcacgcagcugccgcccgccuacaccaacagcuucacccggggcgucuacuaccccgacaagguguuccgcuccagcgugcugcacuccacccaggaccucuuccugcccuucuucagcaacgucacgugguuccacgccaucuccgggaccaacggcaccaagcgguucgacaacccggugcugcccuucaacgacgggguguacuucgcgagcaccgagaaguccaacaucauccgcggcuggaucuucgggacgacccucgacagcaagacccagucccugcugaucgucaacaacgccaccaacguggugaucaaggucugcgaguuccaguucugcaacgaccccuuccucggcguguaccacaagaacaacaagagcuggauggaguccgaguuccggguguacagcuccgccaacaacugcacguucgaguacgucagccagcccuuccugauggaccuggagggcaagcaggggaacuucaagaaccuccgcgaguucguguucaagaacaucgacggcuacuucaagaucuacuccaagcacaccccgaucaaccuggugcgggaccugccccagggguucagcgcccucgagccccuggucgaccugcccaucggcaucaacaucacccgcuuccagacccuccuggcccugcaccgguccuaccucacgccgggggacagcagcuccggcuggaccgcgggcgccgccgccuacuacgugggguaccugcagccccgcaccuuccugcucaaguacaacgagaacggcaccaucacggacgcgguggacugcgcccuggacccccugagcgagaccaagugcacccucaaguccuucaccgucgagaaggggaucuaccagacgagcaacuuccgggugcagcccaccgaguccaucgugcgcuucccgaacaucaccaaccugugccccuucggcgaggucuucaacgccacccgguucgccagcguguacgccuggaaccgcaagcggaucuccaacugcgucgcggacuacagcgugcuguacaacuccgccagcuucuccacguucaagugcuacggcgugagccccaccaagcucaacgaccugugcuucaccaacgucuacgccgacuccuucgugauccgcggggacgaggugcggcagaucgcccccggccagaccgggaagaucgccgacuacaacuacaagcugccggacgacuucacgggcugcgucaucgcguggaacagcaacaaccucgacuccaaggucgggggcaacuacaacuaccuguaccgccuguuccgcaagagcaaccucaagcccuucgagcgggacaucuccaccgagaucuaccaggccggcagcacccccugcaacgggguggagggcuucaacugcuacuucccccugcaguccuacggguuccagccgaccuacggcgugggguaccagcccuaccggguggugguccugagcuucgagcuccugcacgcccccgccacggugugcggccccaagaaguccaccaaccuggugaagaacaagugcgucaacuucaacuucaacggccucaccgggaccggcgugcugaccgagagcaacaagaaguuccugccguuccagcaguucgggcgcgacaucgacgacacgaccgacgccgugcgcgacccccagacccuggagauccucgacaucacccccugcagcuucggcggggucuccgugaucacgccgggcaccaacaccagcaaccagguggcgguccuguaccagggcgugaacugcaccgaggugcccgucgccauccacgccgaccagcugacgcccaccuggcggguguacuccaccgggagcaacguguuccagacccgcgccggcugccucaucggggccgagcacgucaacaacuccuacgagugcgacauccccaucggcgcgggcaucugcgccagcuaccagacgcagaccaacucccaccggcgcgcccggagcguggccucccagagcaucaucgcguacaccaugucccugggggccgagaacagcguggccuacuccaacaacagcaucgccaucccgaucaacuucaccaucuccgucacgaccgagauccugcccgugagcaugaccaagaccagcguggacugcacgauguacaucugcggcgacuccaccgagugcagcaaccuccugcugcaguacggguccuucugcacccagcucaaccgcgcccugaccggcaucgcggucgagcaggacaagaacacgcaggagguguucgcccaggugaagcagaucuacaagaccccgcccaucaaggacuucgggggcuucaacuucagccagauccugcccgaccccuccaagcccagcaagcgguccuucaucgaggaccuccuguucaacaaggucacccuggccgacgccggcuucaucaagcaguacggggacugccucggcgacaucgccgcgcgcgaccugaucugcgcccagaaguucaacgggcugaccgugcugcccccgcuccugacggacgagaugaucgcccaguacaccagcgcccuccuggccggcaccaucaccuccggguggacguucggcgcgggcgccgcccugcagauccccuucgccaugcagauggcguaccgguucaacgggaucggcgugacccagaacguccucuacgagaaccagaagcugaucgccaaccaguucaacagcgccaucgggaagauccaggacucccugagcuccaccgccagcgcccucggcaagcugcaggacguggugaaccagaacgcgcaggcccugaacacccucgucaagcagcuguccagcaacuucggggccaucuccagcgugcugaacgacauccucgcccgccuggacaagguggaggccgagguccagaucgaccggcugaucacgggccgccuccagucccugcagaccuacgugacccagcagcugauccgggcggccgagauccgcgccagcgccaaccucgccgcgaccaagaugagcgagugcgugcugggccaguccaagcgggucgacuucugcgggaagggcuaccaccugaugagcuucccccaguccgcgccccacggggugguguuccuccacgucaccuacgugccggcccaggagaagaacuucacgaccgcccccgccaucugccacgacggcaaggcccacuucccccgcgagggggucuucgugagcaacggcacccacugguucgugacccagcggaacuucuacgagccccagaucaucacgacccacaacaccuucgucuccggcaacugcgacguggugaucgggaucgucaacaacaccguguacgacccgcugcagcccgagcuggacagcuucaaggaggagcucgacaaguacuucaagaaccacacgucccccgacguggaccugggcgacaucagcgggaucaacgccuccgucgugaacauccagaaggagaucgaccgccugaacgagguggccaagaaccucaacgagagccugaucgaccugcaggagcucggcaaguacgagcaguacaucaaguggcccugguacaucuggcugggcuucaucgccgggcugaucgcgaucgucauggugaccaucaugcucugcugcaugaccuccugcugcagcugccugaagggcugcugcuccugcgggagcugcugcaaguucgacgaggacgacuccgagccggugcugaagggcgucaagcuccacuacaccugaggacuagucccuguucccagagcccacuuuuuuuucuuuuuuugaaauaaaauagccugucuuucagaucucaaaggcucuuuucagagccaccaaaaaaaaaaaaaaaaaaaaaaaaaaaaaaaaaaaaaaaaaaaaaaaaaaaaaaaaaaaaaaaaaaaaaaaaaaaaaaaaaaaaaaaaaaaaaaaaaaaaa

SEQ ID NO: 23440 - RNA, 4094 nt, Artificial Sequence
  SARS-CoV-2/Wuhan/WIV05/2019__EPI_ISL_402128 spike protein mRNA gc (1-1273)(K417N_E484K_N501Y_D614G)
aggagagucccgcagucggcguccagcggcucugcuuguucgugugugugucguugcaggccuuauucaagcuuaccauguucguguuccugguccuccugccccuggugagcucccagugcgugaaccucaccacccgcacgcagcugccgcccgccuacaccaacagcuucacccggggcgucuacuaccccgacaagguguuccgcuccagcgugcugcacuccacccaggaccucuuccugcccuucuucagcaacgucacgugguuccacgccauccacguguccgggaccaacggcaccaagcgguucgacaacccggugcugcccuucaacgacggggucuacuucgcgagcaccgagaaguccaacaucauccgcggcuggaucuucgggacgacccucgacagcaagacccagucccugcugaucgugaacaacgccaccaacguggucaucaaggugugcgaguuccaguucugcaacgaccccuuccucggcguguacuaccacaagaacaacaagagcuggauggaguccgaguuccgggucuacagcuccgccaacaacugcacguucgaguacgugagccagcccuuccugauggaccuggagggcaagcaggggaacuucaagaaccuccgcgaguucguguucaagaacaucgacggcuacuucaagaucuacuccaagcacaccccgaucaaccugguccgggaccugccccagggguucagcgcccucgagccccugguggaccugcccaucggcaucaacaucacccgcuuccagacccuccuggcccugcaccgguccuaccucacgccgggggacagcagcuccggcuggaccgcgggcgccgccgccuacuacgugggguaccugcagccccgcaccuuccugcucaaguacaacgagaacggcaccaucacggacgcggucgacugcgcccuggacccccugagcgagaccaagugcacccucaaguccuucaccguggagaaggggaucuaccagacgagcaacuuccgggugcagcccaccgaguccaucguccgcuucccgaacaucaccaaccugugccccuucggcgagguguucaacgccacccgguucgccagcgucuacgccuggaaccgcaagcggaucuccaacugcguggcggacuacagcgugcuguacaacuccgccagcuucuccacguucaagugcuacggcgucagccccaccaagcucaacgaccugugcuucaccaacguguacgccgacuccuucgugauccgcggggacgagguccggcagaucgcccccggccagaccgggaacaucgccgacuacaacuacaagcugccggacgacuucacgggcugcgugaucgcguggaacagcaacaaccucgacuccaaggucgggggcaacuacaacuaccuguaccgccuguuccgcaagagcaaccucaagcccuucgagcgggacaucuccaccgagaucuaccaggccggcagcacccccugcaacggggugaagggcuucaacugcuacuucccccugcaguccuacggguuccagccgaccuacggcgugggguaccagcccuaccggguggucgugcugagcuucgagcuccugcacgcccccgccacggugugcggccccaagaaguccaccaaccuggucaagaacaagugcgugaacuucaacuucaacggccucaccgggaccggcgugcugaccgagagcaacaagaaguuccugccguuccagcaguucgggcgcgacaucgccgacacgaccgacgcgguccgcgacccccagacccuggagauccucgacaucacccccugcagcuucggcgggguguccgugaucacgccgggcaccaacaccagcaaccaggucgccgugcuguaccagggcgugaacugcaccgagguccccguggccauccacgccgaccagcugacgcccaccuggcggguguacuccaccgggagcaacgucuuccagacccgcgccggcugccucaucggggcggagcacgugaacaacuccuacgagugcgacauccccaucggcgccggcaucugcgccagcuaccagacgcagaccaacuccccgcggcgcgcccggagcguggcgucccagagcaucaucgccuacaccaugucccugggggccgagaacagcgucgccuacuccaacaacagcaucgccauccccaccaacuucacgaucuccgugaccaccgagauccugcccgugagcaugaccaagacgagcgucgacugcaccauguacaucugcggcgacuccaccgagugcagcaaccuccugcugcaguacggguccuucugcacccagcucaaccgcgcgcugacgggcaucgccguggagcaggacaagaacacccaggagguguucgcccaggucaagcagaucuacaagacgcccccgaucaaggacuucgggggcuucaacuucagccagauccugcccgaccccuccaagcccagcaagcgguccuucaucgaggaccuccuguucaacaaggugacccuggccgacgccggcuucaucaagcaguacggggacugccucggcgacaucgcggcccgcgaccugaucugcgcccagaaguucaacgggcugaccgugcucccgccccugcugaccgacgagaugaucgcccaguacaccagcgcccuccuggcgggcaccaucacguccggguggaccuucggcgccggcgccgcccugcagauccccuucgcgaugcagauggccuaccgguucaacgggaucggcgucacccagaacgugcucuacgagaaccagaagcugaucgccaaccaguucaacagcgccaucgggaagauccaggacucccugagcuccaccgccagcgcgcucggcaagcugcaggacguggucaaccagaacgcccaggcccugaacacgcucgugaagcagcuguccagcaacuucggggccaucuccagcgugcugaacgacauccucucccgccuggacaaggucgaggccgaggugcagaucgaccggcugaucaccggccgccuccagagccugcagaccuacgugacccagcagcugauccgggcggccgagauccgcgccagcgccaaccucgccgcgaccaagauguccgagugcguccugggccagagcaagcggguggacuucugcgggaagggcuaccaccugauguccuucccccagagcgccccgcacgggguggucuuccuccacgugacguacguccccgcccaggagaagaacuucaccaccgcccccgcgaucugccacgacggcaaggcccacuucccccgcgaggggguguucguguccaacggcacccacugguucgucacgcagcggaacuucuacgagccgcagaucaucaccaccgacaacaccuucgugagcggcaacugcgacguggucaucgggaucgugaacaacacgguguacgacccccugcagcccgagcuggacuccuucaaggaggagcucgacaaguacuucaagaaccacaccagccccgacgucgaccugggcgacaucuccgggaucaacgccagcguggugaacauccagaaggagaucgaccgccugaacgaggucgccaagaaccucaacgagucccugaucgaccugcaggagcucggcaaguacgagcaguacaucaaguggccgugguacaucuggcugggcuucaucgccgggcugaucgcgaucgugauggugaccaucaugcucugcugcaugaccagcugcugcuccugccugaagggcugcugcagcugcggguccugcugcaaguucgacgaggacgacagcgagcccguccugaagggcgugaagcuccacuacacgugaggacuagucccuguucccagagcccacuuuuuuuucuuuuuuugaaauaaaauagccugucuuucagaucucaaaggcucuuuucagagccaccaaaaaaaaaaaaaaaaaaaaaaaaaaaaaaaaaaaaaaaaaaaaaaaaaaaaaaaaaaaaaaaaaaaaaaaaaaaaaaaaaaaaaaaaaaaaaaaaaaaaa

SEQ ID NO: 23441 - RNA, 4085 nt, Artificial Sequence
  SARS-CoV-2/Wuhan/WIV05/2019__EPI_ISL_402128 spike protein mRNA gc (1-1273)(L18F_D80A_D215G_L242del_A243del_L244del_R246I_K417N_E484 K_N501Y_D614G_A701V)
aggagagucccgcagucggcguccagcggcucugcuuguucgugugugugucguugcaggccuuauucaagcuuaccauguucguguuccugguccuccugccccuggugagcucccagugcgugaacuucaccacccgcacgcagcucccgcccgccuacaccaacagcuucacccggggcgucuacuaccccgacaagguguuccgcuccagcgugcugcacuccacccaggaccuguuccuccccuucuucagcaacgucacgugguuccacgccauccacguguccgggaccaacggcaccaagcgguucgcgaacccggugcugcccuucaacgacggggucuacuucgccagcaccgagaaguccaacaucauccgcggcuggaucuucgggacgacccuggacagcaagacccagucccuccugaucgugaacaacgccaccaacguggucaucaaggugugcgaguuccaguucugcaacgaccccuuccugggcguguacuaccacaagaacaacaagagcuggauggaguccgaguuccgggucuacagcuccgccaacaacugcacguucgaguacgugagccagcccuuccucauggaccuggagggcaagcaggggaacuucaagaaccugcgcgaguucguguucaagaacaucgacggcuacuucaagaucuacuccaagcacaccccgaucaaccucguccgggggcugccccagggcuucagcgcccuggagccccucguggaccugcccaucgggaucaacaucacccgcuuccagacccugcacaucuccuaccucacgccgggcgacagcagcuccggcuggaccgcgggggccgccgccuacuacgugggcuaccugcagccccggaccuuccugcucaaguacaacgagaacgggaccaucacggacgcggucgacugcgcccuggacccccugagcgagaccaagugcacccucaaguccuucaccguggagaagggcaucuaccagacgagcaacuuccgcgugcagcccaccgaguccaucguccgguucccgaacaucaccaaccugugccccuucggcgagguguucaacgccacccgcuucgccagcgucuacgccuggaaccggaagcgcaucuccaacugcguggcggacuacagcgugcuguacaacuccgccagcuucuccacguucaagugcuacggggucagccccaccaagcucaacgaccugugcuucaccaacguguacgccgacuccuucgugauccggggcgacgagguccgccagaucgcccccgggcagaccggcaacaucgccgacuacaacuacaagcugccggacgacuucacggggugcgugaucgcguggaacagcaacaaccucgacuccaaggugggcggcaacuacaacuaccuguaccggcuguuccgcaagagcaaccucaagcccuucgagcgggacaucuccaccgagaucuaccaggccgggagcacccccugcaacggcgucaagggguucaacugcuacuucccccugcaguccuacggcuuccagccgaccuacggggugggcuaccagcccuaccgcguggucgugcugagcuucgagcuccugcacgcccccgccacggugugcggccccaagaaguccaccaaccuggucaagaacaagugcgugaacuucaacuucaacgggcucaccggcaccggggugcugaccgagagcaacaagaaguuccugccguuccagcaguucggccgggacaucgccgacacgaccgacgcgguccgcgacccccagacccucgagauccuggacaucacccccugcagcuucgggggcguguccgugaucacgccgggcaccaacaccagcaaccaggucgccgugcuguaccagggggugaacugcaccgagguccccguggccauccacgccgaccagcugacgcccaccuggcgcguguacuccaccggcagcaacgucuuccagacccgggccgggugccucaucggcgcggagcacgugaacaacuccuacgagugcgacauccccaucggcgccgggaucugcgccagcuaccagacgcagaccaacuccccgcgccgggcccgcagcguggcgucccagagcaucaucgccuacaccaugucccugggcgucgagaacagcguggccuacuccaacaacagcaucgccauccccaccaacuucacgaucuccgugaccaccgagauccugcccgucagcaugaccaagacgagcguggacugcaccauguacaucugcggggacuccaccgagugcagcaaccuccugcugcaguacggcuccuucugcacccagcucaaccgggcccugacggggaucgcgguggagcaggacaagaacacccaggaggucuucgcccaggugaagcagaucuacaagacgcccccgaucaaggacuucggcggcuucaacuucagccagauccugcccgaccccuccaagcccagcaagcgcuccuucaucgaggaccuccuguucaacaaggugacccuggccgacgccggguucaucaagcaguacggcgacugccucggggacaucgccgcgcgggaccugaucugcgcccagaaguucaacggccugaccguccucccgccccugcugaccgacgagaugaucgcccaguacaccagcgcccuccuggccgggaccaucacguccggcuggaccuucggcgcgggggccgcccugcagauccccuucgccaugcagauggcguaccgcuucaacggcaucggggugacccagaacgugcucuacgagaaccagaagcugaucgccaaccaguucaacagcgccaucggcaagauccaggacucccugagcuccaccgccagcgcccucgggaagcugcaggacgucgugaaccagaacgcgcaggcccugaacacgcucgugaagcagcuguccagcaacuucggcgccaucuccagcguccugaacgacauccucucccggcuggacaagguggaggccgaggugcagaucgaccgccugaucaccggccggcuccagagccugcagaccuacgucacccagcagcugauccgcgccgcggagauccgggccagcgccaaccucgccgccaccaagauguccgagugcgugcuggggcagagcaagcgcguggacuucugcggcaagggguaccaccugauguccuucccccagagcgcgccgcacggcgucguguuccuccacgucacguacgugcccgcccaggagaagaacuucaccaccgcccccgccaucugccacgacgggaaggcgcacuucccccgggagggcguguucgucuccaacggcacccacugguucgugacgcagcgcaacuucuacgagccgcagaucaucaccaccgacaacaccuucgugagcgggaacugcgacgucgugaucggcaucgugaacaacacggucuacgacccccugcagcccgagcuggacuccuucaaggaggagcucgacaaguacuucaagaaccacaccagccccgacguggaccugggggacaucuccggcaucaacgccagcguggucaacauccagaaggagaucgaccggcugaacgagguggccaagaaccucaacgagucccugaucgaccugcaggagcucggcaaguacgagcaguacaucaaguggccgugguacaucuggcugggguucaucgccggccugaucgccaucgugauggucaccaucaugcucugcugcaugaccagcugcugcuccugccugaaggggugcugcagcugcggcuccugcugcaaguucgacgaggacgacagcgagcccgugcugaagggggugaagcuccacuacacgugaggacuagucccuguucccagagcccacuuuuuuuucuuuuuuugaaauaaaauagccugucuuucagaucucaaaggcucuuuucagagccaccaaaaaaaaaaaaaaaaaaaaaaaaaaaaaaaaaaaaaaaaaaaaaaaaaaaaaaaaaaaaaaaaaaaaaaaaaaaaaaaaaaaaaaaaaaaaaaaaaaaaa

SEQ ID NO: 23442 - RNA, 4094 nt, Artificial Sequence
  SARS-CoV-2/Wuhan/WIV05/2019__EPI_ISL_402128 spike protein mRNA gc (1-1273)(E484K_D614G)
aggagagucccgcagucggcguccagcggcucugcuuguucgugugugugucguugcaggccuuauucaagcuuaccauguucguguuccugguccuccugccccuggugagcucccagugcgugaaccucaccacccgcacgcagcugccgcccgccuacaccaacagcuucacccggggcgucuacuaccccgacaagguguuccgcuccagcgugcugcacuccacccaggaccucuuccugcccuucuucagcaacgucacgugguuccacgccauccacguguccgggaccaacggcaccaagcgguucgacaacccggugcugcccuucaacgacggggucuacuucgcgagcaccgagaaguccaacaucauccgcggcuggaucuucgggacgacccucgacagcaagacccagucccugcugaucgugaacaacgccaccaacguggucaucaaggugugcgaguuccaguucugcaacgaccccuuccucggcguguacuaccacaagaacaacaagagcuggauggaguccgaguuccgggucuacagcuccgccaacaacugcacguucgaguacgugagccagcccuuccugauggaccuggagggcaagcaggggaacuucaagaaccuccgcgaguucguguucaagaacaucgacggcuacuucaagaucuacuccaagcacaccccgaucaaccugguccgggaccugccccagggguucagcgcccucgagccccugguggaccugcccaucggcaucaacaucacccgcuuccagacccuccuggcccugcaccgguccuaccucacgccgggggacagcagcuccggcuggaccgcgggcgccgccgccuacuacgugggguaccugcagccccgcaccuuccugcucaaguacaacgagaacggcaccaucacggacgcggucgacugcgcccuggacccccugagcgagaccaagugcacccucaaguccuucaccguggagaaggggaucuaccagacgagcaacuuccgggugcagcccaccgaguccaucguccgcuucccgaacaucaccaaccugugccccuucggcgagguguucaacgccacccgguucgccagcgucuacgccuggaaccgcaagcggaucuccaacugcguggcggacuacagcgugcuguacaacuccgccagcuucuccacguucaagugcuacggcgucagccccaccaagcucaacgaccugugcuucaccaacguguacgccgacuccuucgugauccgcggggacgagguccggcagaucgcccccggccagaccgggaagaucgccgacuacaacuacaagcugccggacgacuucacgggcugcgugaucgcguggaacagcaacaaccucgacuccaaggucgggggcaacuacaacuaccuguaccgccuguuccgcaagagcaaccucaagcccuucgagcgggacaucuccaccgagaucuaccaggccggcagcacccccugcaacggggugaagggcuucaacugcuacuucccccugcaguccuacggguuccagccgaccaacggcgugggguaccagcccuaccggguggucgugcugagcuucgagcuccugcacgcccccgccacggugugcggccccaagaaguccaccaaccuggucaagaacaagugcgugaacuucaacuucaacggccucaccgggaccggcgugcugaccgagagcaacaagaaguuccugccguuccagcaguucgggcgcgacaucgccgacacgaccgacgcgguccgcgacccccagacccuggagauccucgacaucacccccugcagcuucggcgggguguccgugaucacgccgggcaccaacaccagcaaccaggucgccgugcuguaccagggcgugaacugcaccgagguccccguggccauccacgccgaccagcugacgcccaccuggcggguguacuccaccgggagcaacgucuuccagacccgcgccggcugccucaucggggcggagcacgugaacaacuccuacgagugcgacauccccaucggcgccggcaucugcgccagcuaccagacgcagaccaacuccccgcggcgcgcccggagcguggcgucccagagcaucaucgccuacaccaugucccugggggccgagaacagcgucgccuacuccaacaacagcaucgccauccccaccaacuucacgaucuccgugaccaccgagauccugcccgugagcaugaccaagacgagcgucgacugcaccauguacaucugcggcgacuccaccgagugcagcaaccuccugcugcaguacggguccuucugcacccagcucaaccgcgcgcugacgggcaucgccguggagcaggacaagaacacccaggagguguucgcccaggucaagcagaucuacaagacgcccccgaucaaggacuucgggggcuucaacuucagccagauccugcccgaccccuccaagcccagcaagcgguccuucaucgaggaccuccuguucaacaaggugacccuggccgacgccggcuucaucaagcaguacggggacugccucggcgacaucgcggcccgcgaccugaucugcgcccagaaguucaacgggcugaccgugcucccgccccugcugaccgacgagaugaucgcccaguacaccagcgcccuccuggcgggcaccaucacguccggguggaccuucggcgccggcgccgcccugcagauccccuucgcgaugcagauggccuaccgguucaacgggaucggcgucacccagaacgugcucuacgagaaccagaagcugaucgccaaccaguucaacagcgccaucgggaagauccaggacucccugagcuccaccgccagcgcgcucggcaagcugcaggacguggucaaccagaacgcccaggcccugaacacgcucgugaagcagcuguccagcaacuucggggccaucuccagcgugcugaacgacauccucucccgccuggacaaggucgaggccgaggugcagaucgaccggcugaucaccggccgccuccagagccugcagaccuacgugacccagcagcugauccgggcggccgagauccgcgccagcgccaaccucgccgcgaccaagauguccgagugcguccugggccagagcaagcggguggacuucugcgggaagggcuaccaccugauguccuucccccagagcgccccgcacgggguggucuuccuccacgugacguacguccccgcccaggagaagaacuucaccaccgcccccgcgaucugccacgacggcaaggcccacuucccccgcgaggggguguucguguccaacggcacccacugguucgucacgcagcggaacuucuacgagccgcagaucaucaccaccgacaacaccuucgugagcggcaacugcgacguggucaucgggaucgugaacaacacgguguacgacccccugcagcccgagcuggacuccuucaaggaggagcucgacaaguacuucaagaaccacaccagccccgacgucgaccugggcgacaucuccgggaucaacgccagcguggugaacauccagaaggagaucgaccgccugaacgaggucgccaagaaccucaacgagucccugaucgaccugcaggagcucggcaaguacgagcaguacaucaaguggccgugguacaucuggcugggcuucaucgccgggcugaucgcgaucgugauggugaccaucaugcucugcugcaugaccagcugcugcuccugccugaagggcugcugcagcugcggguccugcugcaaguucgacgaggacgacagcgagcccguccugaagggcgugaagcuccacuacacgugaggacuagucccuguucccagagcccacuuuuuuuucuuuuuuugaaauaaaauagccugucuuucagaucucaaaggcucuuuucagagccaccaaaaaaaaaaaaaaaaaaaaaaaaaaaaaaaaaaaaaaaaaaaaaaaaaaaaaaaaaaaaaaaaaaaaaaaaaaaaaaaaaaaaaaaaaaaaaaaaaaaaa

SEQ ID NO: 23443 - RNA, 4094 nt, Artificial Sequence
  SARS-CoV-2/Wuhan/WIV05/2019__EPI_ISL_402128 spike protein mRNA gc (1-1273)(L18F_T20N_P26S_D138Y_R190S_K417T_E484K_N501Y_D614G_H655Y _T1027I)
aggagagucccgcagucggcguccagcggcucugcuuguucgugugugugucguugcaggccuuauucaagcuuaccauguucguguuccugguccuccugccccuggugagcucccagugcgugaacuucaccaaccgcacccagcucccgagcgccuacacgaacuccuucacccggggcgucuacuaccccgacaagguguuccgcagcuccgugcugcacagcacccaggaccuguuccuccccuucuucuccaacgucaccugguuccacgccauccacgugagcgggacgaacggcaccaagcgguucgacaaccccgugcugccguucaacgacggggucuacuucgcguccaccgagaaguccaacaucauccgcggcuggaucuucgggaccacgcuggacuccaagacccagagccuccugaucgugaacaacgccaccaacguggucaucaaggugugcgaguuccaguucugcaacuaccccuuccugggcguguacuaccacaagaacaacaaguccuggauggagagcgaguuccgggucuacuccagcgccaacaacugcaccuucgaguacgugucccagcccuuccucauggaccuggagggcaagcaggggaacuucaagaaccugagcgaguucguguucaagaacaucgacggcuacuucaagaucuacuccaagcacacgcccaucaaccucguccgcgaccugccgcagggguucagcgcccuggagccccucguggaccugcccaucggcaucaacaucacccgguuccagacccugcucgcccugcaccgcagcuaccugacccccggggacuccagcuccggcuggacggcgggcgccgccgccuacuacgugggguaccuccagccgcggaccuuccugcugaaguacaacgagaacggcaccaucaccgacgcggucgacugcgcccucgacccccugagcgagacgaagugcacccugaaguccuucaccguggagaaggggaucuaccagaccagcaacuuccgcgugcagcccacggaguccaucguccgguuccccaacaucaccaaccucugcccguucggcgagguguucaacgccacccgcuucgccagcgucuacgccuggaaccggaagcgcaucuccaacugcguggcggacuacagcgugcuguacaacuccgccagcuucuccaccuucaagugcuacggcgucagccccacgaagcugaacgaccucugcuucaccaacguguacgccgacuccuucgugauccgcggggacgagguccggcagaucgcccccggccagaccgggaccaucgccgacuacaacuacaagcugcccgacgacuucacgggcugcgugaucgcguggaacagcaacaaccuggacuccaaggucgggggcaacuacaacuaccucuaccggcuguuccgcaagagcaaccugaagccguucgagcgggacaucuccaccgagaucuaccaggccggcagcacccccugcaacggggugaagggcuucaacugcuacuucccccuccagagcuacggguuccagcccaccuacggcgugggguaccagccguaccgcguggucgugcuguccuucgagcugcuccacgcccccgccacggugugcggccccaagaaguccaccaaccuggucaagaacaagugcgugaacuucaacuucaacggccugaccgggaccggcgugcucaccgagagcaacaagaaguuccugcccuuccagcaguucgggcgggacaucgccgacacgaccgacgcgguccgcgacccgcagacccuggagauccuggacaucacccccugcagcuucggcgggguguccgugaucacgcccggcaccaacaccagcaaccaggucgccgugcucuaccagggcgugaacugcaccgaggucccgguggccauccacgccgaccagcugacgcccaccuggcgcguguacuccaccgggagcaacgucuuccagacccgggccggcugccugaucggggcggaguacgugaacaacuccuacgagugcgacauccccaucggcgccggcaucugcgccagcuaccagacgcagaccaacagcccccgccgggcccgcagcguggcgucccagagcaucaucgccuacaccaugucccucggggccgagaacagcgucgccuacuccaacaacagcaucgccaucccgaccaacuucacgaucagcgugaccaccgagauccugcccguguccaugaccaagacgagcgucgacugcaccauguacaucugcggcgacuccaccgagugcagcaaccugcuccugcaguacggguccuucugcacccagcugaaccgggcgcucacgggcaucgccguggagcaggacaagaacacccaggagguguucgcccaggucaagcagaucuacaagaccccgcccaucaaggacuucgggggcuucaacuucagccagauccugcccgaccccuccaagcccagcaagcgcuccuucaucgaggaccuccuguucaacaaggugacccuggccgacgccggcuucaucaagcaguacggggacugccugggcgacaucgcggcccgggaccucaucugcgcccagaaguucaacgggcugacggugcugcccccgcuccugaccgacgagaugaucgcccaguacaccagcgcccugcucgcgggcaccaucacguccggguggaccuucggcgccggcgccgcccugcagauccccuucgcgaugcagauggccuaccgcuucaacgggaucggcgucacccagaacgugcuguacgagaaccagaagcucaucgccaaccaguucaacagcgccaucgggaagauccaggacucccugagcuccaccgccagcgcgcugggcaagcuccaggacguggucaaccagaacgcccaggcccugaacacgcuggugaagcagcucuccagcaacuucggggccaucuccagcgugcugaacgacauccugagccggcucgacaaggucgaggccgaggugcagaucgaccgccugaucaccggccggcugcagucccuccagaccuacgugacccagcagcugauccgcgcggccgagauccgggccagcgccaaccuggccgcgaucaagauguccgagugcguccucggccagagcaagcgcguggacuucugcgggaagggcuaccaccugauguccuucccccagagcgcgccccacgggguggucuuccugcacgugaccuacgucccggcccaggagaagaacuucacgaccgcccccgccaucugccacgacggcaaggcccacuucccccgggaggggguguucguguccaacggcacccacugguucgucacccagcgcaacuucuacgagccccagaucaucacgaccgacaacaccuucgugagcggcaacugcgacguggucaucgggaucgugaacaacaccguguacgacccgcuccagcccgagcuggacuccuucaaggaggagcuggacaaguacuucaagaaccacacgagccccgacgucgaccucggcgacaucuccgggaucaacgccagcguggugaacauccagaaggagaucgaccggcugaacgaggucgccaagaaccugaacgagucccucaucgaccugcaggagcugggcaaguacgagcaguacaucaaguggcccugguacaucuggcucggcuucaucgccgggcugaucgcgaucgugauggugaccaucaugcugugcugcaugaccagcugcugcuccugccucaagggcugcugcagcugcggguccugcugcaaguucgacgaggacgacagcgagccgguccugaagggcgugaagcugcacuacaccugaggacuagucccuguucccagagcccacuuuuuuuucuuuuuuugaaauaaaauagccugucuuucagaucucaaaggcucuuuucagagccaccaaaaaaaaaaaaaaaaaaaaaaaaaaaaaaaaaaaaaaaaaaaaaaaaaaaaaaaaaaaaaaaaaaaaaaaaaaaaaaaaaaaaaaaaaaaaaaaaaaaaa

SEQ ID NO: 23444 - RNA, 4094 nt, Artificial Sequence
  SARS-CoV-2/Wuhan/WIV05/2019__EPI_ISL_402128 spike protein mRNA gc (1-1273)(S13I_W152C_L452R_D614G)
aggagagucccgcagucggcguccagcggcucugcuuguucgugugugugucguugcaggccuuauucaagcuuaccauguucguguuccugguccuccugccccuggugagcauccagugcgugaaccucaccacccgcacgcagcugccgcccgccuacaccaacuccuucacccggggcgucuacuaccccgacaagguguuccgcagcuccgugcugcacagcacccaggaccucuuccugcccuucuucuccaacgucacgugguuccacgccauccacgugagcgggaccaacggcaccaagcgguucgacaacccggugcugcccuucaacgacggggucuacuucgcguccaccgagaaguccaacaucauccgcggcuggaucuucgggacgacccucgacagcaagacccagagccugcugaucgugaacaacgccaccaacguggucaucaaggugugcgaguuccaguucugcaacgaccccuuccucggcguguacuaccacaagaacaacaaguccugcauggagagcgaguuccgggucuacuccagcgccaacaacugcacguucgaguacgugucccagcccuuccugauggaccuggagggcaagcaggggaacuucaagaaccuccgcgaguucguguucaagaacaucgacggcuacuucaagaucuacagcaagcacaccccgaucaaccugguccgggaccugccccagggguucuccgcccucgagccccugguggaccugcccaucggcaucaacaucacccgcuuccagacccuccuggcccugcaccggagcuaccucacgccgggggacuccagcagcggcuggaccgcgggcgccgccgccuacuacgugggguaccugcagccccgcaccuuccugcucaaguacaacgagaacggcaccaucacggacgcggucgacugcgcccuggacccccuguccgagaccaagugcacccucaagagcuucaccguggagaaggggaucuaccagacguccaacuuccgggugcagcccaccgagagcaucguccgcuucccgaacaucaccaaccugugccccuucggcgagguguucaacgccacccgguucgccuccgucuacgccuggaaccgcaagcggaucagcaacugcguggcggacuacuccgugcuguacaacagcgccuccuucagcacguucaagugcuacggcgucucccccaccaagcucaacgaccugugcuucaccaacguguacgccgacagcuucgugauccgcggggacgagguccggcagaucgcccccggccagaccgggaagaucgccgacuacaacuacaagcugccggacgacuucacgggcugcgugaucgcguggaacuccaacaaccucgacagcaaggucgggggcaacuacaacuaccgcuaccggcuguuccgcaaguccaaccugaagcccuucgagcgggacaucagcaccgagaucuaccaggccggcuccacccccugcaacgggguggagggcuucaacugcuacuucccccuccagagcuacggguuccagccgaccaacggcgugggguaccagcccuaccgcguggucgugcuguccuucgagcugcuccacgcccccgccacggugugcggccccaagaaguccaccaaccuggucaagaacaagugcgugaacuucaacuucaacggccugaccgggaccggcgugcucaccgagagcaacaagaaguuccugccguuccagcaguucgggcgcgacaucgccgacacgaccgacgcgguccgggacccccagacccuggagauccuggacaucacccccugcagcuucggcggggugagcgugaucacgccgggcaccaacaccuccaaccaggucgccgugcucuaccagggcgugaacugcaccgagguccccguggccauccacgccgaccagcugacgcccaccuggcgcguguacagcaccggguccaacgucuuccagacccgggccggcugccugaucggggcggagcacgugaacaacagcuacgagugcgacauccccaucggcgccggcaucugcgccuccuaccagacgcagaccaacagcccgcgccgggcccgcuccguggcgagccaguccaucaucgccuacaccaugagccucggggccgagaacuccgucgccuacagcaacaacuccaucgccauccccaccaacuucacgaucagcgugaccaccgagauccugcccguguccaugaccaagacgagcgucgacugcaccauguacaucugcggcgacagcaccgagugcuccaaccugcuccugcaguacgggagcuucugcacccagcugaaccgggcgcucacgggcaucgccguggagcaggacaagaacacccaggagguguucgcccaggucaagcagaucuacaagacgcccccgaucaaggacuucgggggcuucaacuucucccagauccugcccgaccccagcaagcccuccaagcgcagcuucaucgaggaccuccuguucaacaaggugacccuggccgacgccggcuucaucaagcaguacggggacugccugggcgacaucgcggcccgggaccucaucugcgcccagaaguucaacgggcugaccgugcugccgccccuccugaccgacgagaugaucgcccaguacaccuccgcccugcucgcgggcaccaucacgagcggguggaccuucggcgccggcgccgcccugcagauccccuucgcgaugcagauggccuaccgcuucaacgggaucggcgucacccagaacgugcuguacgagaaccagaagcucaucgccaaccaguucaacuccgccaucgggaagauccaggacagccuguccagcaccgccuccgcgcugggcaagcuccaggacguggucaaccagaacgcccaggcccugaacacgcuggugaagcagcucagcuccaacuucggggccaucagcuccgugcugaacgacauccugagccggcucgacaaggucgaggccgaggugcagaucgaccgccugaucaccggccggcugcagucccuccagaccuacgugacccagcagcugauccgcgcggccgagauccgggccagcgccaaccuggccgcgaccaagaugagcgagugcguccucggccaguccaagcgcguggacuucugcgggaagggcuaccaccugaugagcuucccccaguccgccccgcacgggguggucuuccugcacgugacguacguccccgcccaggagaagaacuucaccaccgcccccgcgaucugccacgacggcaaggcccacuucccccgggaggggguguucgugagcaacggcacccacugguucgucacgcagcgcaacuucuacgagccgcagaucaucaccaccgacaacaccuucguguccggcaacugcgacguggucaucgggaucgugaacaacacgguguacgacccccuccagcccgagcuggacagcuucaaggaggagcuggacaaguacuucaagaaccacaccucccccgacgucgaccucggcgacaucagcgggaucaacgccuccguggugaacauccagaaggagaucgaccggcugaacgaggucgccaagaaccugaacgagagccucaucgaccugcaggagcugggcaaguacgagcaguacaucaaguggccgugguacaucuggcucggcuucaucgccgggcugaucgcgaucgugauggugaccaucaugcugugcugcaugaccuccugcugcagcugccucaagggcugcugcuccugcgggagcugcugcaaguucgacgaggacgacuccgagcccguccugaagggcgugaagcugcacuacacgugaggacuagucccuguucccagagcccacuuuuuuuucuuuuuuugaaauaaaauagccugucuuucagaucucaaaggcucuuuucagagccaccaaaaaaaaaaaaaaaaaaaaaaaaaaaaaaaaaaaaaaaaaaaaaaaaaaaaaaaaaaaaaaaaaaaaaaaaaaaaaaaaaaaaaaaaaaaaaaaaaaaaa

SEQ ID NO: 23445 - RNA, 4094 nt, Artificial Sequence
  SARS-CoV-2/Wuhan/WIV05/2019__EPI_ISL_402128 spike protein mRNA gc (1-1273)
aggagagucccgcagucggcguccagcggcucugcuuguucgugugugugucguugcaggccuuauucaagcuuaccauguucguguuccuggugcugcugccccuggugagcagccagugcgugaaccugaccacccggacccagcugccaccagccuacaccaacagcuucacccggggcgucuacuaccccgacaagguguuccggagcagcguccugcacagcacccaggaccuguuccugcccuucuucagcaacgugaccugguuccacgccauccacgugagcggcaccaacggcaccaagcgguucgacaaccccgugcugcccuucaacgacggcguguacuucgccagcaccgagaagagcaacaucauccggggcuggaucuucggcaccacccuggacagcaagacccagagccugcugaucgugaauaacgccaccaacguggugaucaaggugugcgaguuccaguucugcaacgaccccuuccugggcguguacuaccacaagaacaacaagagcuggauggagagcgaguuccggguguacagcagcgccaacaacugcaccuucgaguacgugagccagcccuuccugauggaccuggagggcaagcagggcaacuucaagaaccugcgggaguucguguucaagaacaucgacggcuacuucaagaucuacagcaagcacaccccaaucaaccuggugcgggaucugccccagggcuucucagcccuggagccccugguggaccugcccaucggcaucaacaucacccgguuccagacccugcuggcccugcaccggagcuaccugaccccaggcgacagcagcagcggguggacagcaggcgcggcugcuuacuacgugggcuaccugcagccccggaccuuccugcugaaguacaacgagaacggcaccaucaccgacgccguggacugcgcccuggacccucugagcgagaccaagugcacccugaagagcuucaccguggagaagggcaucuaccagaccagcaacuuccgggugcagcccaccgagagcaucgugcgguuccccaacaucaccaaccugugccccuucggcgagguguucaacgccacccgguucgccagcguguacgccuggaaccggaagcggaucagcaacugcguggccgacuacagcgugcuguacaacagcgccagcuucagcaccuucaagugcuacggcgugagccccaccaagcugaacgaccugugcuucaccaacguguacgccgacagcuucgugauccguggcgacgaggugcggcagaucgcacccggccagacaggcaagaucgccgacuacaacuacaagcugcccgacgacuucaccggcugcgugaucgccuggaacagcaacaaccucgacagcaaggugggcggcaacuacaacuaccuguaccggcuguuccggaagagcaaccugaagcccuucgagcgggacaucagcaccgagaucuaccaagccggcuccaccccuugcaacggcguggagggcuucaacugcuacuucccucugcagagcuacggcuuccagcccaccaacggcgugggcuaccagcccuaccgggugguggugcugagcuucgagcugcugcacgccccagccaccguguguggccccaagaagagcaccaaccuggugaagaacaagugcgugaacuucaacuucaacggccuuaccggcaccggcgugcugaccgagagcaacaagaaauuccugcccuuucagcaguucggccgggacaucgccgacaccaccgacgcugugcgggauccccagacccuggagauccuggacaucaccccuugcagcuucggcggcgugagcgugaucaccccaggcaccaacaccagcaaccagguggccgugcuguaccaggacgugaacugcaccgaggugcccguggccauccacgccgaccagcugacacccaccuggcgggucuacagcaccggcagcaacguguuccagacccgggccgguugccugaucggcgccgagcacgugaacaacagcuacgagugcgacauccccaucggcgccggcaucugugccagcuaccagacccagaccaauucaccccggagggcaaggagcguggccagccagagcaucaucgccuacaccaugagccugggcgccgagaacagcguggccuacagcaacaacagcaucgccauccccaccaacuucaccaucagcgugaccaccgagauucugcccgugagcaugaccaagaccagcguggacugcaccauguacaucugcggcgacagcaccgagugcagcaaccugcugcugcaguacggcagcuucugcacccagcugaaccgggcccugaccggcaucgccguggagcaggacaagaacacccaggagguguucgcccaggugaagcagaucuacaagaccccucccaucaaggacuucggcggcuucaacuucagccagauccugcccgaccccagcaagcccagcaagcggagcuucaucgaggaccugcuguucaacaaggugacccuagccgacgccggcuucaucaagcaguacggcgacugccucggcgacauagccgcccgggaccugaucugcgcccagaaguucaacggccugaccgugcugccuccccugcugaccgacgagaugaucgcccaguacaccagcgcccuguuagccggaaccaucaccagcggcuggacuuucggcgcuggagccgcucugcagauccccuucgccaugcagauggccuaccgguucaacggcaucggcgugacccagaacgugcuguacgagaaccagaagcugaucgccaaccaguucaacagcgccaucggcaagauccaggacagccugagcagcaccgcuagcgcccugggcaagcugcaggacguggugaaccagaacgcccaggcccugaacacccuggugaagcagcugagcagcaacuucggcgccaucagcagcgugcugaacgacauccugagccggcuggacaaggucgaggccgaggugcagaucgaccggcugaucacuggccggcugcagagccugcagaccuacgugacccagcagcugauccgggccgccgagauucgggccagcgccaaccuggccgccaccaagaugagcgagugcgugcugggccagagcaagcggguggacuucugcggcaagggcuaccaccugaugagcuuuccccagagcgcaccccacggagugguguuccugcacgugaccuacgugcccgcccaggagaagaacuucaccaccgccccagccaucugccacgacggcaaggcccacuuuccccgggagggcguguucgugagcaacggcacccacugguucgugacccagcggaacuucuacgagccccagaucaucaccaccgacaacaccuucgugagcggcaacugcgacguggugaucggcaucgugaacaacaccguguacgauccccugcagcccgagcuggacagcuucaaggaggagcuggacaaguacuucaagaaucacaccagccccgacguggaccugggcgacaucagcggcaucaacgccagcguggugaacauccagaaggagaucgaucggcugaacgagguggccaagaaccugaacgagagccugaucgaccugcaggagcugggcaaguacgagcaguacaucaaguggcccugguacaucuggcugggcuucaucgccggccugaucgccaucgugauggugaccaucaugcugugcugcaugaccagcugcugcagcugccugaagggcuguugcagcugcggcagcugcugcaaguucgacgaggacgacagcgagcccgugcugaagggcgugaagcugcacuacaccugaggacuagucccuguucccagagcccacuuuuuuuucuuuuuuugaaauaaaauagccugucuuucagaucucaaaggcucuuuucagagccaccaaaaaaaaaaaaaaaaaaaaaaaaaaaaaaaaaaaaaaaaaaaaaaaaaaaaaaaaaaaaaaaaaaaaaaaaaaaaaaaaaaaaaaaaaaaaaaaaaaaaa

SEQ ID NO: 23446 - RNA, 4094 nt, Artificial Sequence
  SARS-CoV-2/Wuhan/WIV05/2019__EPI_ISL_402128 spike protein mRNA gc (1-1273)(D614G)
aggagagucccgcagucggcguccagcggcucugcuuguucgugugugugucguugcaggccuuauucaagcuuaccauguucguguuccuggugcugcugccccuggugagcagccagugcgugaaccugaccacccggacccagcugccaccagccuacaccaacagcuucacccggggcgucuacuaccccgacaagguguuccggagcagcguccugcacagcacccaggaccuguuccugcccuucuucagcaacgugaccugguuccacgccauccacgugagcggcaccaacggcaccaagcgguucgacaaccccgugcugcccuucaacgacggcguguacuucgccagcaccgagaagagcaacaucauccggggcuggaucuucggcaccacccuggacagcaagacccagagccugcugaucgugaauaacgccaccaacguggugaucaaggugugcgaguuccaguucugcaacgaccccuuccugggcguguacuaccacaagaacaacaagagcuggauggagagcgaguuccggguguacagcagcgccaacaacugcaccuucgaguacgugagccagcccuuccugauggaccuggagggcaagcagggcaacuucaagaaccugcgggaguucguguucaagaacaucgacggcuacuucaagaucuacagcaagcacaccccaaucaaccuggugcgggaucugccccagggcuucucagcccuggagccccugguggaccugcccaucggcaucaacaucacccgguuccagacccugcuggcccugcaccggagcuaccugaccccaggcgacagcagcagcggguggacagcaggcgcggcugcuuacuacgugggcuaccugcagccccggaccuuccugcugaaguacaacgagaacggcaccaucaccgacgccguggacugcgcccuggacccucugagcgagaccaagugcacccugaagagcuucaccguggagaagggcaucuaccagaccagcaacuuccgggugcagcccaccgagagcaucgugcgguuccccaacaucaccaaccugugccccuucggcgagguguucaacgccacccgguucgccagcguguacgccuggaaccggaagcggaucagcaacugcguggccgacuacagcgugcuguacaacagcgccagcuucagcaccuucaagugcuacggcgugagccccaccaagcugaacgaccugugcuucaccaacguguacgccgacagcuucgugauccguggcgacgaggugcggcagaucgcacccggccagacaggcaagaucgccgacuacaacuacaagcugcccgacgacuucaccggcugcgugaucgccuggaacagcaacaaccucgacagcaaggugggcggcaacuacaacuaccuguaccggcuguuccggaagagcaaccugaagcccuucgagcgggacaucagcaccgagaucuaccaagccggcuccaccccuugcaacggcguggagggcuucaacugcuacuucccucugcagagcuacggcuuccagcccaccaacggcgugggcuaccagcccuaccgggugguggugcugagcuucgagcugcugcacgccccagccaccguguguggccccaagaagagcaccaaccuggugaagaacaagugcgugaacuucaacuucaacggccuuaccggcaccggcgugcugaccgagagcaacaagaaauuccugcccuuucagcaguucggccgggacaucgccgacaccaccgacgcugugcgggauccccagacccuggagauccuggacaucaccccuugcagcuucggcggcgugagcgugaucaccccaggcaccaacaccagcaaccagguggccgugcuguaccagggcgugaacugcaccgaggugcccguggccauccacgccgaccagcugacacccaccuggcgggucuacagcaccggcagcaacguguuccagacccgggccgguugccugaucggcgccgagcacgugaacaacagcuacgagugcgacauccccaucggcgccggcaucugugccagcuaccagacccagaccaauucaccccggagggcaaggagcguggccagccagagcaucaucgccuacaccaugagccugggcgccgagaacagcguggccuacagcaacaacagcaucgccauccccaccaacuucaccaucagcgugaccaccgagauucugcccgugagcaugaccaagaccagcguggacugcaccauguacaucugcggcgacagcaccgagugcagcaaccugcugcugcaguacggcagcuucugcacccagcugaaccgggcccugaccggcaucgccguggagcaggacaagaacacccaggagguguucgcccaggugaagcagaucuacaagaccccucccaucaaggacuucggcggcuucaacuucagccagauccugcccgaccccagcaagcccagcaagcggagcuucaucgaggaccugcuguucaacaaggugacccuagccgacgccggcuucaucaagcaguacggcgacugccucggcgacauagccgcccgggaccugaucugcgcccagaaguucaacggccugaccgugcugccuccccugcugaccgacgagaugaucgcccaguacaccagcgcccuguuagccggaaccaucaccagcggcuggacuuucggcgcuggagccgcucugcagauccccuucgccaugcagauggccuaccgguucaacggcaucggcgugacccagaacgugcuguacgagaaccagaagcugaucgccaaccaguucaacagcgccaucggcaagauccaggacagccugagcagcaccgcuagcgcccugggcaagcugcaggacguggugaaccagaacgcccaggcccugaacacccuggugaagcagcugagcagcaacuucggcgccaucagcagcgugcugaacgacauccugagccggcuggacaaggucgaggccgaggugcagaucgaccggcugaucacuggccggcugcagagccugcagaccuacgugacccagcagcugauccgggccgccgagauucgggccagcgccaaccuggccgccaccaagaugagcgagugcgugcugggccagagcaagcggguggacuucugcggcaagggcuaccaccugaugagcuuuccccagagcgcaccccacggagugguguuccugcacgugaccuacgugcccgcccaggagaagaacuucaccaccgccccagccaucugccacgacggcaaggcccacuuuccccgggagggcguguucgugagcaacggcacccacugguucgugacccagcggaacuucuacgagccccagaucaucaccaccgacaacaccuucgugagcggcaacugcgacguggugaucggcaucgugaacaacaccguguacgauccccugcagcccgagcuggacagcuucaaggaggagcuggacaaguacuucaagaaucacaccagccccgacguggaccugggcgacaucagcggcaucaacgccagcguggugaacauccagaaggagaucgaucggcugaacgagguggccaagaaccugaacgagagccugaucgaccugcaggagcugggcaaguacgagcaguacaucaaguggcccugguacaucuggcugggcuucaucgccggccugaucgccaucgugauggugaccaucaugcugugcugcaugaccagcugcugcagcugccugaagggcuguugcagcugcggcagcugcugcaaguucgacgaggacgacagcgagcccgugcugaagggcgugaagcugcacuacaccugaggacuagucccuguucccagagcccacuuuuuuuucuuuuuuugaaauaaaauagccugucuuucagaucucaaaggcucuuuucagagccaccaaaaaaaaaaaaaaaaaaaaaaaaaaaaaaaaaaaaaaaaaaaaaaaaaaaaaaaaaaaaaaaaaaaaaaaaaaaaaaaaaaaaaaaaaaaaaaaaaaaaa

SEQ ID NO: 23447 - RNA, 4094 nt, Artificial Sequence
  SARS-CoV-2/Wuhan/WIV05/2019__EPI_ISL_402128 spike protein mRNA gc (1-1273)(A222V_D614G)
aggagagucccgcagucggcguccagcggcucugcuuguucgugugugugucguugcaggccuuauucaagcuuaccauguucguguuccuggugcugcugccccuggugagcagccagugcgugaaccugaccacccggacccagcugccaccagccuacaccaacagcuucacccggggcgucuacuaccccgacaagguguuccggagcagcguccugcacagcacccaggaccuguuccugcccuucuucagcaacgugaccugguuccacgccauccacgugagcggcaccaacggcaccaagcgguucgacaaccccgugcugcccuucaacgacggcguguacuucgccagcaccgagaagagcaacaucauccggggcuggaucuucggcaccacccuggacagcaagacccagagccugcugaucgugaauaacgccaccaacguggugaucaaggugugcgaguuccaguucugcaacgaccccuuccugggcguguacuaccacaagaacaacaagagcuggauggagagcgaguuccggguguacagcagcgccaacaacugcaccuucgaguacgugagccagcccuuccugauggaccuggagggcaagcagggcaacuucaagaaccugcgggaguucguguucaagaacaucgacggcuacuucaagaucuacagcaagcacaccccaaucaaccuggugcgggaucugccccagggcuucucagugcuggagccccugguggaccugcccaucggcaucaacaucacccgguuccagacccugcuggcccugcaccggagcuaccugaccccaggcgacagcagcagcggguggacagcaggcgcggcugcuuacuacgugggcuaccugcagccccggaccuuccugcugaaguacaacgagaacggcaccaucaccgacgccguggacugcgcccuggacccucugagcgagaccaagugcacccugaagagcuucaccguggagaagggcaucuaccagaccagcaacuuccgggugcagcccaccgagagcaucgugcgguuccccaacaucaccaaccugugccccuucggcgagguguucaacgccacccgguucgccagcguguacgccuggaaccggaagcggaucagcaacugcguggccgacuacagcgugcuguacaacagcgccagcuucagcaccuucaagugcuacggcgugagccccaccaagcugaacgaccugugcuucaccaacguguacgccgacagcuucgugauccguggcgacgaggugcggcagaucgcacccggccagacaggcaagaucgccgacuacaacuacaagcugcccgacgacuucaccggcugcgugaucgccuggaacagcaacaaccucgacagcaaggugggcggcaacuacaacuaccuguaccggcuguuccggaagagcaaccugaagcccuucgagcgggacaucagcaccgagaucuaccaagccggcuccaccccuugcaacggcguggagggcuucaacugcuacuucccucugcagagcuacggcuuccagcccaccaacggcgugggcuaccagcccuaccgggugguggugcugagcuucgagcugcugcacgccccagccaccguguguggccccaagaagagcaccaaccuggugaagaacaagugcgugaacuucaacuucaacggccuuaccggcaccggcgugcugaccgagagcaacaagaaauuccugcccuuucagcaguucggccgggacaucgccgacaccaccgacgcugugcgggauccccagacccuggagauccuggacaucaccccuugcagcuucggcggcgugagcgugaucaccccaggcaccaacaccagcaaccagguggccgugcuguaccagggcgugaacugcaccgaggugcccguggccauccacgccgaccagcugacacccaccuggcgggucuacagcaccggcagcaacguguuccagacccgggccgguugccugaucggcgccgagcacgugaacaacagcuacgagugcgacauccccaucggcgccggcaucugugccagcuaccagacccagaccaauucaccccggagggcaaggagcguggccagccagagcaucaucgccuacaccaugagccugggcgccgagaacagcguggccuacagcaacaacagcaucgccauccccaccaacuucaccaucagcgugaccaccgagauucugcccgugagcaugaccaagaccagcguggacugcaccauguacaucugcggcgacagcaccgagugcagcaaccugcugcugcaguacggcagcuucugcacccagcugaaccgggcccugaccggcaucgccguggagcaggacaagaacacccaggagguguucgcccaggugaagcagaucuacaagaccccucccaucaaggacuucggcggcuucaacuucagccagauccugcccgaccccagcaagcccagcaagcggagcuucaucgaggaccugcuguucaacaaggugacccuagccgacgccggcuucaucaagcaguacggcgacugccucggcgacauagccgcccgggaccugaucugcgcccagaaguucaacggccugaccgugcugccuccccugcugaccgacgagaugaucgcccaguacaccagcgcccuguuagccggaaccaucaccagcggcuggacuuucggcgcuggagccgcucugcagauccccuucgccaugcagauggccuaccgguucaacggcaucggcgugacccagaacgugcuguacgagaaccagaagcugaucgccaaccaguucaacagcgccaucggcaagauccaggacagccugagcagcaccgcuagcgcccugggcaagcugcaggacguggugaaccagaacgcccaggcccugaacacccuggugaagcagcugagcagcaacuucggcgccaucagcagcgugcugaacgacauccugagccggcuggacaaggucgaggccgaggugcagaucgaccggcugaucacuggccggcugcagagccugcagaccuacgugacccagcagcugauccgggccgccgagauucgggccagcgccaaccuggccgccaccaagaugagcgagugcgugcugggccagagcaagcggguggacuucugcggcaagggcuaccaccugaugagcuuuccccagagcgcaccccacggagugguguuccugcacgugaccuacgugcccgcccaggagaagaacuucaccaccgccccagccaucugccacgacggcaaggcccacuuuccccgggagggcguguucgugagcaacggcacccacugguucgugacccagcggaacuucuacgagccccagaucaucaccaccgacaacaccuucgugagcggcaacugcgacguggugaucggcaucgugaacaacaccguguacgauccccugcagcccgagcuggacagcuucaaggaggagcuggacaaguacuucaagaaucacaccagccccgacguggaccugggcgacaucagcggcaucaacgccagcguggugaacauccagaaggagaucgaucggcugaacgagguggccaagaaccugaacgagagccugaucgaccugcaggagcugggcaaguacgagcaguacaucaaguggcccugguacaucuggcugggcuucaucgccggccugaucgccaucgugauggugaccaucaugcugugcugcaugaccagcugcugcagcugccugaagggcuguugcagcugcggcagcugcugcaaguucgacgaggacgacagcgagcccgugcugaagggcgugaagcugcacuacaccugaggacuagucccuguucccagagcccacuuuuuuuucuuuuuuugaaauaaaauagccugucuuucagaucucaaaggcucuuuucagagccaccaaaaaaaaaaaaaaaaaaaaaaaaaaaaaaaaaaaaaaaaaaaaaaaaaaaaaaaaaaaaaaaaaaaaaaaaaaaaaaaaaaaaaaaaaaaaaaaaaaaaa

SEQ ID NO: 23448 - RNA, 4094 nt, Artificial Sequence
  SARS-CoV-2/Wuhan/WIV05/2019__EPI_ISL_402128 spike protein mRNA gc (1-1273)(N439K_D614G)
aggagagucccgcagucggcguccagcggcucugcuuguucgugugugugucguugcaggccuuauucaagcuuaccauguucguguuccuggugcugcugccccuggugagcagccagugcgugaaccugaccacccggacccagcugccaccagccuacaccaacagcuucacccggggcgucuacuaccccgacaagguguuccggagcagcguccugcacagcacccaggaccuguuccugcccuucuucagcaacgugaccugguuccacgccauccacgugagcggcaccaacggcaccaagcgguucgacaaccccgugcugcccuucaacgacggcguguacuucgccagcaccgagaagagcaacaucauccggggcuggaucuucggcaccacccuggacagcaagacccagagccugcugaucgugaauaacgccaccaacguggugaucaaggugugcgaguuccaguucugcaacgaccccuuccugggcguguacuaccacaagaacaacaagagcuggauggagagcgaguuccggguguacagcagcgccaacaacugcaccuucgaguacgugagccagcccuuccugauggaccuggagggcaagcagggcaacuucaagaaccugcgggaguucguguucaagaacaucgacggcuacuucaagaucuacagcaagcacaccccaaucaaccuggugcgggaucugccccagggcuucucagcccuggagccccugguggaccugcccaucggcaucaacaucacccgguuccagacccugcuggcccugcaccggagcuaccugaccccaggcgacagcagcagcggguggacagcaggcgcggcugcuuacuacgugggcuaccugcagccccggaccuuccugcugaaguacaacgagaacggcaccaucaccgacgccguggacugcgcccuggacccucugagcgagaccaagugcacccugaagagcuucaccguggagaagggcaucuaccagaccagcaacuuccgggugcagcccaccgagagcaucgugcgguuccccaacaucaccaaccugugccccuucggcgagguguucaacgccacccgguucgccagcguguacgccuggaaccggaagcggaucagcaacugcguggccgacuacagcgugcuguacaacagcgccagcuucagcaccuucaagugcuacggcgugagccccaccaagcugaacgaccugugcuucaccaacguguacgccgacagcuucgugauccguggcgacgaggugcggcagaucgcacccggccagacaggcaagaucgccgacuacaacuacaagcugcccgacgacuucaccggcugcgugaucgccuggaacagcaagaaccucgacagcaaggugggcggcaacuacaacuaccuguaccggcuguuccggaagagcaaccugaagcccuucgagcgggacaucagcaccgagaucuaccaagccggcuccaccccuugcaacggcguggagggcuucaacugcuacuucccucugcagagcuacggcuuccagcccaccaacggcgugggcuaccagcccuaccgggugguggugcugagcuucgagcugcugcacgccccagccaccguguguggccccaagaagagcaccaaccuggugaagaacaagugcgugaacuucaacuucaacggccuuaccggcaccggcgugcugaccgagagcaacaagaaauuccugcccuuucagcaguucggccgggacaucgccgacaccaccgacgcugugcgggauccccagacccuggagauccuggacaucaccccuugcagcuucggcggcgugagcgugaucaccccaggcaccaacaccagcaaccagguggccgugcuguaccagggcgugaacugcaccgaggugcccguggccauccacgccgaccagcugacacccaccuggcgggucuacagcaccggcagcaacguguuccagacccgggccgguugccugaucggcgccgagcacgugaacaacagcuacgagugcgacauccccaucggcgccggcaucugugccagcuaccagacccagaccaauucaccccggagggcaaggagcguggccagccagagcaucaucgccuacaccaugagccugggcgccgagaacagcguggccuacagcaacaacagcaucgccauccccaccaacuucaccaucagcgugaccaccgagauucugcccgugagcaugaccaagaccagcguggacugcaccauguacaucugcggcgacagcaccgagugcagcaaccugcugcugcaguacggcagcuucugcacccagcugaaccgggcccugaccggcaucgccguggagcaggacaagaacacccaggagguguucgcccaggugaagcagaucuacaagaccccucccaucaaggacuucggcggcuucaacuucagccagauccugcccgaccccagcaagcccagcaagcggagcuucaucgaggaccugcuguucaacaaggugacccuagccgacgccggcuucaucaagcaguacggcgacugccucggcgacauagccgcccgggaccugaucugcgcccagaaguucaacggccugaccgugcugccuccccugcugaccgacgagaugaucgcccaguacaccagcgcccuguuagccggaaccaucaccagcggcuggacuuucggcgcuggagccgcucugcagauccccuucgccaugcagauggccuaccgguucaacggcaucggcgugacccagaacgugcuguacgagaaccagaagcugaucgccaaccaguucaacagcgccaucggcaagauccaggacagccugagcagcaccgcuagcgcccugggcaagcugcaggacguggugaaccagaacgcccaggcccugaacacccuggugaagcagcugagcagcaacuucggcgccaucagcagcgugcugaacgacauccugagccggcuggacaaggucgaggccgaggugcagaucgaccggcugaucacuggccggcugcagagccugcagaccuacgugacccagcagcugauccgggccgccgagauucgggccagcgccaaccuggccgccaccaagaugagcgagugcgugcugggccagagcaagcggguggacuucugcggcaagggcuaccaccugaugagcuuuccccagagcgcaccccacggagugguguuccugcacgugaccuacgugcccgcccaggagaagaacuucaccaccgccccagccaucugccacgacggcaaggcccacuuuccccgggagggcguguucgugagcaacggcacccacugguucgugacccagcggaacuucuacgagccccagaucaucaccaccgacaacaccuucgugagcggcaacugcgacguggugaucggcaucgugaacaacaccguguacgauccccugcagcccgagcuggacagcuucaaggaggagcuggacaaguacuucaagaaucacaccagccccgacguggaccugggcgacaucagcggcaucaacgccagcguggugaacauccagaaggagaucgaucggcugaacgagguggccaagaaccugaacgagagccugaucgaccugcaggagcugggcaaguacgagcaguacaucaaguggcccugguacaucuggcugggcuucaucgccggccugaucgccaucgugauggugaccaucaugcugugcugcaugaccagcugcugcagcugccugaagggcuguugcagcugcggcagcugcugcaaguucgacgaggacgacagcgagcccgugcugaagggcgugaagcugcacuacaccugaggacuagucccuguucccagagcccacuuuuuuuucuuuuuuugaaauaaaauagccugucuuucagaucucaaaggcucuuuucagagccaccaaaaaaaaaaaaaaaaaaaaaaaaaaaaaaaaaaaaaaaaaaaaaaaaaaaaaaaaaaaaaaaaaaaaaaaaaaaaaaaaaaaaaaaaaaaaaaaaaaaaa

SEQ ID NO: 23449 - RNA, 4094 nt, Artificial Sequence
  SARS-CoV-2/Wuhan/WIV05/2019__EPI_ISL_402128 spike protein mRNA gc (1-1273)(S477N_D614G)
aggagagucccgcagucggcguccagcggcucugcuuguucgugugugugucguugcaggccuuauucaagcuuaccauguucguguuccuggugcugcugccccuggugagcagccagugcgugaaccugaccacccggacccagcugccaccagccuacaccaacagcuucacccggggcgucuacuaccccgacaagguguuccggagcagcguccugcacagcacccaggaccuguuccugcccuucuucagcaacgugaccugguuccacgccauccacgugagcggcaccaacggcaccaagcgguucgacaaccccgugcugcccuucaacgacggcguguacuucgccagcaccgagaagagcaacaucauccggggcuggaucuucggcaccacccuggacagcaagacccagagccugcugaucgugaauaacgccaccaacguggugaucaaggugugcgaguuccaguucugcaacgaccccuuccugggcguguacuaccacaagaacaacaagagcuggauggagagcgaguuccggguguacagcagcgccaacaacugcaccuucgaguacgugagccagcccuuccugauggaccuggagggcaagcagggcaacuucaagaaccugcgggaguucguguucaagaacaucgacggcuacuucaagaucuacagcaagcacaccccaaucaaccuggugcgggaucugccccagggcuucucagcccuggagccccugguggaccugcccaucggcaucaacaucacccgguuccagacccugcuggcccugcaccggagcuaccugaccccaggcgacagcagcagcggguggacagcaggcgcggcugcuuacuacgugggcuaccugcagccccggaccuuccugcugaaguacaacgagaacggcaccaucaccgacgccguggacugcgcccuggacccucugagcgagaccaagugcacccugaagagcuucaccguggagaagggcaucuaccagaccagcaacuuccgggugcagcccaccgagagcaucgugcgguuccccaacaucaccaaccugugccccuucggcgagguguucaacgccacccgguucgccagcguguacgccuggaaccggaagcggaucagcaacugcguggccgacuacagcgugcuguacaacagcgccagcuucagcaccuucaagugcuacggcgugagccccaccaagcugaacgaccugugcuucaccaacguguacgccgacagcuucgugauccguggcgacgaggugcggcagaucgcacccggccagacaggcaagaucgccgacuacaacuacaagcugcccgacgacuucaccggcugcgugaucgccuggaacagcaacaaccucgacagcaaggugggcggcaacuacaacuaccuguaccggcuguuccggaagagcaaccugaagcccuucgagcgggacaucagcaccgagaucuaccaagccggcaacaccccuugcaacggcguggagggcuucaacugcuacuucccucugcagagcuacggcuuccagcccaccaacggcgugggcuaccagcccuaccgggugguggugcugagcuucgagcugcugcacgccccagccaccguguguggccccaagaagagcaccaaccuggugaagaacaagugcgugaacuucaacuucaacggccuuaccggcaccggcgugcugaccgagagcaacaagaaauuccugcccuuucagcaguucggccgggacaucgccgacaccaccgacgcugugcgggauccccagacccuggagauccuggacaucaccccuugcagcuucggcggcgugagcgugaucaccccaggcaccaacaccagcaaccagguggccgugcuguaccagggcgugaacugcaccgaggugcccguggccauccacgccgaccagcugacacccaccuggcgggucuacagcaccggcagcaacguguuccagacccgggccgguugccugaucggcgccgagcacgugaacaacagcuacgagugcgacauccccaucggcgccggcaucugugccagcuaccagacccagaccaauucaccccggagggcaaggagcguggccagccagagcaucaucgccuacaccaugagccugggcgccgagaacagcguggccuacagcaacaacagcaucgccauccccaccaacuucaccaucagcgugaccaccgagauucugcccgugagcaugaccaagaccagcguggacugcaccauguacaucugcggcgacagcaccgagugcagcaaccugcugcugcaguacggcagcuucugcacccagcugaaccgggcccugaccggcaucgccguggagcaggacaagaacacccaggagguguucgcccaggugaagcagaucuacaagaccccucccaucaaggacuucggcggcuucaacuucagccagauccugcccgaccccagcaagcccagcaagcggagcuucaucgaggaccugcuguucaacaaggugacccuagccgacgccggcuucaucaagcaguacggcgacugccucggcgacauagccgcccgggaccugaucugcgcccagaaguucaacggccugaccgugcugccuccccugcugaccgacgagaugaucgcccaguacaccagcgcccuguuagccggaaccaucaccagcggcuggacuuucggcgcuggagccgcucugcagauccccuucgccaugcagauggccuaccgguucaacggcaucggcgugacccagaacgugcuguacgagaaccagaagcugaucgccaaccaguucaacagcgccaucggcaagauccaggacagccugagcagcaccgcuagcgcccugggcaagcugcaggacguggugaaccagaacgcccaggcccugaacacccuggugaagcagcugagcagcaacuucggcgccaucagcagcgugcugaacgacauccugagccggcuggacaaggucgaggccgaggugcagaucgaccggcugaucacuggccggcugcagagccugcagaccuacgugacccagcagcugauccgggccgccgagauucgggccagcgccaaccuggccgccaccaagaugagcgagugcgugcugggccagagcaagcggguggacuucugcggcaagggcuaccaccugaugagcuuuccccagagcgcaccccacggagugguguuccugcacgugaccuacgugcccgcccaggagaagaacuucaccaccgccccagccaucugccacgacggcaaggcccacuuuccccgggagggcguguucgugagcaacggcacccacugguucgugacccagcggaacuucuacgagccccagaucaucaccaccgacaacaccuucgugagcggcaacugcgacguggugaucggcaucgugaacaacaccguguacgauccccugcagcccgagcuggacagcuucaaggaggagcuggacaaguacuucaagaaucacaccagccccgacguggaccugggcgacaucagcggcaucaacgccagcguggugaacauccagaaggagaucgaucggcugaacgagguggccaagaaccugaacgagagccugaucgaccugcaggagcugggcaaguacgagcaguacaucaaguggcccugguacaucuggcugggcuucaucgccggccugaucgccaucgugauggugaccaucaugcugugcugcaugaccagcugcugcagcugccugaagggcuguugcagcugcggcagcugcugcaaguucgacgaggacgacagcgagcccgugcugaagggcgugaagcugcacuacaccugaggacuagucccuguucccagagcccacuuuuuuuucuuuuuuugaaauaaaauagccugucuuucagaucucaaaggcucuuuucagagccaccaaaaaaaaaaaaaaaaaaaaaaaaaaaaaaaaaaaaaaaaaaaaaaaaaaaaaaaaaaaaaaaaaaaaaaaaaaaaaaaaaaaaaaaaaaaaaaaaaaaaa

SEQ ID NO: 23450 - RNA, 4094 nt, Artificial Sequence
  SARS-CoV-2/Wuhan/WIV05/2019__EPI_ISL_402128 spike protein mRNA gc (1-1273)(N501Y_D614G)
aggagagucccgcagucggcguccagcggcucugcuuguucgugugugugucguugcaggccuuauucaagcuuaccauguucguguuccuggugcugcugccccuggugagcagccagugcgugaaccugaccacccggacccagcugccaccagccuacaccaacagcuucacccggggcgucuacuaccccgacaagguguuccggagcagcguccugcacagcacccaggaccuguuccugcccuucuucagcaacgugaccugguuccacgccauccacgugagcggcaccaacggcaccaagcgguucgacaaccccgugcugcccuucaacgacggcguguacuucgccagcaccgagaagagcaacaucauccggggcuggaucuucggcaccacccuggacagcaagacccagagccugcugaucgugaauaacgccaccaacguggugaucaaggugugcgaguuccaguucugcaacgaccccuuccugggcguguacuaccacaagaacaacaagagcuggauggagagcgaguuccggguguacagcagcgccaacaacugcaccuucgaguacgugagccagcccuuccugauggaccuggagggcaagcagggcaacuucaagaaccugcgggaguucguguucaagaacaucgacggcuacuucaagaucuacagcaagcacaccccaaucaaccuggugcgggaucugccccagggcuucucagcccuggagccccugguggaccugcccaucggcaucaacaucacccgguuccagacccugcuggcccugcaccggagcuaccugaccccaggcgacagcagcagcggguggacagcaggcgcggcugcuuacuacgugggcuaccugcagccccggaccuuccugcugaaguacaacgagaacggcaccaucaccgacgccguggacugcgcccuggacccucugagcgagaccaagugcacccugaagagcuucaccguggagaagggcaucuaccagaccagcaacuuccgggugcagcccaccgagagcaucgugcgguuccccaacaucaccaaccugugccccuucggcgagguguucaacgccacccgguucgccagcguguacgccuggaaccggaagcggaucagcaacugcguggccgacuacagcgugcuguacaacagcgccagcuucagcaccuucaagugcuacggcgugagccccaccaagcugaacgaccugugcuucaccaacguguacgccgacagcuucgugauccguggcgacgaggugcggcagaucgcacccggccagacaggcaagaucgccgacuacaacuacaagcugcccgacgacuucaccggcugcgugaucgccuggaacagcaacaaccucgacagcaaggugggcggcaacuacaacuaccuguaccggcuguuccggaagagcaaccugaagcccuucgagcgggacaucagcaccgagaucuaccaagccggcuccaccccuugcaacggcguggagggcuucaacugcuacuucccucugcagagcuacggcuuccagcccaccuacggcgugggcuaccagcccuaccgggugguggugcugagcuucgagcugcugcacgccccagccaccguguguggccccaagaagagcaccaaccuggugaagaacaagugcgugaacuucaacuucaacggccuuaccggcaccggcgugcugaccgagagcaacaagaaauuccugcccuuucagcaguucggccgggacaucgccgacaccaccgacgcugugcgggauccccagacccuggagauccuggacaucaccccuugcagcuucggcggcgugagcgugaucaccccaggcaccaacaccagcaaccagguggccgugcuguaccagggcgugaacugcaccgaggugcccguggccauccacgccgaccagcugacacccaccuggcgggucuacagcaccggcagcaacguguuccagacccgggccgguugccugaucggcgccgagcacgugaacaacagcuacgagugcgacauccccaucggcgccggcaucugugccagcuaccagacccagaccaauucaccccggagggcaaggagcguggccagccagagcaucaucgccuacaccaugagccugggcgccgagaacagcguggccuacagcaacaacagcaucgccauccccaccaacuucaccaucagcgugaccaccgagauucugcccgugagcaugaccaagaccagcguggacugcaccauguacaucugcggcgacagcaccgagugcagcaaccugcugcugcaguacggcagcuucugcacccagcugaaccgggcccugaccggcaucgccguggagcaggacaagaacacccaggagguguucgcccaggugaagcagaucuacaagaccccucccaucaaggacuucggcggcuucaacuucagccagauccugcccgaccccagcaagcccagcaagcggagcuucaucgaggaccugcuguucaacaaggugacccuagccgacgccggcuucaucaagcaguacggcgacugccucggcgacauagccgcccgggaccugaucugcgcccagaaguucaacggccugaccgugcugccuccccugcugaccgacgagaugaucgcccaguacaccagcgcccuguuagccggaaccaucaccagcggcuggacuuucggcgcuggagccgcucugcagauccccuucgccaugcagauggccuaccgguucaacggcaucggcgugacccagaacgugcuguacgagaaccagaagcugaucgccaaccaguucaacagcgccaucggcaagauccaggacagccugagcagcaccgcuagcgcccugggcaagcugcaggacguggugaaccagaacgcccaggcccugaacacccuggugaagcagcugagcagcaacuucggcgccaucagcagcgugcugaacgacauccugagccggcuggacaaggucgaggccgaggugcagaucgaccggcugaucacuggccggcugcagagccugcagaccuacgugacccagcagcugauccgggccgccgagauucgggccagcgccaaccuggccgccaccaagaugagcgagugcgugcugggccagagcaagcggguggacuucugcggcaagggcuaccaccugaugagcuuuccccagagcgcaccccacggagugguguuccugcacgugaccuacgugcccgcccaggagaagaacuucaccaccgccccagccaucugccacgacggcaaggcccacuuuccccgggagggcguguucgugagcaacggcacccacugguucgugacccagcggaacuucuacgagccccagaucaucaccaccgacaacaccuucgugagcggcaacugcgacguggugaucggcaucgugaacaacaccguguacgauccccugcagcccgagcuggacagcuucaaggaggagcuggacaaguacuucaagaaucacaccagccccgacguggaccugggcgacaucagcggcaucaacgccagcguggugaacauccagaaggagaucgaucggcugaacgagguggccaagaaccugaacgagagccugaucgaccugcaggagcugggcaaguacgagcaguacaucaaguggcccugguacaucuggcugggcuucaucgccggccugaucgccaucgugauggugaccaucaugcugugcugcaugaccagcugcugcagcugccugaagggcuguugcagcugcggcagcugcugcaaguucgacgaggacgacagcgagcccgugcugaagggcgugaagcugcacuacaccugaggacuagucccuguucccagagcccacuuuuuuuucuuuuuuugaaauaaaauagccugucuuucagaucucaaaggcucuuuucagagccaccaaaaaaaaaaaaaaaaaaaaaaaaaaaaaaaaaaaaaaaaaaaaaaaaaaaaaaaaaaaaaaaaaaaaaaaaaaaaaaaaaaaaaaaaaaaaaaaaaaaaa

SEQ ID NO: 23451 - RNA, 4088 nt, Artificial Sequence
  SARS-CoV-2/Wuhan/WIV05/2019__EPI_ISL_402128 spike protein mRNA gc (1-1273)(H69del_V70del_D614G)
aggagagucccgcagucggcguccagcggcucugcuuguucgugugugugucguugcaggccuuauucaagcuuaccauguucguguuccuggugcugcugccccuggugagcagccagugcgugaaccugaccacccggacccagcugccaccagccuacaccaacagcuucacccggggcgucuacuaccccgacaagguguuccggagcagcguccugcacagcacccaggaccuguuccugcccuucuucagcaacgugaccugguuccacgccaucagcggcaccaacggcaccaagcgguucgacaaccccgugcugcccuucaacgacggcguguacuucgccagcaccgagaagagcaacaucauccggggcuggaucuucggcaccacccuggacagcaagacccagagccugcugaucgugaauaacgccaccaacguggugaucaaggugugcgaguuccaguucugcaacgaccccuuccugggcguguacuaccacaagaacaacaagagcuggauggagagcgaguuccggguguacagcagcgccaacaacugcaccuucgaguacgugagccagcccuuccugauggaccuggagggcaagcagggcaacuucaagaaccugcgggaguucguguucaagaacaucgacggcuacuucaagaucuacagcaagcacaccccaaucaaccuggugcgggaucugccccagggcuucucagcccuggagccccugguggaccugcccaucggcaucaacaucacccgguuccagacccugcuggcccugcaccggagcuaccugaccccaggcgacagcagcagcggguggacagcaggcgcggcugcuuacuacgugggcuaccugcagccccggaccuuccugcugaaguacaacgagaacggcaccaucaccgacgccguggacugcgcccuggacccucugagcgagaccaagugcacccugaagagcuucaccguggagaagggcaucuaccagaccagcaacuuccgggugcagcccaccgagagcaucgugcgguuccccaacaucaccaaccugugccccuucggcgagguguucaacgccacccgguucgccagcguguacgccuggaaccggaagcggaucagcaacugcguggccgacuacagcgugcuguacaacagcgccagcuucagcaccuucaagugcuacggcgugagccccaccaagcugaacgaccugugcuucaccaacguguacgccgacagcuucgugauccguggcgacgaggugcggcagaucgcacccggccagacaggcaagaucgccgacuacaacuacaagcugcccgacgacuucaccggcugcgugaucgccuggaacagcaacaaccucgacagcaaggugggcggcaacuacaacuaccuguaccggcuguuccggaagagcaaccugaagcccuucgagcgggacaucagcaccgagaucuaccaagccggcuccaccccuugcaacggcguggagggcuucaacugcuacuucccucugcagagcuacggcuuccagcccaccaacggcgugggcuaccagcccuaccgggugguggugcugagcuucgagcugcugcacgccccagccaccguguguggccccaagaagagcaccaaccuggugaagaacaagugcgugaacuucaacuucaacggccuuaccggcaccggcgugcugaccgagagcaacaagaaauuccugcccuuucagcaguucggccgggacaucgccgacaccaccgacgcugugcgggauccccagacccuggagauccuggacaucaccccuugcagcuucggcggcgugagcgugaucaccccaggcaccaacaccagcaaccagguggccgugcuguaccagggcgugaacugcaccgaggugcccguggccauccacgccgaccagcugacacccaccuggcgggucuacagcaccggcagcaacguguuccagacccgggccgguugccugaucggcgccgagcacgugaacaacagcuacgagugcgacauccccaucggcgccggcaucugugccagcuaccagacccagaccaauucaccccggagggcaaggagcguggccagccagagcaucaucgccuacaccaugagccugggcgccgagaacagcguggccuacagcaacaacagcaucgccauccccaccaacuucaccaucagcgugaccaccgagauucugcccgugagcaugaccaagaccagcguggacugcaccauguacaucugcggcgacagcaccgagugcagcaaccugcugcugcaguacggcagcuucugcacccagcugaaccgggcccugaccggcaucgccguggagcaggacaagaacacccaggagguguucgcccaggugaagcagaucuacaagaccccucccaucaaggacuucggcggcuucaacuucagccagauccugcccgaccccagcaagcccagcaagcggagcuucaucgaggaccugcuguucaacaaggugacccuagccgacgccggcuucaucaagcaguacggcgacugccucggcgacauagccgcccgggaccugaucugcgcccagaaguucaacggccugaccgugcugccuccccugcugaccgacgagaugaucgcccaguacaccagcgcccuguuagccggaaccaucaccagcggcuggacuuucggcgcuggagccgcucugcagauccccuucgccaugcagauggccuaccgguucaacggcaucggcgugacccagaacgugcuguacgagaaccagaagcugaucgccaaccaguucaacagcgccaucggcaagauccaggacagccugagcagcaccgcuagcgcccugggcaagcugcaggacguggugaaccagaacgcccaggcccugaacacccuggugaagcagcugagcagcaacuucggcgccaucagcagcgugcugaacgacauccugagccggcuggacaaggucgaggccgaggugcagaucgaccggcugaucacuggccggcugcagagccugcagaccuacgugacccagcagcugauccgggccgccgagauucgggccagcgccaaccuggccgccaccaagaugagcgagugcgugcugggccagagcaagcggguggacuucugcggcaagggcuaccaccugaugagcuuuccccagagcgcaccccacggagugguguuccugcacgugaccuacgugcccgcccaggagaagaacuucaccaccgccccagccaucugccacgacggcaaggcccacuuuccccgggagggcguguucgugagcaacggcacccacugguucgugacccagcggaacuucuacgagccccagaucaucaccaccgacaacaccuucgugagcggcaacugcgacguggugaucggcaucgugaacaacaccguguacgauccccugcagcccgagcuggacagcuucaaggaggagcuggacaaguacuucaagaaucacaccagccccgacguggaccugggcgacaucagcggcaucaacgccagcguggugaacauccagaaggagaucgaucggcugaacgagguggccaagaaccugaacgagagccugaucgaccugcaggagcugggcaaguacgagcaguacaucaaguggcccugguacaucuggcugggcuucaucgccggccugaucgccaucgugauggugaccaucaugcugugcugcaugaccagcugcugcagcugccugaagggcuguugcagcugcggcagcugcugcaaguucgacgaggacgacagcgagcccgugcugaagggcgugaagcugcacuacaccugaggacuagucccuguucccagagcccacuuuuuuuucuuuuuuugaaauaaaauagccugucuuucagaucucaaaggcucuuuucagagccaccaaaaaaaaaaaaaaaaaaaaaaaaaaaaaaaaaaaaaaaaaaaaaaaaaaaaaaaaaaaaaaaaaaaaaaaaaaaaaaaaaaaaaaaaaaaaaaaaaaaaa

SEQ ID NO: 23452 - RNA, 4094 nt, Artificial Sequence
  SARS-CoV-2/Wuhan/WIV05/2019__EPI_ISL_402128 spike protein mRNA gc (1-1273)(Y453F_D614G)
aggagagucccgcagucggcguccagcggcucugcuuguucgugugugugucguugcaggccuuauucaagcuuaccauguucguguuccuggugcugcugccccuggugagcagccagugcgugaaccugaccacccggacccagcugccaccagccuacaccaacagcuucacccggggcgucuacuaccccgacaagguguuccggagcagcguccugcacagcacccaggaccuguuccugcccuucuucagcaacgugaccugguuccacgccauccacgugagcggcaccaacggcaccaagcgguucgacaaccccgugcugcccuucaacgacggcguguacuucgccagcaccgagaagagcaacaucauccggggcuggaucuucggcaccacccuggacagcaagacccagagccugcugaucgugaauaacgccaccaacguggugaucaaggugugcgaguuccaguucugcaacgaccccuuccugggcguguacuaccacaagaacaacaagagcuggauggagagcgaguuccggguguacagcagcgccaacaacugcaccuucgaguacgugagccagcccuuccugauggaccuggagggcaagcagggcaacuucaagaaccugcgggaguucguguucaagaacaucgacggcuacuucaagaucuacagcaagcacaccccaaucaaccuggugcgggaucugccccagggcuucucagcccuggagccccugguggaccugcccaucggcaucaacaucacccgguuccagacccugcuggcccugcaccggagcuaccugaccccaggcgacagcagcagcggguggacagcaggcgcggcugcuuacuacgugggcuaccugcagccccggaccuuccugcugaaguacaacgagaacggcaccaucaccgacgccguggacugcgcccuggacccucugagcgagaccaagugcacccugaagagcuucaccguggagaagggcaucuaccagaccagcaacuuccgggugcagcccaccgagagcaucgugcgguuccccaacaucaccaaccugugccccuucggcgagguguucaacgccacccgguucgccagcguguacgccuggaaccggaagcggaucagcaacugcguggccgacuacagcgugcuguacaacagcgccagcuucagcaccuucaagugcuacggcgugagccccaccaagcugaacgaccugugcuucaccaacguguacgccgacagcuucgugauccguggcgacgaggugcggcagaucgcacccggccagacaggcaagaucgccgacuacaacuacaagcugcccgacgacuucaccggcugcgugaucgccuggaacagcaacaaccucgacagcaaggugggcggcaacuacaacuaccuguuccggcuguuccggaagagcaaccugaagcccuucgagcgggacaucagcaccgagaucuaccaagccggcuccaccccuugcaacggcguggagggcuucaacugcuacuucccucugcagagcuacggcuuccagcccaccaacggcgugggcuaccagcccuaccgggugguggugcugagcuucgagcugcugcacgccccagccaccguguguggccccaagaagagcaccaaccuggugaagaacaagugcgugaacuucaacuucaacggccuuaccggcaccggcgugcugaccgagagcaacaagaaauuccugcccuuucagcaguucggccgggacaucgccgacaccaccgacgcugugcgggauccccagacccuggagauccuggacaucaccccuugcagcuucggcggcgugagcgugaucaccccaggcaccaacaccagcaaccagguggccgugcuguaccagggcgugaacugcaccgaggugcccguggccauccacgccgaccagcugacacccaccuggcgggucuacagcaccggcagcaacguguuccagacccgggccgguugccugaucggcgccgagcacgugaacaacagcuacgagugcgacauccccaucggcgccggcaucugugccagcuaccagacccagaccaauucaccccggagggcaaggagcguggccagccagagcaucaucgccuacaccaugagccugggcgccgagaacagcguggccuacagcaacaacagcaucgccauccccaccaacuucaccaucagcgugaccaccgagauucugcccgugagcaugaccaagaccagcguggacugcaccauguacaucugcggcgacagcaccgagugcagcaaccugcugcugcaguacggcagcuucugcacccagcugaaccgggcccugaccggcaucgccguggagcaggacaagaacacccaggagguguucgcccaggugaagcagaucuacaagaccccucccaucaaggacuucggcggcuucaacuucagccagauccugcccgaccccagcaagcccagcaagcggagcuucaucgaggaccugcuguucaacaaggugacccuagccgacgccggcuucaucaagcaguacggcgacugccucggcgacauagccgcccgggaccugaucugcgcccagaaguucaacggccugaccgugcugccuccccugcugaccgacgagaugaucgcccaguacaccagcgcccuguuagccggaaccaucaccagcggcuggacuuucggcgcuggagccgcucugcagauccccuucgccaugcagauggccuaccgguucaacggcaucggcgugacccagaacgugcuguacgagaaccagaagcugaucgccaaccaguucaacagcgccaucggcaagauccaggacagccugagcagcaccgcuagcgcccugggcaagcugcaggacguggugaaccagaacgcccaggcccugaacacccuggugaagcagcugagcagcaacuucggcgccaucagcagcgugcugaacgacauccugagccggcuggacaaggucgaggccgaggugcagaucgaccggcugaucacuggccggcugcagagccugcagaccuacgugacccagcagcugauccgggccgccgagauucgggccagcgccaaccuggccgccaccaagaugagcgagugcgugcugggccagagcaagcggguggacuucugcggcaagggcuaccaccugaugagcuuuccccagagcgcaccccacggagugguguuccugcacgugaccuacgugcccgcccaggagaagaacuucaccaccgccccagccaucugccacgacggcaaggcccacuuuccccgggagggcguguucgugagcaacggcacccacugguucgugacccagcggaacuucuacgagccccagaucaucaccaccgacaacaccuucgugagcggcaacugcgacguggugaucggcaucgugaacaacaccguguacgauccccugcagcccgagcuggacagcuucaaggaggagcuggacaaguacuucaagaaucacaccagccccgacguggaccugggcgacaucagcggcaucaacgccagcguggugaacauccagaaggagaucgaucggcugaacgagguggccaagaaccugaacgagagccugaucgaccugcaggagcugggcaaguacgagcaguacaucaaguggcccugguacaucuggcugggcuucaucgccggccugaucgccaucgugauggugaccaucaugcugugcugcaugaccagcugcugcagcugccugaagggcuguugcagcugcggcagcugcugcaaguucgacgaggacgacagcgagcccgugcugaagggcgugaagcugcacuacaccugaggacuagucccuguucccagagcccacuuuuuuuucuuuuuuugaaauaaaauagccugucuuucagaucucaaaggcucuuuucagagccaccaaaaaaaaaaaaaaaaaaaaaaaaaaaaaaaaaaaaaaaaaaaaaaaaaaaaaaaaaaaaaaaaaaaaaaaaaaaaaaaaaaaaaaaaaaaaaaaaaaaaa

SEQ ID NO: 23453 - RNA, 4094 nt, Artificial Sequence
  SARS-CoV-2/Wuhan/WIV05/2019__EPI_ISL_402128 spike protein mRNA gc (1-1273)(D614G_I692V)
aggagagucccgcagucggcguccagcggcucugcuuguucgugugugugucguugcaggccuuauucaagcuuaccauguucguguuccuggugcugcugccccuggugagcagccagugcgugaaccugaccacccggacccagcugccaccagccuacaccaacagcuucacccggggcgucuacuaccccgacaagguguuccggagcagcguccugcacagcacccaggaccuguuccugcccuucuucagcaacgugaccugguuccacgccauccacgugagcggcaccaacggcaccaagcgguucgacaaccccgugcugcccuucaacgacggcguguacuucgccagcaccgagaagagcaacaucauccggggcuggaucuucggcaccacccuggacagcaagacccagagccugcugaucgugaauaacgccaccaacguggugaucaaggugugcgaguuccaguucugcaacgaccccuuccugggcguguacuaccacaagaacaacaagagcuggauggagagcgaguuccggguguacagcagcgccaacaacugcaccuucgaguacgugagccagcccuuccugauggaccuggagggcaagcagggcaacuucaagaaccugcgggaguucguguucaagaacaucgacggcuacuucaagaucuacagcaagcacaccccaaucaaccuggugcgggaucugccccagggcuucucagcccuggagccccugguggaccugcccaucggcaucaacaucacccgguuccagacccugcuggcccugcaccggagcuaccugaccccaggcgacagcagcagcggguggacagcaggcgcggcugcuuacuacgugggcuaccugcagccccggaccuuccugcugaaguacaacgagaacggcaccaucaccgacgccguggacugcgcccuggacccucugagcgagaccaagugcacccugaagagcuucaccguggagaagggcaucuaccagaccagcaacuuccgggugcagcccaccgagagcaucgugcgguuccccaacaucaccaaccugugccccuucggcgagguguucaacgccacccgguucgccagcguguacgccuggaaccggaagcggaucagcaacugcguggccgacuacagcgugcuguacaacagcgccagcuucagcaccuucaagugcuacggcgugagccccaccaagcugaacgaccugugcuucaccaacguguacgccgacagcuucgugauccguggcgacgaggugcggcagaucgcacccggccagacaggcaagaucgccgacuacaacuacaagcugcccgacgacuucaccggcugcgugaucgccuggaacagcaacaaccucgacagcaaggugggcggcaacuacaacuaccuguaccggcuguuccggaagagcaaccugaagcccuucgagcgggacaucagcaccgagaucuaccaagccggcuccaccccuugcaacggcguggagggcuucaacugcuacuucccucugcagagcuacggcuuccagcccaccaacggcgugggcuaccagcccuaccgggugguggugcugagcuucgagcugcugcacgccccagccaccguguguggccccaagaagagcaccaaccuggugaagaacaagugcgugaacuucaacuucaacggccuuaccggcaccggcgugcugaccgagagcaacaagaaauuccugcccuuucagcaguucggccgggacaucgccgacaccaccgacgcugugcgggauccccagacccuggagauccuggacaucaccccuugcagcuucggcggcgugagcgugaucaccccaggcaccaacaccagcaaccagguggccgugcuguaccagggcgugaacugcaccgaggugcccguggccauccacgccgaccagcugacacccaccuggcgggucuacagcaccggcagcaacguguuccagacccgggccgguugccugaucggcgccgagcacgugaacaacagcuacgagugcgacauccccaucggcgccggcaucugugccagcuaccagacccagaccaauucaccccggagggcaaggagcguggccagccagagcgugaucgccuacaccaugagccugggcgccgagaacagcguggccuacagcaacaacagcaucgccauccccaccaacuucaccaucagcgugaccaccgagauucugcccgugagcaugaccaagaccagcguggacugcaccauguacaucugcggcgacagcaccgagugcagcaaccugcugcugcaguacggcagcuucugcacccagcugaaccgggcccugaccggcaucgccguggagcaggacaagaacacccaggagguguucgcccaggugaagcagaucuacaagaccccucccaucaaggacuucggcggcuucaacuucagccagauccugcccgaccccagcaagcccagcaagcggagcuucaucgaggaccugcuguucaacaaggugacccuagccgacgccggcuucaucaagcaguacggcgacugccucggcgacauagccgcccgggaccugaucugcgcccagaaguucaacggccugaccgugcugccuccccugcugaccgacgagaugaucgcccaguacaccagcgcccuguuagccggaaccaucaccagcggcuggacuuucggcgcuggagccgcucugcagauccccuucgccaugcagauggccuaccgguucaacggcaucggcgugacccagaacgugcuguacgagaaccagaagcugaucgccaaccaguucaacagcgccaucggcaagauccaggacagccugagcagcaccgcuagcgcccugggcaagcugcaggacguggugaaccagaacgcccaggcccugaacacccuggugaagcagcugagcagcaacuucggcgccaucagcagcgugcugaacgacauccugagccggcuggacaaggucgaggccgaggugcagaucgaccggcugaucacuggccggcugcagagccugcagaccuacgugacccagcagcugauccgggccgccgagauucgggccagcgccaaccuggccgccaccaagaugagcgagugcgugcugggccagagcaagcggguggacuucugcggcaagggcuaccaccugaugagcuuuccccagagcgcaccccacggagugguguuccugcacgugaccuacgugcccgcccaggagaagaacuucaccaccgccccagccaucugccacgacggcaaggcccacuuuccccgggagggcguguucgugagcaacggcacccacugguucgugacccagcggaacuucuacgagccccagaucaucaccaccgacaacaccuucgugagcggcaacugcgacguggugaucggcaucgugaacaacaccguguacgauccccugcagcccgagcuggacagcuucaaggaggagcuggacaaguacuucaagaaucacaccagccccgacguggaccugggcgacaucagcggcaucaacgccagcguggugaacauccagaaggagaucgaucggcugaacgagguggccaagaaccugaacgagagccugaucgaccugcaggagcugggcaaguacgagcaguacaucaaguggcccugguacaucuggcugggcuucaucgccggccugaucgccaucgugauggugaccaucaugcugugcugcaugaccagcugcugcagcugccugaagggcuguugcagcugcggcagcugcugcaaguucgacgaggacgacagcgagcccgugcugaagggcgugaagcugcacuacaccugaggacuagucccuguucccagagcccacuuuuuuuucuuuuuuugaaauaaaauagccugucuuucagaucucaaaggcucuuuucagagccaccaaaaaaaaaaaaaaaaaaaaaaaaaaaaaaaaaaaaaaaaaaaaaaaaaaaaaaaaaaaaaaaaaaaaaaaaaaaaaaaaaaaaaaaaaaaaaaaaaaaaa

SEQ ID NO: 23454 - RNA, 4094 nt, Artificial Sequence
  SARS-CoV-2/Wuhan/WIV05/2019__EPI_ISL_402128 spike protein mRNA gc (1-1273)(D614G_M1229I)
aggagagucccgcagucggcguccagcggcucugcuuguucgugugugugucguugcaggccuuauucaagcuuaccauguucguguuccuggugcugcugccccuggugagcagccagugcgugaaccugaccacccggacccagcugccaccagccuacaccaacagcuucacccggggcgucuacuaccccgacaagguguuccggagcagcguccugcacagcacccaggaccuguuccugcccuucuucagcaacgugaccugguuccacgccauccacgugagcggcaccaacggcaccaagcgguucgacaaccccgugcugcccuucaacgacggcguguacuucgccagcaccgagaagagcaacaucauccggggcuggaucuucggcaccacccuggacagcaagacccagagccugcugaucgugaauaacgccaccaacguggugaucaaggugugcgaguuccaguucugcaacgaccccuuccugggcguguacuaccacaagaacaacaagagcuggauggagagcgaguuccggguguacagcagcgccaacaacugcaccuucgaguacgugagccagcccuuccugauggaccuggagggcaagcagggcaacuucaagaaccugcgggaguucguguucaagaacaucgacggcuacuucaagaucuacagcaagcacaccccaaucaaccuggugcgggaucugccccagggcuucucagcccuggagccccugguggaccugcccaucggcaucaacaucacccgguuccagacccugcuggcccugcaccggagcuaccugaccccaggcgacagcagcagcggguggacagcaggcgcggcugcuuacuacgugggcuaccugcagccccggaccuuccugcugaaguacaacgagaacggcaccaucaccgacgccguggacugcgcccuggacccucugagcgagaccaagugcacccugaagagcuucaccguggagaagggcaucuaccagaccagcaacuuccgggugcagcccaccgagagcaucgugcgguuccccaacaucaccaaccugugccccuucggcgagguguucaacgccacccgguucgccagcguguacgccuggaaccggaagcggaucagcaacugcguggccgacuacagcgugcuguacaacagcgccagcuucagcaccuucaagugcuacggcgugagccccaccaagcugaacgaccugugcuucaccaacguguacgccgacagcuucgugauccguggcgacgaggugcggcagaucgcacccggccagacaggcaagaucgccgacuacaacuacaagcugcccgacgacuucaccggcugcgugaucgccuggaacagcaacaaccucgacagcaaggugggcggcaacuacaacuaccuguaccggcuguuccggaagagcaaccugaagcccuucgagcgggacaucagcaccgagaucuaccaagccggcuccaccccuugcaacggcguggagggcuucaacugcuacuucccucugcagagcuacggcuuccagcccaccaacggcgugggcuaccagcccuaccgggugguggugcugagcuucgagcugcugcacgccccagccaccguguguggccccaagaagagcaccaaccuggugaagaacaagugcgugaacuucaacuucaacggccuuaccggcaccggcgugcugaccgagagcaacaagaaauuccugcccuuucagcaguucggccgggacaucgccgacaccaccgacgcugugcgggauccccagacccuggagauccuggacaucaccccuugcagcuucggcggcgugagcgugaucaccccaggcaccaacaccagcaaccagguggccgugcuguaccagggcgugaacugcaccgaggugcccguggccauccacgccgaccagcugacacccaccuggcgggucuacagcaccggcagcaacguguuccagacccgggccgguugccugaucggcgccgagcacgugaacaacagcuacgagugcgacauccccaucggcgccggcaucugugccagcuaccagacccagaccaauucaccccggagggcaaggagcguggccagccagagcaucaucgccuacaccaugagccugggcgccgagaacagcguggccuacagcaacaacagcaucgccauccccaccaacuucaccaucagcgugaccaccgagauucugcccgugagcaugaccaagaccagcguggacugcaccauguacaucugcggcgacagcaccgagugcagcaaccugcugcugcaguacggcagcuucugcacccagcugaaccgggcccugaccggcaucgccguggagcaggacaagaacacccaggagguguucgcccaggugaagcagaucuacaagaccccucccaucaaggacuucggcggcuucaacuucagccagauccugcccgaccccagcaagcccagcaagcggagcuucaucgaggaccugcuguucaacaaggugacccuagccgacgccggcuucaucaagcaguacggcgacugccucggcgacauagccgcccgggaccugaucugcgcccagaaguucaacggccugaccgugcugccuccccugcugaccgacgagaugaucgcccaguacaccagcgcccuguuagccggaaccaucaccagcggcuggacuuucggcgcuggagccgcucugcagauccccuucgccaugcagauggccuaccgguucaacggcaucggcgugacccagaacgugcuguacgagaaccagaagcugaucgccaaccaguucaacagcgccaucggcaagauccaggacagccugagcagcaccgcuagcgcccugggcaagcugcaggacguggugaaccagaacgcccaggcccugaacacccuggugaagcagcugagcagcaacuucggcgccaucagcagcgugcugaacgacauccugagccggcuggacaaggucgaggccgaggugcagaucgaccggcugaucacuggccggcugcagagccugcagaccuacgugacccagcagcugauccgggccgccgagauucgggccagcgccaaccuggccgccaccaagaugagcgagugcgugcugggccagagcaagcggguggacuucugcggcaagggcuaccaccugaugagcuuuccccagagcgcaccccacggagugguguuccugcacgugaccuacgugcccgcccaggagaagaacuucaccaccgccccagccaucugccacgacggcaaggcccacuuuccccgggagggcguguucgugagcaacggcacccacugguucgugacccagcggaacuucuacgagccccagaucaucaccaccgacaacaccuucgugagcggcaacugcgacguggugaucggcaucgugaacaacaccguguacgauccccugcagcccgagcuggacagcuucaaggaggagcuggacaaguacuucaagaaucacaccagccccgacguggaccugggcgacaucagcggcaucaacgccagcguggugaacauccagaaggagaucgaucggcugaacgagguggccaagaaccugaacgagagccugaucgaccugcaggagcugggcaaguacgagcaguacaucaaguggcccugguacaucuggcugggcuucaucgccggccugaucgccaucgugaucgugaccaucaugcugugcugcaugaccagcugcugcagcugccugaagggcuguugcagcugcggcagcugcugcaaguucgacgaggacgacagcgagcccgugcugaagggcgugaagcugcacuacaccugaggacuagucccuguucccagagcccacuuuuuuuucuuuuuuugaaauaaaauagccugucuuucagaucucaaaggcucuuuucagagccaccaaaaaaaaaaaaaaaaaaaaaaaaaaaaaaaaaaaaaaaaaaaaaaaaaaaaaaaaaaaaaaaaaaaaaaaaaaaaaaaaaaaaaaaaaaaaaaaaaaaaa

SEQ ID NO: 23455 - RNA, 4088 nt, Artificial Sequence
  SARS-CoV-2/Wuhan/WIV05/2019__EPI_ISL_402128 spike protein mRNA gc (1-1273)(H69del_V70del_A222V_Y453F_S477N_D614G_I692V)
aggagagucccgcagucggcguccagcggcucugcuuguucgugugugugucguugcaggccuuauucaagcuuaccauguucguguuccuggugcugcugccccuggugagcagccagugcgugaaccugaccacccggacccagcugccaccagccuacaccaacagcuucacccggggcgucuacuaccccgacaagguguuccggagcagcguccugcacagcacccaggaccuguuccugcccuucuucagcaacgugaccugguuccacgccaucagcggcaccaacggcaccaagcgguucgacaaccccgugcugcccuucaacgacggcguguacuucgccagcaccgagaagagcaacaucauccggggcuggaucuucggcaccacccuggacagcaagacccagagccugcugaucgugaauaacgccaccaacguggugaucaaggugugcgaguuccaguucugcaacgaccccuuccugggcguguacuaccacaagaacaacaagagcuggauggagagcgaguuccggguguacagcagcgccaacaacugcaccuucgaguacgugagccagcccuuccugauggaccuggagggcaagcagggcaacuucaagaaccugcgggaguucguguucaagaacaucgacggcuacuucaagaucuacagcaagcacaccccaaucaaccuggugcgggaucugccccagggcuucucagugcuggagccccugguggaccugcccaucggcaucaacaucacccgguuccagacccugcuggcccugcaccggagcuaccugaccccaggcgacagcagcagcggguggacagcaggcgcggcugcuuacuacgugggcuaccugcagccccggaccuuccugcugaaguacaacgagaacggcaccaucaccgacgccguggacugcgcccuggacccucugagcgagaccaagugcacccugaagagcuucaccguggagaagggcaucuaccagaccagcaacuuccgggugcagcccaccgagagcaucgugcgguuccccaacaucaccaaccugugccccuucggcgagguguucaacgccacccgguucgccagcguguacgccuggaaccggaagcggaucagcaacugcguggccgacuacagcgugcuguacaacagcgccagcuucagcaccuucaagugcuacggcgugagccccaccaagcugaacgaccugugcuucaccaacguguacgccgacagcuucgugauccguggcgacgaggugcggcagaucgcacccggccagacaggcaagaucgccgacuacaacuacaagcugcccgacgacuucaccggcugcgugaucgccuggaacagcaacaaccucgacagcaaggugggcggcaacuacaacuaccuguuccggcuguuccggaagagcaaccugaagcccuucgagcgggacaucagcaccgagaucuaccaagccggcaacaccccuugcaacggcguggagggcuucaacugcuacuucccucugcagagcuacggcuuccagcccaccaacggcgugggcuaccagcccuaccgggugguggugcugagcuucgagcugcugcacgccccagccaccguguguggccccaagaagagcaccaaccuggugaagaacaagugcgugaacuucaacuucaacggccuuaccggcaccggcgugcugaccgagagcaacaagaaauuccugcccuuucagcaguucggccgggacaucgccgacaccaccgacgcugugcgggauccccagacccuggagauccuggacaucaccccuugcagcuucggcggcgugagcgugaucaccccaggcaccaacaccagcaaccagguggccgugcuguaccagggcgugaacugcaccgaggugcccguggccauccacgccgaccagcugacacccaccuggcgggucuacagcaccggcagcaacguguuccagacccgggccgguugccugaucggcgccgagcacgugaacaacagcuacgagugcgacauccccaucggcgccggcaucugugccagcuaccagacccagaccaauucaccccggagggcaaggagcguggccagccagagcgugaucgccuacaccaugagccugggcgccgagaacagcguggccuacagcaacaacagcaucgccauccccaccaacuucaccaucagcgugaccaccgagauucugcccgugagcaugaccaagaccagcguggacugcaccauguacaucugcggcgacagcaccgagugcagcaaccugcugcugcaguacggcagcuucugcacccagcugaaccgggcccugaccggcaucgccguggagcaggacaagaacacccaggagguguucgcccaggugaagcagaucuacaagaccccucccaucaaggacuucggcggcuucaacuucagccagauccugcccgaccccagcaagcccagcaagcggagcuucaucgaggaccugcuguucaacaaggugacccuagccgacgccggcuucaucaagcaguacggcgacugccucggcgacauagccgcccgggaccugaucugcgcccagaaguucaacggccugaccgugcugccuccccugcugaccgacgagaugaucgcccaguacaccagcgcccuguuagccggaaccaucaccagcggcuggacuuucggcgcuggagccgcucugcagauccccuucgccaugcagauggccuaccgguucaacggcaucggcgugacccagaacgugcuguacgagaaccagaagcugaucgccaaccaguucaacagcgccaucggcaagauccaggacagccugagcagcaccgcuagcgcccugggcaagcugcaggacguggugaaccagaacgcccaggcccugaacacccuggugaagcagcugagcagcaacuucggcgccaucagcagcgugcugaacgacauccugagccggcuggacaaggucgaggccgaggugcagaucgaccggcugaucacuggccggcugcagagccugcagaccuacgugacccagcagcugauccgggccgccgagauucgggccagcgccaaccuggccgccaccaagaugagcgagugcgugcugggccagagcaagcggguggacuucugcggcaagggcuaccaccugaugagcuuuccccagagcgcaccccacggagugguguuccugcacgugaccuacgugcccgcccaggagaagaacuucaccaccgccccagccaucugccacgacggcaaggcccacuuuccccgggagggcguguucgugagcaacggcacccacugguucgugacccagcggaacuucuacgagccccagaucaucaccaccgacaacaccuucgugagcggcaacugcgacguggugaucggcaucgugaacaacaccguguacgauccccugcagcccgagcuggacagcuucaaggaggagcuggacaaguacuucaagaaucacaccagccccgacguggaccugggcgacaucagcggcaucaacgccagcguggugaacauccagaaggagaucgaucggcugaacgagguggccaagaaccugaacgagagccugaucgaccugcaggagcugggcaaguacgagcaguacaucaaguggcccugguacaucuggcugggcuucaucgccggccugaucgccaucgugauggugaccaucaugcugugcugcaugaccagcugcugcagcugccugaagggcuguugcagcugcggcagcugcugcaaguucgacgaggacgacagcgagcccgugcugaagggcgugaagcugcacuacaccugaggacuagucccuguucccagagcccacuuuuuuuucuuuuuuugaaauaaaauagccugucuuucagaucucaaaggcucuuuucagagccaccaaaaaaaaaaaaaaaaaaaaaaaaaaaaaaaaaaaaaaaaaaaaaaaaaaaaaaaaaaaaaaaaaaaaaaaaaaaaaaaaaaaaaaaaaaaaaaaaaaaaa

SEQ ID NO: 23456 - RNA, 4088 nt, Artificial Sequence
  SARS-CoV-2/Wuhan/WIV05/2019__EPI_ISL_402128 spike protein mRNA gc (1-1273)(H69del_V70del_Y453F_D614G_I692V_M1229I)
aggagagucccgcagucggcguccagcggcucugcuuguucgugugugugucguugcaggccuuauucaagcuuaccauguucguguuccuggugcugcugccccuggugagcagccagugcgugaaccugaccacccggacccagcugccaccagccuacaccaacagcuucacccggggcgucuacuaccccgacaagguguuccggagcagcguccugcacagcacccaggaccuguuccugcccuucuucagcaacgugaccugguuccacgccaucagcggcaccaacggcaccaagcgguucgacaaccccgugcugcccuucaacgacggcguguacuucgccagcaccgagaagagcaacaucauccggggcuggaucuucggcaccacccuggacagcaagacccagagccugcugaucgugaauaacgccaccaacguggugaucaaggugugcgaguuccaguucugcaacgaccccuuccugggcguguacuaccacaagaacaacaagagcuggauggagagcgaguuccggguguacagcagcgccaacaacugcaccuucgaguacgugagccagcccuuccugauggaccuggagggcaagcagggcaacuucaagaaccugcgggaguucguguucaagaacaucgacggcuacuucaagaucuacagcaagcacaccccaaucaaccuggugcgggaucugccccagggcuucucagcccuggagccccugguggaccugcccaucggcaucaacaucacccgguuccagacccugcuggcccugcaccggagcuaccugaccccaggcgacagcagcagcggguggacagcaggcgcggcugcuuacuacgugggcuaccugcagccccggaccuuccugcugaaguacaacgagaacggcaccaucaccgacgccguggacugcgcccuggacccucugagcgagaccaagugcacccugaagagcuucaccguggagaagggcaucuaccagaccagcaacuuccgggugcagcccaccgagagcaucgugcgguuccccaacaucaccaaccugugccccuucggcgagguguucaacgccacccgguucgccagcguguacgccuggaaccggaagcggaucagcaacugcguggccgacuacagcgugcuguacaacagcgccagcuucagcaccuucaagugcuacggcgugagccccaccaagcugaacgaccugugcuucaccaacguguacgccgacagcuucgugauccguggcgacgaggugcggcagaucgcacccggccagacaggcaagaucgccgacuacaacuacaagcugcccgacgacuucaccggcugcgugaucgccuggaacagcaacaaccucgacagcaaggugggcggcaacuacaacuaccuguuccggcuguuccggaagagcaaccugaagcccuucgagcgggacaucagcaccgagaucuaccaagccggcuccaccccuugcaacggcguggagggcuucaacugcuacuucccucugcagagcuacggcuuccagcccaccaacggcgugggcuaccagcccuaccgggugguggugcugagcuucgagcugcugcacgccccagccaccguguguggccccaagaagagcaccaaccuggugaagaacaagugcgugaacuucaacuucaacggccuuaccggcaccggcgugcugaccgagagcaacaagaaauuccugcccuuucagcaguucggccgggacaucgccgacaccaccgacgcugugcgggauccccagacccuggagauccuggacaucaccccuugcagcuucggcggcgugagcgugaucaccccaggcaccaacaccagcaaccagguggccgugcuguaccagggcgugaacugcaccgaggugcccguggccauccacgccgaccagcugacacccaccuggcgggucuacagcaccggcagcaacguguuccagacccgggccgguugccugaucggcgccgagcacgugaacaacagcuacgagugcgacauccccaucggcgccggcaucugugccagcuaccagacccagaccaauucaccccggagggcaaggagcguggccagccagagcgugaucgccuacaccaugagccugggcgccgagaacagcguggccuacagcaacaacagcaucgccauccccaccaacuucaccaucagcgugaccaccgagauucugcccgugagcaugaccaagaccagcguggacugcaccauguacaucugcggcgacagcaccgagugcagcaaccugcugcugcaguacggcagcuucugcacccagcugaaccgggcccugaccggcaucgccguggagcaggacaagaacacccaggagguguucgcccaggugaagcagaucuacaagaccccucccaucaaggacuucggcggcuucaacuucagccagauccugcccgaccccagcaagcccagcaagcggagcuucaucgaggaccugcuguucaacaaggugacccuagccgacgccggcuucaucaagcaguacggcgacugccucggcgacauagccgcccgggaccugaucugcgcccagaaguucaacggccugaccgugcugccuccccugcugaccgacgagaugaucgcccaguacaccagcgcccuguuagccggaaccaucaccagcggcuggacuuucggcgcuggagccgcucugcagauccccuucgccaugcagauggccuaccgguucaacggcaucggcgugacccagaacgugcuguacgagaaccagaagcugaucgccaaccaguucaacagcgccaucggcaagauccaggacagccugagcagcaccgcuagcgcccugggcaagcugcaggacguggugaaccagaacgcccaggcccugaacacccuggugaagcagcugagcagcaacuucggcgccaucagcagcgugcugaacgacauccugagccggcuggacaaggucgaggccgaggugcagaucgaccggcugaucacuggccggcugcagagccugcagaccuacgugacccagcagcugauccgggccgccgagauucgggccagcgccaaccuggccgccaccaagaugagcgagugcgugcugggccagagcaagcggguggacuucugcggcaagggcuaccaccugaugagcuuuccccagagcgcaccccacggagugguguuccugcacgugaccuacgugcccgcccaggagaagaacuucaccaccgccccagccaucugccacgacggcaaggcccacuuuccccgggagggcguguucgugagcaacggcacccacugguucgugacccagcggaacuucuacgagccccagaucaucaccaccgacaacaccuucgugagcggcaacugcgacguggugaucggcaucgugaacaacaccguguacgauccccugcagcccgagcuggacagcuucaaggaggagcuggacaaguacuucaagaaucacaccagccccgacguggaccugggcgacaucagcggcaucaacgccagcguggugaacauccagaaggagaucgaucggcugaacgagguggccaagaaccugaacgagagccugaucgaccugcaggagcugggcaaguacgagcaguacaucaaguggcccugguacaucuggcugggcuucaucgccggccugaucgccaucgugaucgugaccaucaugcugugcugcaugaccagcugcugcagcugccugaagggcuguugcagcugcggcagcugcugcaaguucgacgaggacgacagcgagcccgugcugaagggcgugaagcugcacuacaccugaggacuagucccuguucccagagcccacuuuuuuuucuuuuuuugaaauaaaauagccugucuuucagaucucaaaggcucuuuucagagccaccaaaaaaaaaaaaaaaaaaaaaaaaaaaaaaaaaaaaaaaaaaaaaaaaaaaaaaaaaaaaaaaaaaaaaaaaaaaaaaaaaaaaaaaaaaaaaaaaaaaaa

SEQ ID NO: 23457 - RNA, 4085 nt, Artificial Sequence
  SARS-CoV-2/Wuhan/WIV05/2019__EPI_ISL_402128 spike protein mRNA gc (1-1273)(H69del_V70del_Y144del_N501Y_A570D_D614G_P681H_T716I_S982 A_D1118H)
aggagagucccgcagucggcguccagcggcucugcuuguucgugugugugucguugcaggccuuauucaagcuuaccauguucguguuccuggugcugcugccccuggugagcagccagugcgugaaccugaccacccggacccagcugccaccagccuacaccaacagcuucacccggggcgucuacuaccccgacaagguguuccggagcagcguccugcacagcacccaggaccuguuccugcccuucuucagcaacgugaccugguuccacgccaucagcggcaccaacggcaccaagcgguucgacaaccccgugcugcccuucaacgacggcguguacuucgccagcaccgagaagagcaacaucauccggggcuggaucuucggcaccacccuggacagcaagacccagagccugcugaucgugaauaacgccaccaacguggugaucaaggugugcgaguuccaguucugcaacgaccccuuccugggcguguaccacaagaacaacaagagcuggauggagagcgaguuccggguguacagcagcgccaacaacugcaccuucgaguacgugagccagcccuuccugauggaccuggagggcaagcagggcaacuucaagaaccugcgggaguucguguucaagaacaucgacggcuacuucaagaucuacagcaagcacaccccaaucaaccuggugcgggaucugccccagggcuucucagcccuggagccccugguggaccugcccaucggcaucaacaucacccgguuccagacccugcuggcccugcaccggagcuaccugaccccaggcgacagcagcagcggguggacagcaggcgcggcugcuuacuacgugggcuaccugcagccccggaccuuccugcugaaguacaacgagaacggcaccaucaccgacgccguggacugcgcccuggacccucugagcgagaccaagugcacccugaagagcuucaccguggagaagggcaucuaccagaccagcaacuuccgggugcagcccaccgagagcaucgugcgguuccccaacaucaccaaccugugccccuucggcgagguguucaacgccacccgguucgccagcguguacgccuggaaccggaagcggaucagcaacugcguggccgacuacagcgugcuguacaacagcgccagcuucagcaccuucaagugcuacggcgugagccccaccaagcugaacgaccugugcuucaccaacguguacgccgacagcuucgugauccguggcgacgaggugcggcagaucgcacccggccagacaggcaagaucgccgacuacaacuacaagcugcccgacgacuucaccggcugcgugaucgccuggaacagcaacaaccucgacagcaaggugggcggcaacuacaacuaccuguaccggcuguuccggaagagcaaccugaagcccuucgagcgggacaucagcaccgagaucuaccaagccggcuccaccccuugcaacggcguggagggcuucaacugcuacuucccucugcagagcuacggcuuccagcccaccuacggcgugggcuaccagcccuaccgggugguggugcugagcuucgagcugcugcacgccccagccaccguguguggccccaagaagagcaccaaccuggugaagaacaagugcgugaacuucaacuucaacggccuuaccggcaccggcgugcugaccgagagcaacaagaaauuccugcccuuucagcaguucggccgggacaucgacgacaccaccgacgcugugcgggauccccagacccuggagauccuggacaucaccccuugcagcuucggcggcgugagcgugaucaccccaggcaccaacaccagcaaccagguggccgugcuguaccagggcgugaacugcaccgaggugcccguggccauccacgccgaccagcugacacccaccuggcgggucuacagcaccggcagcaacguguuccagacccgggccgguugccugaucggcgccgagcacgugaacaacagcuacgagugcgacauccccaucggcgccggcaucugugccagcuaccagacccagaccaauucacaccggagggcaaggagcguggccagccagagcaucaucgccuacaccaugagccugggcgccgagaacagcguggccuacagcaacaacagcaucgccauccccaucaacuucaccaucagcgugaccaccgagauucugcccgugagcaugaccaagaccagcguggacugcaccauguacaucugcggcgacagcaccgagugcagcaaccugcugcugcaguacggcagcuucugcacccagcugaaccgggcccugaccggcaucgccguggagcaggacaagaacacccaggagguguucgcccaggugaagcagaucuacaagaccccucccaucaaggacuucggcggcuucaacuucagccagauccugcccgaccccagcaagcccagcaagcggagcuucaucgaggaccugcuguucaacaaggugacccuagccgacgccggcuucaucaagcaguacggcgacugccucggcgacauagccgcccgggaccugaucugcgcccagaaguucaacggccugaccgugcugccuccccugcugaccgacgagaugaucgcccaguacaccagcgcccuguuagccggaaccaucaccagcggcuggacuuucggcgcuggagccgcucugcagauccccuucgccaugcagauggccuaccgguucaacggcaucggcgugacccagaacgugcuguacgagaaccagaagcugaucgccaaccaguucaacagcgccaucggcaagauccaggacagccugagcagcaccgcuagcgcccugggcaagcugcaggacguggugaaccagaacgcccaggcccugaacacccuggugaagcagcugagcagcaacuucggcgccaucagcagcgugcugaacgacauccuggcccggcuggacaaggucgaggccgaggugcagaucgaccggcugaucacuggccggcugcagagccugcagaccuacgugacccagcagcugauccgggccgccgagauucgggccagcgccaaccuggccgccaccaagaugagcgagugcgugcugggccagagcaagcggguggacuucugcggcaagggcuaccaccugaugagcuuuccccagagcgcaccccacggagugguguuccugcacgugaccuacgugcccgcccaggagaagaacuucaccaccgccccagccaucugccacgacggcaaggcccacuuuccccgggagggcguguucgugagcaacggcacccacugguucgugacccagcggaacuucuacgagccccagaucaucaccacccacaacaccuucgugagcggcaacugcgacguggugaucggcaucgugaacaacaccguguacgauccccugcagcccgagcuggacagcuucaaggaggagcuggacaaguacuucaagaaucacaccagccccgacguggaccugggcgacaucagcggcaucaacgccagcguggugaacauccagaaggagaucgaucggcugaacgagguggccaagaaccugaacgagagccugaucgaccugcaggagcugggcaaguacgagcaguacaucaaguggcccugguacaucuggcugggcuucaucgccggccugaucgccaucgugauggugaccaucaugcugugcugcaugaccagcugcugcagcugccugaagggcuguugcagcugcggcagcugcugcaaguucgacgaggacgacagcgagcccgugcugaagggcgugaagcugcacuacaccugaggacuagucccuguucccagagcccacuuuuuuuucuuuuuuugaaauaaaauagccugucuuucagaucucaaaggcucuuuucagagccaccaaaaaaaaaaaaaaaaaaaaaaaaaaaaaaaaaaaaaaaaaaaaaaaaaaaaaaaaaaaaaaaaaaaaaaaaaaaaaaaaaaaaaaaaaaaaaaaaaaaaa

SEQ ID NO: 23458 - RNA, 4094 nt, Artificial Sequence
  SARS-CoV-2/Wuhan/WIV05/2019__EPI_ISL_402128 spike protein mRNA gc (1-1273)(K417N_E484K_N501Y_D614G)
aggagagucccgcagucggcguccagcggcucugcuuguucgugugugugucguugcaggccuuauucaagcuuaccauguucguguuccuggugcugcugccccuggugagcagccagugcgugaaccugaccacccggacccagcugccaccagccuacaccaacagcuucacccggggcgucuacuaccccgacaagguguuccggagcagcguccugcacagcacccaggaccuguuccugcccuucuucagcaacgugaccugguuccacgccauccacgugagcggcaccaacggcaccaagcgguucgacaaccccgugcugcccuucaacgacggcguguacuucgccagcaccgagaagagcaacaucauccggggcuggaucuucggcaccacccuggacagcaagacccagagccugcugaucgugaauaacgccaccaacguggugaucaaggugugcgaguuccaguucugcaacgaccccuuccugggcguguacuaccacaagaacaacaagagcuggauggagagcgaguuccggguguacagcagcgccaacaacugcaccuucgaguacgugagccagcccuuccugauggaccuggagggcaagcagggcaacuucaagaaccugcgggaguucguguucaagaacaucgacggcuacuucaagaucuacagcaagcacaccccaaucaaccuggugcgggaucugccccagggcuucucagcccuggagccccugguggaccugcccaucggcaucaacaucacccgguuccagacccugcuggcccugcaccggagcuaccugaccccaggcgacagcagcagcggguggacagcaggcgcggcugcuuacuacgugggcuaccugcagccccggaccuuccugcugaaguacaacgagaacggcaccaucaccgacgccguggacugcgcccuggacccucugagcgagaccaagugcacccugaagagcuucaccguggagaagggcaucuaccagaccagcaacuuccgggugcagcccaccgagagcaucgugcgguuccccaacaucaccaaccugugccccuucggcgagguguucaacgccacccgguucgccagcguguacgccuggaaccggaagcggaucagcaacugcguggccgacuacagcgugcuguacaacagcgccagcuucagcaccuucaagugcuacggcgugagccccaccaagcugaacgaccugugcuucaccaacguguacgccgacagcuucgugauccguggcgacgaggugcggcagaucgcacccggccagacaggcaacaucgccgacuacaacuacaagcugcccgacgacuucaccggcugcgugaucgccuggaacagcaacaaccucgacagcaaggugggcggcaacuacaacuaccuguaccggcuguuccggaagagcaaccugaagcccuucgagcgggacaucagcaccgagaucuaccaagccggcuccaccccuugcaacggcgugaagggcuucaacugcuacuucccucugcagagcuacggcuuccagcccaccuacggcgugggcuaccagcccuaccgggugguggugcugagcuucgagcugcugcacgccccagccaccguguguggccccaagaagagcaccaaccuggugaagaacaagugcgugaacuucaacuucaacggccuuaccggcaccggcgugcugaccgagagcaacaagaaauuccugcccuuucagcaguucggccgggacaucgccgacaccaccgacgcugugcgggauccccagacccuggagauccuggacaucaccccuugcagcuucggcggcgugagcgugaucaccccaggcaccaacaccagcaaccagguggccgugcuguaccagggcgugaacugcaccgaggugcccguggccauccacgccgaccagcugacacccaccuggcgggucuacagcaccggcagcaacguguuccagacccgggccgguugccugaucggcgccgagcacgugaacaacagcuacgagugcgacauccccaucggcgccggcaucugugccagcuaccagacccagaccaauucaccccggagggcaaggagcguggccagccagagcaucaucgccuacaccaugagccugggcgccgagaacagcguggccuacagcaacaacagcaucgccauccccaccaacuucaccaucagcgugaccaccgagauucugcccgugagcaugaccaagaccagcguggacugcaccauguacaucugcggcgacagcaccgagugcagcaaccugcugcugcaguacggcagcuucugcacccagcugaaccgggcccugaccggcaucgccguggagcaggacaagaacacccaggagguguucgcccaggugaagcagaucuacaagaccccucccaucaaggacuucggcggcuucaacuucagccagauccugcccgaccccagcaagcccagcaagcggagcuucaucgaggaccugcuguucaacaaggugacccuagccgacgccggcuucaucaagcaguacggcgacugccucggcgacauagccgcccgggaccugaucugcgcccagaaguucaacggccugaccgugcugccuccccugcugaccgacgagaugaucgcccaguacaccagcgcccuguuagccggaaccaucaccagcggcuggacuuucggcgcuggagccgcucugcagauccccuucgccaugcagauggccuaccgguucaacggcaucggcgugacccagaacgugcuguacgagaaccagaagcugaucgccaaccaguucaacagcgccaucggcaagauccaggacagccugagcagcaccgcuagcgcccugggcaagcugcaggacguggugaaccagaacgcccaggcccugaacacccuggugaagcagcugagcagcaacuucggcgccaucagcagcgugcugaacgacauccugagccggcuggacaaggucgaggccgaggugcagaucgaccggcugaucacuggccggcugcagagccugcagaccuacgugacccagcagcugauccgggccgccgagauucgggccagcgccaaccuggccgccaccaagaugagcgagugcgugcugggccagagcaagcggguggacuucugcggcaagggcuaccaccugaugagcuuuccccagagcgcaccccacggagugguguuccugcacgugaccuacgugcccgcccaggagaagaacuucaccaccgccccagccaucugccacgacggcaaggcccacuuuccccgggagggcguguucgugagcaacggcacccacugguucgugacccagcggaacuucuacgagccccagaucaucaccaccgacaacaccuucgugagcggcaacugcgacguggugaucggcaucgugaacaacaccguguacgauccccugcagcccgagcuggacagcuucaaggaggagcuggacaaguacuucaagaaucacaccagccccgacguggaccugggcgacaucagcggcaucaacgccagcguggugaacauccagaaggagaucgaucggcugaacgagguggccaagaaccugaacgagagccugaucgaccugcaggagcugggcaaguacgagcaguacaucaaguggcccugguacaucuggcugggcuucaucgccggccugaucgccaucgugauggugaccaucaugcugugcugcaugaccagcugcugcagcugccugaagggcuguugcagcugcggcagcugcugcaaguucgacgaggacgacagcgagcccgugcugaagggcgugaagcugcacuacaccugaggacuagucccuguucccagagcccacuuuuuuuucuuuuuuugaaauaaaauagccugucuuucagaucucaaaggcucuuuucagagccaccaaaaaaaaaaaaaaaaaaaaaaaaaaaaaaaaaaaaaaaaaaaaaaaaaaaaaaaaaaaaaaaaaaaaaaaaaaaaaaaaaaaaaaaaaaaaaaaaaaaaa

SEQ ID NO: 23459 - RNA, 4085 nt, Artificial Sequence
  SARS-CoV-2/Wuhan/WIV05/2019__EPI_ISL_402128 spike protein mRNA gc (1-1273)(L18F_D80A_D215G_L242del_A243del_L244del_R246I_K417N_E484 K_N501Y_D614G_A701V)
aggagagucccgcagucggcguccagcggcucugcuuguucgugugugugucguugcaggccuuauucaagcuuaccauguucguguuccuggugcugcugccccuggugagcagccagugcgugaacuucaccacccggacccagcugccaccagccuacaccaacagcuucacccggggcgucuacuaccccgacaagguguuccggagcagcguccugcacagcacccaggaccuguuccugcccuucuucagcaacgugaccugguuccacgccauccacgugagcggcaccaacggcaccaagcgguucgccaaccccgugcugcccuucaacgacggcguguacuucgccagcaccgagaagagcaacaucauccggggcuggaucuucggcaccacccuggacagcaagacccagagccugcugaucgugaauaacgccaccaacguggugaucaaggugugcgaguuccaguucugcaacgaccccuuccugggcguguacuaccacaagaacaacaagagcuggauggagagcgaguuccggguguacagcagcgccaacaacugcaccuucgaguacgugagccagcccuuccugauggaccuggagggcaagcagggcaacuucaagaaccugcgggaguucguguucaagaacaucgacggcuacuucaagaucuacagcaagcacaccccaaucaaccuggugcggggccugccccagggcuucucagcccuggagccccugguggaccugcccaucggcaucaacaucacccgguuccagacccugcacaucagcuaccugaccccaggcgacagcagcagcggguggacagcaggcgcggcugcuuacuacgugggcuaccugcagccccggaccuuccugcugaaguacaacgagaacggcaccaucaccgacgccguggacugcgcccuggacccucugagcgagaccaagugcacccugaagagcuucaccguggagaagggcaucuaccagaccagcaacuuccgggugcagcccaccgagagcaucgugcgguuccccaacaucaccaaccugugccccuucggcgagguguucaacgccacccgguucgccagcguguacgccuggaaccggaagcggaucagcaacugcguggccgacuacagcgugcuguacaacagcgccagcuucagcaccuucaagugcuacggcgugagccccaccaagcugaacgaccugugcuucaccaacguguacgccgacagcuucgugauccguggcgacgaggugcggcagaucgcacccggccagacaggcaacaucgccgacuacaacuacaagcugcccgacgacuucaccggcugcgugaucgccuggaacagcaacaaccucgacagcaaggugggcggcaacuacaacuaccuguaccggcuguuccggaagagcaaccugaagcccuucgagcgggacaucagcaccgagaucuaccaagccggcuccaccccuugcaacggcgugaagggcuucaacugcuacuucccucugcagagcuacggcuuccagcccaccuacggcgugggcuaccagcccuaccgggugguggugcugagcuucgagcugcugcacgccccagccaccguguguggccccaagaagagcaccaaccuggugaagaacaagugcgugaacuucaacuucaacggccuuaccggcaccggcgugcugaccgagagcaacaagaaauuccugcccuuucagcaguucggccgggacaucgccgacaccaccgacgcugugcgggauccccagacccuggagauccuggacaucaccccuugcagcuucggcggcgugagcgugaucaccccaggcaccaacaccagcaaccagguggccgugcuguaccagggcgugaacugcaccgaggugcccguggccauccacgccgaccagcugacacccaccuggcgggucuacagcaccggcagcaacguguuccagacccgggccgguugccugaucggcgccgagcacgugaacaacagcuacgagugcgacauccccaucggcgccggcaucugugccagcuaccagacccagaccaauucaccccggagggcaaggagcguggccagccagagcaucaucgccuacaccaugagccugggcguggagaacagcguggccuacagcaacaacagcaucgccauccccaccaacuucaccaucagcgugaccaccgagauucugcccgugagcaugaccaagaccagcguggacugcaccauguacaucugcggcgacagcaccgagugcagcaaccugcugcugcaguacggcagcuucugcacccagcugaaccgggcccugaccggcaucgccguggagcaggacaagaacacccaggagguguucgcccaggugaagcagaucuacaagaccccucccaucaaggacuucggcggcuucaacuucagccagauccugcccgaccccagcaagcccagcaagcggagcuucaucgaggaccugcuguucaacaaggugacccuagccgacgccggcuucaucaagcaguacggcgacugccucggcgacauagccgcccgggaccugaucugcgcccagaaguucaacggccugaccgugcugccuccccugcugaccgacgagaugaucgcccaguacaccagcgcccuguuagccggaaccaucaccagcggcuggacuuucggcgcuggagccgcucugcagauccccuucgccaugcagauggccuaccgguucaacggcaucggcgugacccagaacgugcuguacgagaaccagaagcugaucgccaaccaguucaacagcgccaucggcaagauccaggacagccugagcagcaccgcuagcgcccugggcaagcugcaggacguggugaaccagaacgcccaggcccugaacacccuggugaagcagcugagcagcaacuucggcgccaucagcagcgugcugaacgacauccugagccggcuggacaaggucgaggccgaggugcagaucgaccggcugaucacuggccggcugcagagccugcagaccuacgugacccagcagcugauccgggccgccgagauucgggccagcgccaaccuggccgccaccaagaugagcgagugcgugcugggccagagcaagcggguggacuucugcggcaagggcuaccaccugaugagcuuuccccagagcgcaccccacggagugguguuccugcacgugaccuacgugcccgcccaggagaagaacuucaccaccgccccagccaucugccacgacggcaaggcccacuuuccccgggagggcguguucgugagcaacggcacccacugguucgugacccagcggaacuucuacgagccccagaucaucaccaccgacaacaccuucgugagcggcaacugcgacguggugaucggcaucgugaacaacaccguguacgauccccugcagcccgagcuggacagcuucaaggaggagcuggacaaguacuucaagaaucacaccagccccgacguggaccugggcgacaucagcggcaucaacgccagcguggugaacauccagaaggagaucgaucggcugaacgagguggccaagaaccugaacgagagccugaucgaccugcaggagcugggcaaguacgagcaguacaucaaguggcccugguacaucuggcugggcuucaucgccggccugaucgccaucgugauggugaccaucaugcugugcugcaugaccagcugcugcagcugccugaagggcuguugcagcugcggcagcugcugcaaguucgacgaggacgacagcgagcccgugcugaagggcgugaagcugcacuacaccugaggacuagucccuguucccagagcccacuuuuuuuucuuuuuuugaaauaaaauagccugucuuucagaucucaaaggcucuuuucagagccaccaaaaaaaaaaaaaaaaaaaaaaaaaaaaaaaaaaaaaaaaaaaaaaaaaaaaaaaaaaaaaaaaaaaaaaaaaaaaaaaaaaaaaaaaaaaaaaaaaaaaa

SEQ ID NO: 23460 - RNA, 4094 nt, Artificial Sequence
  SARS-CoV-2/Wuhan/WIV05/2019__EPI_ISL_402128 spike protein mRNA gc (1-1273)(E484K_D614G)
aggagagucccgcagucggcguccagcggcucugcuuguucgugugugugucguugcaggccuuauucaagcuuaccauguucguguuccuggugcugcugccccuggugagcagccagugcgugaaccugaccacccggacccagcugccaccagccuacaccaacagcuucacccggggcgucuacuaccccgacaagguguuccggagcagcguccugcacagcacccaggaccuguuccugcccuucuucagcaacgugaccugguuccacgccauccacgugagcggcaccaacggcaccaagcgguucgacaaccccgugcugcccuucaacgacggcguguacuucgccagcaccgagaagagcaacaucauccggggcuggaucuucggcaccacccuggacagcaagacccagagccugcugaucgugaauaacgccaccaacguggugaucaaggugugcgaguuccaguucugcaacgaccccuuccugggcguguacuaccacaagaacaacaagagcuggauggagagcgaguuccggguguacagcagcgccaacaacugcaccuucgaguacgugagccagcccuuccugauggaccuggagggcaagcagggcaacuucaagaaccugcgggaguucguguucaagaacaucgacggcuacuucaagaucuacagcaagcacaccccaaucaaccuggugcgggaucugccccagggcuucucagcccuggagccccugguggaccugcccaucggcaucaacaucacccgguuccagacccugcuggcccugcaccggagcuaccugaccccaggcgacagcagcagcggguggacagcaggcgcggcugcuuacuacgugggcuaccugcagccccggaccuuccugcugaaguacaacgagaacggcaccaucaccgacgccguggacugcgcccuggacccucugagcgagaccaagugcacccugaagagcuucaccguggagaagggcaucuaccagaccagcaacuuccgggugcagcccaccgagagcaucgugcgguuccccaacaucaccaaccugugccccuucggcgagguguucaacgccacccgguucgccagcguguacgccuggaaccggaagcggaucagcaacugcguggccgacuacagcgugcuguacaacagcgccagcuucagcaccuucaagugcuacggcgugagccccaccaagcugaacgaccugugcuucaccaacguguacgccgacagcuucgugauccguggcgacgaggugcggcagaucgcacccggccagacaggcaagaucgccgacuacaacuacaagcugcccgacgacuucaccggcugcgugaucgccuggaacagcaacaaccucgacagcaaggugggcggcaacuacaacuaccuguaccggcuguuccggaagagcaaccugaagcccuucgagcgggacaucagcaccgagaucuaccaagccggcuccaccccuugcaacggcgugaagggcuucaacugcuacuucccucugcagagcuacggcuuccagcccaccaacggcgugggcuaccagcccuaccgggugguggugcugagcuucgagcugcugcacgccccagccaccguguguggccccaagaagagcaccaaccuggugaagaacaagugcgugaacuucaacuucaacggccuuaccggcaccggcgugcugaccgagagcaacaagaaauuccugcccuuucagcaguucggccgggacaucgccgacaccaccgacgcugugcgggauccccagacccuggagauccuggacaucaccccuugcagcuucggcggcgugagcgugaucaccccaggcaccaacaccagcaaccagguggccgugcuguaccagggcgugaacugcaccgaggugcccguggccauccacgccgaccagcugacacccaccuggcgggucuacagcaccggcagcaacguguuccagacccgggccgguugccugaucggcgccgagcacgugaacaacagcuacgagugcgacauccccaucggcgccggcaucugugccagcuaccagacccagaccaauucaccccggagggcaaggagcguggccagccagagcaucaucgccuacaccaugagccugggcgccgagaacagcguggccuacagcaacaacagcaucgccauccccaccaacuucaccaucagcgugaccaccgagauucugcccgugagcaugaccaagaccagcguggacugcaccauguacaucugcggcgacagcaccgagugcagcaaccugcugcugcaguacggcagcuucugcacccagcugaaccgggcccugaccggcaucgccguggagcaggacaagaacacccaggagguguucgcccaggugaagcagaucuacaagaccccucccaucaaggacuucggcggcuucaacuucagccagauccugcccgaccccagcaagcccagcaagcggagcuucaucgaggaccugcuguucaacaaggugacccuagccgacgccggcuucaucaagcaguacggcgacugccucggcgacauagccgcccgggaccugaucugcgcccagaaguucaacggccugaccgugcugccuccccugcugaccgacgagaugaucgcccaguacaccagcgcccuguuagccggaaccaucaccagcggcuggacuuucggcgcuggagccgcucugcagauccccuucgccaugcagauggccuaccgguucaacggcaucggcgugacccagaacgugcuguacgagaaccagaagcugaucgccaaccaguucaacagcgccaucggcaagauccaggacagccugagcagcaccgcuagcgcccugggcaagcugcaggacguggugaaccagaacgcccaggcccugaacacccuggugaagcagcugagcagcaacuucggcgccaucagcagcgugcugaacgacauccugagccggcuggacaaggucgaggccgaggugcagaucgaccggcugaucacuggccggcugcagagccugcagaccuacgugacccagcagcugauccgggccgccgagauucgggccagcgccaaccuggccgccaccaagaugagcgagugcgugcugggccagagcaagcggguggacuucugcggcaagggcuaccaccugaugagcuuuccccagagcgcaccccacggagugguguuccugcacgugaccuacgugcccgcccaggagaagaacuucaccaccgccccagccaucugccacgacggcaaggcccacuuuccccgggagggcguguucgugagcaacggcacccacugguucgugacccagcggaacuucuacgagccccagaucaucaccaccgacaacaccuucgugagcggcaacugcgacguggugaucggcaucgugaacaacaccguguacgauccccugcagcccgagcuggacagcuucaaggaggagcuggacaaguacuucaagaaucacaccagccccgacguggaccugggcgacaucagcggcaucaacgccagcguggugaacauccagaaggagaucgaucggcugaacgagguggccaagaaccugaacgagagccugaucgaccugcaggagcugggcaaguacgagcaguacaucaaguggcccugguacaucuggcugggcuucaucgccggccugaucgccaucgugauggugaccaucaugcugugcugcaugaccagcugcugcagcugccugaagggcuguugcagcugcggcagcugcugcaaguucgacgaggacgacagcgagcccgugcugaagggcgugaagcugcacuacaccugaggacuagucccuguucccagagcccacuuuuuuuucuuuuuuugaaauaaaauagccugucuuucagaucucaaaggcucuuuucagagccaccaaaaaaaaaaaaaaaaaaaaaaaaaaaaaaaaaaaaaaaaaaaaaaaaaaaaaaaaaaaaaaaaaaaaaaaaaaaaaaaaaaaaaaaaaaaaaaaaaaaaa

SEQ ID NO: 23461 - RNA, 4094 nt, Artificial Sequence
  SARS-CoV-2/Wuhan/WIV05/2019__EPI_ISL_402128 spike protein mRNA gc (1-1273)(L18F_T20N_P26S_D138Y_R190S_K417T_E484K_N501Y_D614G_H655Y _T1027I)
aggagagucccgcagucggcguccagcggcucugcuuguucgugugugugucguugcaggccuuauucaagcuuaccauguucguguuccuggugcugcugccccuggugagcagccagugcgugaacuucaccaaccggacccagcugccaagcgccuacaccaacagcuucacccggggcgucuacuaccccgacaagguguuccggagcagcguccugcacagcacccaggaccuguuccugcccuucuucagcaacgugaccugguuccacgccauccacgugagcggcaccaacggcaccaagcgguucgacaaccccgugcugcccuucaacgacggcguguacuucgccagcaccgagaagagcaacaucauccggggcuggaucuucggcaccacccuggacagcaagacccagagccugcugaucgugaauaacgccaccaacguggugaucaaggugugcgaguuccaguucugcaacuaccccuuccugggcguguacuaccacaagaacaacaagagcuggauggagagcgaguuccggguguacagcagcgccaacaacugcaccuucgaguacgugagccagcccuuccugauggaccuggagggcaagcagggcaacuucaagaaccugagcgaguucguguucaagaacaucgacggcuacuucaagaucuacagcaagcacaccccaaucaaccuggugcgggaucugccccagggcuucucagcccuggagccccugguggaccugcccaucggcaucaacaucacccgguuccagacccugcuggcccugcaccggagcuaccugaccccaggcgacagcagcagcggguggacagcaggcgcggcugcuuacuacgugggcuaccugcagccccggaccuuccugcugaaguacaacgagaacggcaccaucaccgacgccguggacugcgcccuggacccucugagcgagaccaagugcacccugaagagcuucaccguggagaagggcaucuaccagaccagcaacuuccgggugcagcccaccgagagcaucgugcgguuccccaacaucaccaaccugugccccuucggcgagguguucaacgccacccgguucgccagcguguacgccuggaaccggaagcggaucagcaacugcguggccgacuacagcgugcuguacaacagcgccagcuucagcaccuucaagugcuacggcgugagccccaccaagcugaacgaccugugcuucaccaacguguacgccgacagcuucgugauccguggcgacgaggugcggcagaucgcacccggccagacaggcaccaucgccgacuacaacuacaagcugcccgacgacuucaccggcugcgugaucgccuggaacagcaacaaccucgacagcaaggugggcggcaacuacaacuaccuguaccggcuguuccggaagagcaaccugaagcccuucgagcgggacaucagcaccgagaucuaccaagccggcuccaccccuugcaacggcgugaagggcuucaacugcuacuucccucugcagagcuacggcuuccagcccaccuacggcgugggcuaccagcccuaccgggugguggugcugagcuucgagcugcugcacgccccagccaccguguguggccccaagaagagcaccaaccuggugaagaacaagugcgugaacuucaacuucaacggccuuaccggcaccggcgugcugaccgagagcaacaagaaauuccugcccuuucagcaguucggccgggacaucgccgacaccaccgacgcugugcgggauccccagacccuggagauccuggacaucaccccuugcagcuucggcggcgugagcgugaucaccccaggcaccaacaccagcaaccagguggccgugcuguaccagggcgugaacugcaccgaggugcccguggccauccacgccgaccagcugacacccaccuggcgggucuacagcaccggcagcaacguguuccagacccgggccgguugccugaucggcgccgaguacgugaacaacagcuacgagugcgacauccccaucggcgccggcaucugugccagcuaccagacccagaccaauucaccccggagggcaaggagcguggccagccagagcaucaucgccuacaccaugagccugggcgccgagaacagcguggccuacagcaacaacagcaucgccauccccaccaacuucaccaucagcgugaccaccgagauucugcccgugagcaugaccaagaccagcguggacugcaccauguacaucugcggcgacagcaccgagugcagcaaccugcugcugcaguacggcagcuucugcacccagcugaaccgggcccugaccggcaucgccguggagcaggacaagaacacccaggagguguucgcccaggugaagcagaucuacaagaccccucccaucaaggacuucggcggcuucaacuucagccagauccugcccgaccccagcaagcccagcaagcggagcuucaucgaggaccugcuguucaacaaggugacccuagccgacgccggcuucaucaagcaguacggcgacugccucggcgacauagccgcccgggaccugaucugcgcccagaaguucaacggccugaccgugcugccuccccugcugaccgacgagaugaucgcccaguacaccagcgcccuguuagccggaaccaucaccagcggcuggacuuucggcgcuggagccgcucugcagauccccuucgccaugcagauggccuaccgguucaacggcaucggcgugacccagaacgugcuguacgagaaccagaagcugaucgccaaccaguucaacagcgccaucggcaagauccaggacagccugagcagcaccgcuagcgcccugggcaagcugcaggacguggugaaccagaacgcccaggcccugaacacccuggugaagcagcugagcagcaacuucggcgccaucagcagcgugcugaacgacauccugagccggcuggacaaggucgaggccgaggugcagaucgaccggcugaucacuggccggcugcagagccugcagaccuacgugacccagcagcugauccgggccgccgagauucgggccagcgccaaccuggccgccaucaagaugagcgagugcgugcugggccagagcaagcggguggacuucugcggcaagggcuaccaccugaugagcuuuccccagagcgcaccccacggagugguguuccugcacgugaccuacgugcccgcccaggagaagaacuucaccaccgccccagccaucugccacgacggcaaggcccacuuuccccgggagggcguguucgugagcaacggcacccacugguucgugacccagcggaacuucuacgagccccagaucaucaccaccgacaacaccuucgugagcggcaacugcgacguggugaucggcaucgugaacaacaccguguacgauccccugcagcccgagcuggacagcuucaaggaggagcuggacaaguacuucaagaaucacaccagccccgacguggaccugggcgacaucagcggcaucaacgccagcguggugaacauccagaaggagaucgaucggcugaacgagguggccaagaaccugaacgagagccugaucgaccugcaggagcugggcaaguacgagcaguacaucaaguggcccugguacaucuggcugggcuucaucgccggccugaucgccaucgugauggugaccaucaugcugugcugcaugaccagcugcugcagcugccugaagggcuguugcagcugcggcagcugcugcaaguucgacgaggacgacagcgagcccgugcugaagggcgugaagcugcacuacaccugaggacuagucccuguucccagagcccacuuuuuuuucuuuuuuugaaauaaaauagccugucuuucagaucucaaaggcucuuuucagagccaccaaaaaaaaaaaaaaaaaaaaaaaaaaaaaaaaaaaaaaaaaaaaaaaaaaaaaaaaaaaaaaaaaaaaaaaaaaaaaaaaaaaaaaaaaaaaaaaaaaaaa

SEQ ID NO: 23462 - RNA, 4094 nt, Artificial Sequence
  SARS-CoV-2/Wuhan/WIV05/2019__EPI_ISL_402128 spike protein mRNA gc (1-1273)(S13I_W152C_L452R_D614G)
aggagagucccgcagucggcguccagcggcucugcuuguucgugugugugucguugcaggccuuauucaagcuuaccauguucguguuccuggugcugcugccccuggugagcauccagugcgugaaccugaccacccggacccagcugccaccagccuacaccaacagcuucacccggggcgucuacuaccccgacaagguguuccggagcagcguccugcacagcacccaggaccuguuccugcccuucuucagcaacgugaccugguuccacgccauccacgugagcggcaccaacggcaccaagcgguucgacaaccccgugcugcccuucaacgacggcguguacuucgccagcaccgagaagagcaacaucauccggggcuggaucuucggcaccacccuggacagcaagacccagagccugcugaucgugaauaacgccaccaacguggugaucaaggugugcgaguuccaguucugcaacgaccccuuccugggcguguacuaccacaagaacaacaagagcugcauggagagcgaguuccggguguacagcagcgccaacaacugcaccuucgaguacgugagccagcccuuccugauggaccuggagggcaagcagggcaacuucaagaaccugcgggaguucguguucaagaacaucgacggcuacuucaagaucuacagcaagcacaccccaaucaaccuggugcgggaucugccccagggcuucucagcccuggagccccugguggaccugcccaucggcaucaacaucacccgguuccagacccugcuggcccugcaccggagcuaccugaccccaggcgacagcagcagcggguggacagcaggcgcggcugcuuacuacgugggcuaccugcagccccggaccuuccugcugaaguacaacgagaacggcaccaucaccgacgccguggacugcgcccuggacccucugagcgagaccaagugcacccugaagagcuucaccguggagaagggcaucuaccagaccagcaacuuccgggugcagcccaccgagagcaucgugcgguuccccaacaucaccaaccugugccccuucggcgagguguucaacgccacccgguucgccagcguguacgccuggaaccggaagcggaucagcaacugcguggccgacuacagcgugcuguacaacagcgccagcuucagcaccuucaagugcuacggcgugagccccaccaagcugaacgaccugugcuucaccaacguguacgccgacagcuucgugauccguggcgacgaggugcggcagaucgcacccggccagacaggcaagaucgccgacuacaacuacaagcugcccgacgacuucaccggcugcgugaucgccuggaacagcaacaaccucgacagcaaggugggcggcaacuacaacuaccgcuaccggcuguuccggaagagcaaccugaagcccuucgagcgggacaucagcaccgagaucuaccaagccggcuccaccccuugcaacggcguggagggcuucaacugcuacuucccucugcagagcuacggcuuccagcccaccaacggcgugggcuaccagcccuaccgggugguggugcugagcuucgagcugcugcacgccccagccaccguguguggccccaagaagagcaccaaccuggugaagaacaagugcgugaacuucaacuucaacggccuuaccggcaccggcgugcugaccgagagcaacaagaaauuccugcccuuucagcaguucggccgggacaucgccgacaccaccgacgcugugcgggauccccagacccuggagauccuggacaucaccccuugcagcuucggcggcgugagcgugaucaccccaggcaccaacaccagcaaccagguggccgugcuguaccagggcgugaacugcaccgaggugcccguggccauccacgccgaccagcugacacccaccuggcgggucuacagcaccggcagcaacguguuccagacccgggccgguugccugaucggcgccgagcacgugaacaacagcuacgagugcgacauccccaucggcgccggcaucugugccagcuaccagacccagaccaauucaccccggagggcaaggagcguggccagccagagcaucaucgccuacaccaugagccugggcgccgagaacagcguggccuacagcaacaacagcaucgccauccccaccaacuucaccaucagcgugaccaccgagauucugcccgugagcaugaccaagaccagcguggacugcaccauguacaucugcggcgacagcaccgagugcagcaaccugcugcugcaguacggcagcuucugcacccagcugaaccgggcccugaccggcaucgccguggagcaggacaagaacacccaggagguguucgcccaggugaagcagaucuacaagaccccucccaucaaggacuucggcggcuucaacuucagccagauccugcccgaccccagcaagcccagcaagcggagcuucaucgaggaccugcuguucaacaaggugacccuagccgacgccggcuucaucaagcaguacggcgacugccucggcgacauagccgcccgggaccugaucugcgcccagaaguucaacggccugaccgugcugccuccccugcugaccgacgagaugaucgcccaguacaccagcgcccuguuagccggaaccaucaccagcggcuggacuuucggcgcuggagccgcucugcagauccccuucgccaugcagauggccuaccgguucaacggcaucggcgugacccagaacgugcuguacgagaaccagaagcugaucgccaaccaguucaacagcgccaucggcaagauccaggacagccugagcagcaccgcuagcgcccugggcaagcugcaggacguggugaaccagaacgcccaggcccugaacacccuggugaagcagcugagcagcaacuucggcgccaucagcagcgugcugaacgacauccugagccggcuggacaaggucgaggccgaggugcagaucgaccggcugaucacuggccggcugcagagccugcagaccuacgugacccagcagcugauccgggccgccgagauucgggccagcgccaaccuggccgccaccaagaugagcgagugcgugcugggccagagcaagcggguggacuucugcggcaagggcuaccaccugaugagcuuuccccagagcgcaccccacggagugguguuccugcacgugaccuacgugcccgcccaggagaagaacuucaccaccgccccagccaucugccacgacggcaaggcccacuuuccccgggagggcguguucgugagcaacggcacccacugguucgugacccagcggaacuucuacgagccccagaucaucaccaccgacaacaccuucgugagcggcaacugcgacguggugaucggcaucgugaacaacaccguguacgauccccugcagcccgagcuggacagcuucaaggaggagcuggacaaguacuucaagaaucacaccagccccgacguggaccugggcgacaucagcggcaucaacgccagcguggugaacauccagaaggagaucgaucggcugaacgagguggccaagaaccugaacgagagccugaucgaccugcaggagcugggcaaguacgagcaguacaucaaguggcccugguacaucuggcugggcuucaucgccggccugaucgccaucgugauggugaccaucaugcugugcugcaugaccagcugcugcagcugccugaagggcuguugcagcugcggcagcugcugcaaguucgacgaggacgacagcgagcccgugcugaagggcgugaagcugcacuacaccugaggacuagucccuguucccagagcccacuuuuuuuucuuuuuuugaaauaaaauagccugucuuucagaucucaaaggcucuuuucagagccaccaaaaaaaaaaaaaaaaaaaaaaaaaaaaaaaaaaaaaaaaaaaaaaaaaaaaaaaaaaaaaaaaaaaaaaaaaaaaaaaaaaaaaaaaaaaaaaaaaaaaa

SEQ ID NO: 23463 - RNA, 4094 nt, Artificial Sequence
  SARS-CoV-2/Wuhan/WIV05/2019__EPI_ISL_402128 spike protein mRNA gc (1-1273)
aggagagucccgcagucggcguccagcggcucugcuuguucgugugugugucguugcaggccuuauucaagcuuaccauguucguguuccuggugcugcugccccuggugagcagccagugcgugaaccugaccacccggacccagcugcccccugccuacaccaacagcuucacccggggcguguacuaccccgacaagguguuccggagcagcgugcugcacagcacccaggaccuguuccugcccuucuucagcaacgugaccugguuccacgccauccacgugagcggcaccaacggcaccaagcgguucgacaacccagugcugcccuucaacgacggcguguacuucgccagcaccgagaagucaaacaucauccggggcuggaucuucggcaccacccuggacagcaagacacagagccugcugaucgugaacaacgccaccaacguggugaucaaggugugcgaguuucaguucugcaacgaccccuuccugggcguguacuaccacaagaacaacaagagcuggauggagagcgaguuccgggucuacagcagcgcuaacaauugcaccuucgaguacgugagccagcccuuccugauggaccucgagggcaagcagggcaacuucaagaaccugcgggaguucguguucaagaacaucgauggcuacuucaagaucuacagcaagcacacccccaucaaccuggugcgggaccugccccagggauucagcgcccuggagccucugguggaccugcccaucggcaucaacaucaccagguuccagacccugcuggcccugcaccggagcuaccugacccccggcgacagcagcagcggcuggaccgccggcgccgccgcauacuacgugggcuaccugcagccacggaccuuccugcugaaguacaacgagaacggcaccaucaccgacgccguggacugcgcccuggacccccugagcgagaccaagugcacccuaaagagcuucaccguggagaagggcaucuaccagaccagcaacuuccgggugcagcccacugagagcaucgugcgguuccccaacauuaccaaccugugucccuucggcgagguguucaacgccacccgguucgccagcguguacgccuggaaccggaagcggaucagcaacugcguggccgacuacagcgugcuguacaacagcgccagcuucagcaccuucaagugcuacggcgugagcccuaccaagcugaacgaccugugcuucaccaacguguacgcugacagcuucgugauccggggcgacgaggugcggcagaucgcccccggccagaccggcaagaucgccgacuacaacuacaagcugcccgacgacuucaccggcugcgugaucgccuggaacagcaacaaccuggacagcaaggugggcggcaacuacaacuaccuguaccggcuguuccguaagagcaaccugaagccauucgagcgggacaucagcaccgagaucuaccaggccggcagcacccccugcaacgguguggagggcuuuaacugcuacuucccccugcagagcuacggcuuccagcccaccaacggcgugggcuaccagcccuaccgggugguggugcugagcuucgagcugcugcacgcccccgccaccgugugcggcccuaaaaagagcaccaaccuggugaagaacaagugcgugaacuucaauuucaacggccugaccggcaccggcgugcugaccgagagcaacaagaaguuccugcccuuccagcaguucggccgggauaucgccgacaccaccgacgcagugcgggacccccagacccuggagauccuggacaucaccccaugcagcuucggcggcgugagcgucaucacccccggcacaaacaccagcaaccagguggccgugcuguaccaggacgugaacugcaccgaggugcccguggccauccacgccgaccagcugacccccaccuggcggguguacagcaccggaagcaacguguuccagacccgggccggcugccugaucggcgccgagcacgugaacaacuccuacgagugcgacauccccaucggcgcuggcaucugcgccagcuaccagacccagaccaacagcccccggcgggcccggagcguggccagccagagcaucaucgccuacaccaugagcuuaggcgccgagaacagcguggccuacagcaacaacagcaucgcgaucccuaccaacuucaccaucagcgugaccaccgagauacugcccgugagcaugaccaagaccagcguggacuguaccauguacaucugcggcgacagcaccgagugcagcaaccugcugcugcaguacggcagcuucugcacccagcugaaccgggcccugaccggcaucgccguggagcaggacaagaacacccaagagguguucgcccaggugaagcagaucuacaagacucccccaaucaaggacuucggcggcuucaacuucagccagauccugcccgaccccagcaagcccagcaagcggagcuucaucgaggaccugcuguucaacaaggugacccuggccgacgccggcuucaucaagcaguacggcgauugccugggcgacaucgccgcucgggaccugaucugcgcccagaaguucaacgggcugaccgugcugcccccucugcugaccgacgagaugaucgcccaguacaccagcgcccugcuugccggcaccaucaccagcggcuggaccuucggcgccggcgcagcccugcagauccccuucgccaugcagauggccuaccgguucaacggcaucggcgugacccagaacgugcuguacgagaaccagaagcugaucgccaaccaguucaacagcgccaucggcaagauccaggacagccugagcagcaccgccagcgcccugggcaagcugcaggacguggugaaccagaacgcucaggcccugaacacccuggugaagcagcugagcagcaacuucggcgccaucagcucagugcugaaugacauccugagcaggcuggacaagguggaggccgaggugcagaucgaccggcugaucaccggccggcugcagagccugcagaccuacgugacccagcagcugauccgggccgccgagauccgggccagcgccaaccuggcagccaccaagaugagcgagugcgugcugggccagagcaagcggguggacuuuugcggcaagggcuaccaccugaugagcuucccccagagcgccccacacggcgugguguuccuccacgucacauacgugcccgcccaggagaagaacuucaccaccgcccccgccauuugccacgacggcaaggcucacuucccccgggagggcguguucgugagcaacggaacccacugguucgugacccagcggaacuucuacgagccccagaucaucaccaccgacaacaccuucgugagcggcaacugcgacguggugaucggcaucgugaacaacaccguguacgacccccugcagccugagcuggacagcuucaaggaggagcuggacaaguacuucaagaaccacaccagccccgauguggaccugggcgacaucagcggcaucaacgccagcguggugaacauccagaaggagaucgaccggcugaacgagguggccaagaaccugaacgagagccugaucgaccugcaggagcugggcaaguacgagcaguacaucaaguggcccugguacaucuggcugggcuucaucgccggccugaucgccaucgugauggugaccaucaugcugugcugcaugaccagcugcuguagcugccugaagggcugcugcagcugcggcagcugcugcaaguucgacgaggacgacagcgagccagugcugaagggcgugaagcugcacuacaccugaggacuagucccuguucccagagcccacuuuuuuuucuuuuuuugaaauaaaauagccugucuuucagaucucaaaggcucuuuucagagccaccaaaaaaaaaaaaaaaaaaaaaaaaaaaaaaaaaaaaaaaaaaaaaaaaaaaaaaaaaaaaaaaaaaaaaaaaaaaaaaaaaaaaaaaaaaaaaaaaaaaaa

SEQ ID NO: 23464 - RNA, 4094 nt, Artificial Sequence
  SARS-CoV-2/Wuhan/WIV05/2019__EPI_ISL_402128 spike protein mRNA gc (1-1273)(D614G)
aggagagucccgcagucggcguccagcggcucugcuuguucgugugugugucguugcaggccuuauucaagcuuaccauguucguguuccuggugcugcugccccuggugagcagccagugcgugaaccugaccacccggacccagcugcccccugccuacaccaacagcuucacccggggcguguacuaccccgacaagguguuccggagcagcgugcugcacagcacccaggaccuguuccugcccuucuucagcaacgugaccugguuccacgccauccacgugagcggcaccaacggcaccaagcgguucgacaacccagugcugcccuucaacgacggcguguacuucgccagcaccgagaagucaaacaucauccggggcuggaucuucggcaccacccuggacagcaagacacagagccugcugaucgugaacaacgccaccaacguggugaucaaggugugcgaguuucaguucugcaacgaccccuuccugggcguguacuaccacaagaacaacaagagcuggauggagagcgaguuccgggucuacagcagcgcuaacaauugcaccuucgaguacgugagccagcccuuccugauggaccucgagggcaagcagggcaacuucaagaaccugcgggaguucguguucaagaacaucgauggcuacuucaagaucuacagcaagcacacccccaucaaccuggugcgggaccugccccagggauucagcgcccuggagccucugguggaccugcccaucggcaucaacaucaccagguuccagacccugcuggcccugcaccggagcuaccugacccccggcgacagcagcagcggcuggaccgccggcgccgccgcauacuacgugggcuaccugcagccacggaccuuccugcugaaguacaacgagaacggcaccaucaccgacgccguggacugcgcccuggacccccugagcgagaccaagugcacccuaaagagcuucaccguggagaagggcaucuaccagaccagcaacuuccgggugcagcccacugagagcaucgugcgguuccccaacauuaccaaccugugucccuucggcgagguguucaacgccacccgguucgccagcguguacgccuggaaccggaagcggaucagcaacugcguggccgacuacagcgugcuguacaacagcgccagcuucagcaccuucaagugcuacggcgugagcccuaccaagcugaacgaccugugcuucaccaacguguacgcugacagcuucgugauccggggcgacgaggugcggcagaucgcccccggccagaccggcaagaucgccgacuacaacuacaagcugcccgacgacuucaccggcugcgugaucgccuggaacagcaacaaccuggacagcaaggugggcggcaacuacaacuaccuguaccggcuguuccguaagagcaaccugaagccauucgagcgggacaucagcaccgagaucuaccaggccggcagcacccccugcaacgguguggagggcuuuaacugcuacuucccccugcagagcuacggcuuccagcccaccaacggcgugggcuaccagcccuaccgggugguggugcugagcuucgagcugcugcacgcccccgccaccgugugcggcccuaaaaagagcaccaaccuggugaagaacaagugcgugaacuucaauuucaacggccugaccggcaccggcgugcugaccgagagcaacaagaaguuccugcccuuccagcaguucggccgggauaucgccgacaccaccgacgcagugcgggacccccagacccuggagauccuggacaucaccccaugcagcuucggcggcgugagcgucaucacccccggcacaaacaccagcaaccagguggccgugcuguaccagggagugaacugcaccgaggugcccguggccauccacgccgaccagcugacccccaccuggcggguguacagcaccggcagcaacguguuccagacccgggccggcugccugaucggcgccgagcacgugaacaacuccuacgagugcgacauccccaucggcgcuggcaucugcgccagcuaccagacccagaccaacagcccccggcgggcccggagcguggccagccagagcaucaucgccuacaccaugagcuuaggcgccgagaacagcguggccuacagcaacaacagcaucgcgaucccuaccaacuucaccaucagcgugaccaccgagauacugcccgugagcaugaccaagaccagcguggacuguaccauguacaucugcggcgacagcaccgagugcagcaaccugcugcugcaguacggcagcuucugcacccagcugaaccgggcccugaccggcaucgccguggagcaggacaagaacacccaagagguguucgcccaggugaagcagaucuacaagacucccccaaucaaggacuucggcggcuucaacuucagccagauccugcccgaccccagcaagcccagcaagcggagcuucaucgaggaccugcuguucaacaaggugacccuggccgacgccggcuucaucaagcaguacggcgacugccugggggauaucgccgcucgggaccugaucugcgcccagaaguucaacggccugaccgugcugcccccucugcugaccgacgagaugaucgcccaguacaccagcgcccugcuugccggcaccaucaccagcggcuggaccuucggcgccggcgcagcccugcagauccccuucgccaugcagauggccuaccgguucaacggcaucggcgugacccagaacgugcuguacgagaaccagaagcugaucgccaaccaguucaacagcgccaucggcaagauccaggacagccugagcagcaccgccagcgcccugggcaagcugcaggacguggugaaccagaacgcucaggcccugaacacccuggugaagcagcugagcagcaacuucggcgccaucagcucagugcugaaugacauccugagcaggcuggacaagguggaggccgaggugcagaucgaccggcugaucaccggccggcugcagagccugcagaccuacgugacccagcagcugauccgggccgccgagauccgggccagcgccaaccuggcagccaccaagaugagcgagugcgugcugggccagagcaagcggguggacuuuugcggcaagggcuaccaccugaugagcuucccccagagcgccccacacggcgugguguuccuccacgucacauacgugcccgcccaggagaagaacuucaccaccgcccccgccauuugccacgacggcaaggcucacuucccccgggagggaguguucgugagcaacggcacccacugguucgugacccagcggaacuucuacgagccccagaucaucaccaccgacaacaccuucgugagcggcaacugcgacguggugaucggcaucgugaacaacaccguguacgacccccugcagccugagcuggacagcuucaaggaggagcuggacaaguacuucaagaaccacaccagccccgacguggaucugggcgacaucagcggcaucaacgccagcguggugaacauccagaaggagaucgaccggcugaacgagguggccaagaaccugaacgagagccugaucgaccugcaggagcugggcaaguacgagcaguacaucaaguggcccugguacaucuggcugggcuucaucgccggccugaucgccaucgugauggugaccaucaugcugugcugcaugaccagcugcuguagcugccugaagggcugcugcagcugcggcagcugcugcaaguucgacgaggacgacagcgagccagugcugaagggcgugaagcugcacuacaccugaggacuagucccuguucccagagcccacuuuuuuuucuuuuuuugaaauaaaauagccugucuuucagaucucaaaggcucuuuucagagccaccaaaaaaaaaaaaaaaaaaaaaaaaaaaaaaaaaaaaaaaaaaaaaaaaaaaaaaaaaaaaaaaaaaaaaaaaaaaaaaaaaaaaaaaaaaaaaaaaaaaaa

SEQ ID NO: 23465 - RNA, 4094 nt, Artificial Sequence
  SARS-CoV-2/Wuhan/WIV05/2019__EPI_ISL_402128 spike protein mRNA gc (1-1273)(A222V_D614G)
aggagagucccgcagucggcguccagcggcucugcuuguucgugugugugucguugcaggccuuauucaagcuuaccauguucguguuccuggugcugcugccccuggugagcagccagugcgugaaccugaccacccggacccagcugcccccugccuacaccaacagcuucacccggggcguguacuaccccgacaagguguuccggagcagcgugcugcacagcacccaggaccuguuccugcccuucuucagcaacgugaccugguuccacgccauccacgugagcggcaccaacggcaccaagcgguucgacaacccagugcugcccuucaacgacggcguguacuucgccagcaccgagaagucaaacaucauccggggcuggaucuucggcaccacccuggacagcaagacacagagccugcugaucgugaacaacgccaccaacguggugaucaaggugugcgaguuucaguucugcaacgaccccuuccugggcguguacuaccacaagaacaacaagagcuggauggagagcgaguuccgggucuacagcagcgcuaacaauugcaccuucgaguacgugagccagcccuuccugauggaccucgagggcaagcagggcaacuucaagaaccugcgggaguucguguucaagaacaucgauggcuacuucaagaucuacagcaagcacacccccaucaaccuggugcgggaccugccccagggauucagcgugcuggagccucugguggaccugcccaucggcaucaacaucaccagguuccagacccugcuggcccugcaccggagcuaccugacccccggcgacagcagcagcggcuggaccgccggcgccgccgccuacuacgugggcuaccugcagccacggaccuuccugcugaaguacaacgagaacggcaccaucaccgacgcaguggacugcgcccuggacccccugagcgagaccaagugcacccuaaagagcuucaccguggagaagggcaucuaccagaccagcaacuuccgggugcagcccacugagagcaucgugcgguuccccaacauuaccaaccugugucccuucggcgagguguucaacgccacccgguucgccagcguguacgccuggaaccggaagcggaucagcaacugcguggccgacuacagcgugcuguacaacagcgccagcuucagcaccuucaagugcuacggcgugagcccuaccaagcugaacgaccugugcuucaccaacguguacgccgacagcuucgugauccggggcgacgaggugcggcagaucgcucccggccagaccggcaagaucgccgacuacaacuacaagcugcccgacgacuucaccggcugcgugaucgccuggaacagcaacaaccuggacagcaaggugggcggcaacuacaacuaccuguaccggcuguuccguaagagcaaccugaagccauucgagcgggacaucagcaccgagaucuaccaggccggcagcacccccugcaacgguguggagggcuuuaacugcuacuucccccugcagagcuacggcuuccagcccaccaacggcgugggcuaccagcccuaccgggugguggugcugagcuucgagcugcugcacgcccccgccaccgugugcggcccuaaaaagagcaccaaccuggugaagaacaagugcgugaacuucaauuucaacggccugaccggcaccggcgugcugaccgagagcaacaagaaguuccugcccuuccagcaguucggccgggauaucgccgacaccaccgacgccgugcgggacccccagacccuggagauccuggacaucaccccaugcagcuucggcggcgucagcgugaucacccccggcacaaacaccagcaaccagguggcagugcuguaccagggagugaacugcaccgaggugcccguggccauccacgccgaccagcugacccccaccuggcggguguacagcaccggcagcaacguguuccagacccgggccggcugccugaucggcgccgagcacgugaacaacuccuacgagugcgacauccccaucggcgccggcaucugcgcuagcuaccagacccagaccaacagcccccggcgggcccggagcguggccagccagagcaucaucgccuacaccaugagcuuaggcgccgagaacagcguggccuacagcaacaacagcaucgccaucccuaccaacuucaccaucagcgugaccaccgagauacugcccgugagcaugaccaagaccagcguggacuguaccauguacaucugcggcgacagcaccgagugcagcaaccugcugcugcaguacggcagcuucugcacccagcugaaccgggcgcugaccggcaucgccguggagcaggacaagaacacccaagagguguucgcccaggugaagcagaucuacaagacucccccaaucaaggacuucggcggcuucaacuucagccagauccugcccgaccccagcaagcccagcaagcggagcuucaucgaggaccugcuguucaacaaggugacccuggccgacgccggcuucaucaagcaguacggcgacugccugggggauaucgccgcccgggaccugaucugcgcucagaaguucaacggccugaccgugcugcccccucugcugaccgacgagaugaucgcccaguacaccagcgcccugcuugccggcaccaucaccagcggcuggaccuucggcgccggcgccgcacugcagauccccuucgccaugcagauggccuaccgguucaacggcaucggcgugacccagaacgugcuguacgagaaccagaagcugaucgccaaccaguucaacagcgccaucggcaagauccaggacagccugagcagcaccgccagcgcccugggcaagcugcaggacguggugaaccagaacgcccaggcucugaacacccuggugaagcagcugagcagcaacuucggcgccaucagcucagugcugaaugacauccugagcaggcuggacaagguggaggccgaggugcagaucgaccggcugaucaccggccggcugcagagccugcagaccuacgugacccagcagcugauccgggccgccgagauccgggccagcgccaaccuggccgcaaccaagaugagcgagugcgugcugggccagagcaagcggguggacuuuugcggcaagggcuaccaccugaugagcuucccccagagcgccccacacggcguggucuuccuccacgugacauacgugcccgcccaggagaagaacuucaccaccgcccccgccauuugccacgacggcaaggcccacuucccccgggagggaguguucgugagcaacggcacccacugguucgugacccagcggaacuucuacgagccccagaucaucaccaccgacaacaccuucgugagcggcaacugcgacguggugaucggcaucgugaacaacaccguguacgacccccugcagccugagcuggacagcuucaaggaggagcuggacaaguacuucaagaaccacaccagccccgacguggaucugggcgacaucagcggcaucaacgcuagcguggugaacauccagaaggagaucgaccggcugaacgagguggccaagaaccugaacgagagccugaucgaccugcaggagcugggcaaguacgagcaguacaucaaguggcccugguacaucuggcugggcuucaucgccggccugaucgccaucgugauggugaccaucaugcugugcugcaugaccagcugcuguagcugccugaagggcugcugcagcugcggcagcugcugcaaguucgacgaggacgacagcgagccagugcugaagggcgugaagcugcacuacaccugaggacuagucccuguucccagagcccacuuuuuuuucuuuuuuugaaauaaaauagccugucuuucagaucucaaaggcucuuuucagagccaccaaaaaaaaaaaaaaaaaaaaaaaaaaaaaaaaaaaaaaaaaaaaaaaaaaaaaaaaaaaaaaaaaaaaaaaaaaaaaaaaaaaaaaaaaaaaaaaaaaaaa

SEQ ID NO: 23466 - RNA, 4094 nt, Artificial Sequence
  SARS-CoV-2/Wuhan/WIV05/2019__EPI_ISL_402128 spike protein mRNA gc (1-1273)(N439K_D614G)
aggagagucccgcagucggcguccagcggcucugcuuguucgugugugugucguugcaggccuuauucaagcuuaccauguucguguuccuggugcugcugccccuggugagcagccagugcgugaaccugaccacccggacccagcugcccccugccuacaccaacagcuucacccggggcguguacuaccccgacaagguguuccggagcagcgugcugcacagcacccaggaccuguuccugcccuucuucagcaacgugaccugguuccacgccauccacgugagcggcaccaacggcaccaagcgguucgacaacccagugcugcccuucaacgacggcguguacuucgccagcaccgagaagucaaacaucauccggggcuggaucuucggcaccacccuggacagcaagacacagagccugcugaucgugaacaacgccaccaacguggugaucaaggugugcgaguuucaguucugcaacgaccccuuccugggcguguacuaccacaagaacaacaagagcuggauggagagcgaguuccgggucuacagcagcgcuaacaauugcaccuucgaguacgugagccagcccuuccugauggaccucgagggcaagcagggcaacuucaagaaccugcgggaguucguguucaagaacaucgauggcuacuucaagaucuacagcaagcacacccccaucaaccuggugcgggaccugccccagggauucagcgcccuggagccucugguggaccugcccaucggcaucaacaucaccagguuccagacccugcuggcccugcaccggagcuaccugacccccggcgacagcagcagcggcuggaccgccggcgccgccgcauacuacgugggcuaccugcagccacggaccuuccugcugaaguacaacgagaacggcaccaucaccgacgccguggacugcgcccuggacccccugagcgagaccaagugcacccuaaagagcuucaccguggagaagggcaucuaccagaccagcaacuuccgggugcagcccacugagagcaucgugcgguuccccaacauuaccaaccugugucccuucggcgagguguucaacgccacccgguucgccagcguguacgccuggaaccggaagcggaucagcaacugcguggccgacuacagcgugcuguacaacagcgccagcuucagcaccuucaagugcuacggcgugagcccuaccaagcugaacgaccugugcuucaccaacguguacgcugacagcuucgugauccggggcgacgaggugcggcagaucgcccccggccagaccggcaagaucgccgacuacaacuacaagcugcccgacgacuucaccggcugcgugaucgccuggaacagcaagaaccuggacagcaaggugggcggcaacuacaacuaccuguaccggcuguuccguaagagcaaccugaagccauucgagcgggacaucagcaccgagaucuaccaggccggcagcacccccugcaacgguguggagggcuuuaacugcuacuucccccugcagagcuacggcuuccagcccaccaacggcgugggcuaccagcccuaccgggugguggugcugagcuucgagcugcugcacgcccccgccaccgugugcggcccuaaaaagagcaccaaccuggugaagaacaagugcgugaacuucaacuucaauggccugaccggcaccggcgugcugaccgagagcaacaagaaguuccugcccuuccagcaguucggccgggauaucgccgacaccaccgacgcagugcgggacccccagacccuggagauccuggacaucaccccaugcagcuucggcggcgugagcgucaucacccccggcacaaacaccagcaaccagguggccgugcuguaccagggagugaacugcaccgaggugcccguggccauccacgccgaccagcugacccccaccuggcggguguacagcaccggcagcaacguguuccagacccgggccggcugccugaucggcgccgagcacgugaacaacuccuacgagugcgacauccccaucggcgcuggcaucugcgccagcuaccagacccagaccaacagcccccggcgggcccggagcguggccagccagagcaucaucgccuacaccaugagcuuaggcgccgagaacagcguggccuacagcaacaacagcaucgcgaucccuaccaacuucaccaucagcgugaccaccgagauacugcccgugagcaugaccaagaccagcguggacuguaccauguacaucugcggcgacagcaccgagugcagcaaccugcugcugcaguacggcagcuucugcacccagcugaaccgggcccugaccggcaucgccguggagcaggacaagaacacccaagagguguucgcccaggugaagcagaucuacaagacucccccaaucaaggacuucggcggcuucaacuucagccagauccugcccgaccccagcaagcccagcaagcggagcuucaucgaggaccugcuguucaacaaggugacccuggccgacgccggcuucaucaagcaguacggcgacugccugggggauaucgccgcucgggaccugaucugcgcccagaaguucaacggccugaccgugcugcccccucugcugaccgacgagaugaucgcccaguacaccagcgcccugcuugccggcaccaucaccagcggcuggaccuucggcgccggcgcagcccugcagauccccuucgccaugcagauggccuaccgguucaacggcaucggcgugacccagaacgugcuguacgagaaccagaagcugaucgccaaccaguucaacagcgccaucggcaagauccaggacagccugagcagcaccgccagcgcccugggcaagcugcaggacguggugaaccagaacgcucaggcccugaacacccuggugaagcagcugagcagcaacuucggcgccaucagcucagugcugaacgacauccugagcaggcuggacaagguggaggccgaggugcagaucgaccggcugaucaccggccggcugcagagccugcagaccuacgugacccagcagcugauccgggccgccgagauccgggccagcgccaaucuggcagccaccaagaugagcgagugcgugcugggccagagcaagcggguggacuuuugcggcaagggcuaccaccugaugagcuucccccagagcgccccacacggcgugguguuccuccacgucacauacgugcccgcccaggagaagaacuucaccaccgcccccgccauuugccacgacggcaaggcucacuucccccgggagggaguguucgugagcaacggcacccacugguucgugacccagcggaacuucuacgagccccagaucaucaccaccgacaacaccuucgugagcggcaacugcgacguggugaucggcaucgugaacaacaccguguacgacccccugcagccugagcuggacagcuucaaggaggagcuggacaaguacuucaagaaccacaccagccccgacguggaucugggcgacaucagcggcaucaacgccagcguggugaacauccagaaggagaucgaccggcugaacgagguggccaagaaccugaacgagagccugaucgaccugcaggagcugggcaaguacgagcaguacaucaaguggcccugguacaucuggcugggcuucaucgccggccugaucgccaucgugauggugaccaucaugcugugcugcaugaccagcugcuguagcugccugaagggcugcugcagcugcggcagcugcugcaaguucgacgaggacgacagcgagccagugcugaagggcgugaagcugcacuacaccugaggacuagucccuguucccagagcccacuuuuuuuucuuuuuuugaaauaaaauagccugucuuucagaucucaaaggcucuuuucagagccaccaaaaaaaaaaaaaaaaaaaaaaaaaaaaaaaaaaaaaaaaaaaaaaaaaaaaaaaaaaaaaaaaaaaaaaaaaaaaaaaaaaaaaaaaaaaaaaaaaaaaa

SEQ ID NO: 23467 - RNA, 4094 nt, Artificial Sequence
  SARS-CoV-2/Wuhan/WIV05/2019__EPI_ISL_402128 spike protein mRNA gc (1-1273)(S477N_D614G)
aggagagucccgcagucggcguccagcggcucugcuuguucgugugugugucguugcaggccuuauucaagcuuaccauguucguguuccuggugcugcugccccuggugagcagccagugcgugaaccugaccacccggacccagcugcccccugccuacaccaacagcuucacccggggcguguacuaccccgacaagguguuccggagcagcgugcugcacagcacccaggaccuguuccugcccuucuucagcaacgugaccugguuccacgccauccacgugagcggcaccaacggcaccaagcgguucgacaacccagugcugcccuucaacgacggcguguacuucgccagcaccgagaagucaaacaucauccggggcuggaucuucggcaccacccuggacagcaagacacagagccugcugaucgugaacaacgccaccaacguggugaucaaggugugcgaguuucaguucugcaacgaccccuuccugggcguguacuaccacaagaacaacaagagcuggauggagagcgaguuccgggucuacagcagcgcuaacaauugcaccuucgaguacgugagccagcccuuccugauggaccucgagggcaagcagggcaacuucaagaaccugcgggaguucguguucaagaacaucgauggcuacuucaagaucuacagcaagcacacccccaucaaccuggugcgggaccugccccagggauucagcgcccuggagccucugguggaccugcccaucggcaucaacaucaccagguuccagacccugcuggcccugcaccggagcuaccugacccccggcgacagcagcagcggcuggaccgccggcgccgccgcauacuacgugggcuaccugcagccacggaccuuccugcugaaguacaacgagaacggcaccaucaccgacgccguggacugcgcccuggacccccugagcgagaccaagugcacccuaaagagcuucaccguggagaagggcaucuaccagaccagcaacuuccgggugcagcccacugagagcaucgugcgguuccccaacauuaccaaccugugucccuucggcgagguguucaacgccacccgguucgccagcguguacgccuggaaccggaagcggaucagcaacugcguggccgacuacagcgugcuguacaacagcgccagcuucagcaccuucaagugcuacggcgugagcccuaccaagcugaacgaccugugcuucaccaacguguacgcugacagcuucgugauccggggcgacgaggugcggcagaucgcccccggccagaccggcaagaucgccgacuacaacuacaagcugcccgacgacuucaccggcugcgugaucgccuggaacagcaacaaccuggacagcaaggugggcggcaacuacaacuaccuguaccggcuguuccguaagagcaaccugaagccauucgagcgggacaucagcaccgagaucuaccaggccggcaacacccccugcaacgguguggagggcuuuaacugcuacuucccccugcagagcuacggcuuccagcccaccaacggcgugggcuaccagcccuaccgggugguggugcugagcuucgagcugcugcacgcccccgccaccgugugcggcccuaaaaagagcaccaaccuggugaagaacaagugcgugaauuucaacuucaacggccugaccggcaccggcgugcugaccgagagcaacaagaaguuccugcccuuccagcaguucggccgggauaucgccgacaccaccgacgcagugcgggacccccagacccuggagauccuggacaucaccccaugcagcuucggcggcgugagcgucaucacccccggcacaaacaccagcaaccagguggccgugcuguaccagggagugaacugcaccgaggugcccguggccauccacgccgaccagcugacccccaccuggcggguguacagcaccggcagcaacguguuccagacccgggccggcugccugaucggcgccgagcacgugaacaacagcuacgagugcgacauccccaucggcgcuggcaucugcgccuccuaccagacccagaccaacagcccccggcgggcccggagcguggccagccagagcaucaucgccuacaccaugagcuuaggcgccgagaacagcguggccuacagcaacaacagcaucgcgaucccuaccaacuucaccaucagcgugaccaccgagauacugcccgugagcaugaccaagaccagcguggacuguaccauguacaucugcggcgacagcaccgagugcagcaaccugcugcugcaguacggcagcuucugcacccagcugaaccgggcccugaccggcaucgccguggagcaggacaagaacacccaagagguguucgcccaggugaagcagaucuacaagacucccccaaucaaggacuucggcggcuucaacuucagccagauccugcccgaccccagcaagcccagcaagcggagcuucaucgaggaccugcuguucaacaaggugacccuggccgacgccggcuucaucaagcaguacggcgacugccugggggauaucgccgcucgggaccugaucugcgcccagaaguucaacggccugaccgugcugcccccucugcugaccgacgagaugaucgcccaguacaccagcgcccugcuugccggcaccaucaccagcggcuggaccuucggcgccggcgcagcccugcagauccccuucgccaugcagauggccuaccgguucaacggcaucggcgugacccagaacgugcuguacgagaaccagaagcugaucgccaaccaguucaacagcgccaucggcaagauccaggacagccugagcagcaccgccagcgcccugggcaagcugcaggacguggugaaccagaacgcucaggcccugaacacccuggugaagcagcugagcagcaauuucggcgccaucagcagcgugcugaacgacauccugucaaggcuggacaagguggaggccgaggugcagaucgaccggcugaucaccggccggcugcagagccugcagaccuacgugacccagcagcugauccgggccgccgagauccgggccagcgccaaccuggcagccaccaagaugagcgagugcgugcugggccagagcaagcggguggacuuuugcggcaagggcuaccaccugaugagcuucccccagagcgccccacacggcgugguguuccuccacgucacauacgugcccgcccaggagaagaacuucaccaccgcccccgccauuugccacgacggcaaggcucacuucccccgggagggaguguucgugagcaacggcacccacugguucgugacccagcggaacuucuacgagccccagaucaucaccaccgacaacaccuucgugagcggcaacugcgacguggugaucggcaucgugaacaacaccguguacgacccccugcagccugagcuggacagcuucaaggaggagcuggacaaguacuucaagaaccacaccagccccgacguggaucugggcgacaucagcggcaucaacgccagcguggugaacauccagaaggagaucgaccggcugaacgagguggccaagaaccugaacgagagccugaucgaccugcaggagcugggcaaguacgagcaguacaucaaguggcccugguacaucuggcugggcuucaucgccggccugaucgccaucgugauggugaccaucaugcugugcugcaugaccagcugcuguagcugccugaagggcugcugcagcugcggcagcugcugcaaguucgacgaggacgacagcgagccagugcugaagggcgugaagcugcacuacaccugaggacuagucccuguucccagagcccacuuuuuuuucuuuuuuugaaauaaaauagccugucuuucagaucucaaaggcucuuuucagagccaccaaaaaaaaaaaaaaaaaaaaaaaaaaaaaaaaaaaaaaaaaaaaaaaaaaaaaaaaaaaaaaaaaaaaaaaaaaaaaaaaaaaaaaaaaaaaaaaaaaaaa

SEQ ID NO: 23468 - RNA, 4094 nt, Artificial Sequence
  SARS-CoV-2/Wuhan/WIV05/2019__EPI_ISL_402128 spike protein mRNA gc (1-1273)(N501Y_D614G)
aggagagucccgcagucggcguccagcggcucugcuuguucgugugugugucguugcaggccuuauucaagcuuaccauguucguguuccuggugcugcugccccuggugagcagccagugcgugaaccugaccacccggacccagcugcccccugccuacaccaacagcuucacccggggcguguacuaccccgacaagguguuccggagcagcgugcugcacagcacccaggaccuguuccugcccuucuucagcaacgugaccugguuccacgccauccacgugagcggcaccaacggcaccaagcgguucgacaacccagugcugcccuucaacgacggcguguacuucgccagcaccgagaagucaaacaucauccggggcuggaucuucggcaccacccuggacagcaagacacagagccugcugaucgugaacaacgccaccaacguggugaucaaggugugcgaguuucaguucugcaacgaccccuuccugggcguguacuaccacaagaacaacaagagcuggauggagagcgaguuccgggucuacagcagcgcuaacaauugcaccuucgaguacgugagccagcccuuccugauggaccucgagggcaagcagggcaacuucaagaaccugcgggaguucguguucaagaacaucgauggcuacuucaagaucuacagcaagcacacccccaucaaccuggugcgggaccugccccagggauucagcgcccuggagccucugguggaccugcccaucggcaucaacaucaccagguuccagacccugcuggcccugcaccggagcuaccugacccccggcgacagcagcagcggcuggaccgccggcgccgccgcauacuacgugggcuaccugcagccacggaccuuccugcugaaguacaacgagaacggcaccaucaccgacgccguggacugcgcccuggacccccugagcgagaccaagugcacccuaaagagcuucaccguggagaagggcaucuaccagaccagcaacuuccgggugcagcccacugagagcaucgugcgguuccccaacauuaccaaccugugucccuucggcgagguguucaacgccacccgguucgccagcguguacgccuggaaccggaagcggaucagcaacugcguggccgacuacagcgugcuguacaacagcgccagcuucagcaccuucaagugcuacggcgugagcccuaccaagcugaacgaccugugcuucaccaacguguacgcugacagcuucgugauccggggcgacgaggugcggcagaucgcccccggccagaccggcaagaucgccgacuacaacuacaagcugcccgacgacuucaccggcugcgugaucgccuggaacagcaacaaccuggacagcaaggugggcggcaacuacaacuaccuguaccggcuguuccguaagagcaaccugaagccauucgagcgggacaucagcaccgagaucuaccaggccggcagcacccccugcaacgguguggagggcuuuaacugcuacuucccccugcagagcuacggcuuccagcccaccuacggcgugggcuaccagcccuaccgggugguggugcugagcuucgagcugcugcacgcccccgccaccgugugcggcccuaaaaagagcaccaaccuggugaagaacaagugcgugaacuucaacuucaauggccugaccggcaccggcgugcugaccgagagcaacaagaaguuccugcccuuccagcaguucggccgggauaucgccgacaccaccgacgcagugcgggacccccagacccuggagauccuggacaucaccccaugcagcuucggcggcgugagcgucaucacccccggcacaaacaccagcaaccagguggccgugcuguaccagggagugaacugcaccgaggugcccguggccauccacgccgaccagcugacccccaccuggcggguguacagcaccggcagcaacguguuccagacccgggccggcugccugaucggcgccgagcacgugaacaacuccuacgagugcgacauccccaucggcgcuggcaucugcgccagcuaccagacccagaccaacagcccccggcgggcccggagcguggccagccagagcaucaucgccuacaccaugagcuuaggcgccgagaacagcguggccuacagcaacaacagcaucgcgaucccuaccaacuucaccaucagcgugaccaccgagauacugcccgugagcaugaccaagaccagcguggacuguaccauguacaucugcggcgacagcaccgagugcagcaaccugcugcugcaguacggcagcuucugcacccagcugaaccgggcccugaccggcaucgccguggagcaggacaagaacacccaagagguguucgcccaggugaagcagaucuacaagacucccccaaucaaggacuucggcggcuucaacuucagccagauccugcccgaccccagcaagcccagcaagcggagcuucaucgaggaccugcuguucaacaaggugacccuggccgacgccggcuucaucaagcaguacggcgacugccugggggauaucgccgcucgggaccugaucugcgcccagaaguucaacggccugaccgugcugcccccucugcugaccgacgagaugaucgcccaguacaccagcgcccugcuugccggcaccaucaccagcggcuggaccuucggcgccggcgcagcccugcagauccccuucgccaugcagauggccuaccgguucaacggcaucggcgugacccagaacgugcuguacgagaaccagaagcugaucgccaaccaguucaacagcgccaucggcaagauccaggacagccugagcagcaccgccagcgcccugggcaagcugcaggacguggugaaccagaacgcucaggcccugaacacccuggugaagcagcugagcagcaacuucggcgccaucagcucagugcugaacgacauccugagcaggcuggacaagguggaggccgaggugcagaucgaccggcugaucaccggccggcugcagagccugcagaccuacgugacccagcagcugauccgggccgccgagauccgggccagcgccaaucuggcagccaccaagaugagcgagugcgugcugggccagagcaagcggguggacuuuugcggcaagggcuaccaccugaugagcuucccccagagcgccccacacggcgugguguuccuccacgucacauacgugcccgcccaggagaagaacuucaccaccgcccccgccauuugccacgacggcaaggcucacuucccccgggagggaguguucgugagcaacggcacccacugguucgugacccagcggaacuucuacgagccccagaucaucaccaccgacaacaccuucgugagcggcaacugcgacguggugaucggcaucgugaacaacaccguguacgacccccugcagccugagcuggacagcuucaaggaggagcuggacaaguacuucaagaaccacaccagccccgacguggaucugggcgacaucagcggcaucaacgccagcguggugaacauccagaaggagaucgaccggcugaacgagguggccaagaaccugaacgagagccugaucgaccugcaggagcugggcaaguacgagcaguacaucaaguggcccugguacaucuggcugggcuucaucgccggccugaucgccaucgugauggugaccaucaugcugugcugcaugaccagcugcuguagcugccugaagggcugcugcagcugcggcagcugcugcaaguucgacgaggacgacagcgagccagugcugaagggcgugaagcugcacuacaccugaggacuagucccuguucccagagcccacuuuuuuuucuuuuuuugaaauaaaauagccugucuuucagaucucaaaggcucuuuucagagccaccaaaaaaaaaaaaaaaaaaaaaaaaaaaaaaaaaaaaaaaaaaaaaaaaaaaaaaaaaaaaaaaaaaaaaaaaaaaaaaaaaaaaaaaaaaaaaaaaaaaaa

SEQ ID NO: 23469 - RNA, 4088 nt, Artificial Sequence
  SARS-CoV-2/Wuhan/WIV05/2019__EPI_ISL_402128 spike protein mRNA gc (1-1273)(H69del_V70del_D614G)
aggagagucccgcagucggcguccagcggcucugcuuguucgugugugugucguugcaggccuuauucaagcuuaccauguucguguuccuggugcugcugccccuggugagcagccagugcgugaaccugaccacccggacccagcugcccccugccuacaccaacagcuucacccggggcguguacuaccccgacaagguguuccggagcagcgugcugcacagcacccaggaccuguuccugcccuucuucagcaacgugaccugguuccacgccaucagcggcaccaacggcaccaagcgguucgacaacccagugcugcccuucaacgacggcguguacuucgccagcaccgagaagucaaacaucauccggggcuggaucuucggcaccacccuggacagcaagacacagagccugcugaucgugaacaacgccaccaacguggugaucaaggugugcgaguuucaguucugcaacgaccccuuccugggcguguacuaccacaagaacaacaagagcuggauggagagcgaguuccggguguacagcagcgcuaacaauugcaccuucgaguacgucagccagcccuuccugauggaccucgagggcaagcagggcaacuucaagaaccugcgggaguucguguucaagaacaucgauggcuacuucaagaucuacagcaagcacacccccaucaaccuggugcgggaccugccccagggauucagcgcccuggagccucugguggaccugcccaucggcaucaacaucaccagguuccagacccugcuggcccugcaccggagcuaccugacccccggcgacagcagcagcggcuggaccgccggcgccgccgcauacuacgugggcuaccugcagccacggaccuuccugcugaaguacaacgagaacggcaccaucaccgacgccguggacugcgcccuggacccccugagcgagaccaagugcacccuaaagagcuucaccguggagaagggcaucuaccagaccagcaacuuccgggugcagcccacugagagcaucgugcgguuccccaacauuaccaaccugugucccuucggcgagguguucaacgccacccgguucgccagcguguacgccuggaaccggaagcggaucagcaacugcguggccgacuacagcgugcuguacaacagcgccagcuucagcaccuucaagugcuacggcgugagcccuaccaagcugaacgaccugugcuucaccaacguguacgcugacagcuucgugauccggggcgacgaggugcggcagaucgcccccggccagaccggcaagaucgccgacuacaacuacaagcugcccgacgacuucaccggcugcgugaucgccuggaacagcaacaaccuggacagcaaggugggcggcaacuacaacuaccuguaccggcuguuccguaagagcaaccugaagccauucgagcgggacaucagcaccgagaucuaccaggccggcagcacccccugcaacgguguggagggcuuuaacugcuacuucccccugcagagcuacggcuuccagcccaccaacggcgugggcuaccagcccuaccgggugguggugcugagcuucgagcugcugcacgcccccgccaccgugugcggcccuaaaaagagcaccaaccuggugaagaacaagugcgugaacuucaauuucaacggccugaccggcaccggcgugcugaccgagagcaacaagaaguuccugcccuuccagcaguucggccgggauaucgccgacaccaccgacgcagugcgggacccccagacccuggagauccuggacaucaccccaugcagcuucggcggcgugagcgugaucacccccggcacaaacaccagcaaccaggucgccgugcuguaccagggagugaacugcaccgaggugcccguggccauccacgccgaccagcugacccccaccuggcggguguacagcaccggcagcaacguguuccagacccgggccggcugccugaucggcgccgagcacgugaacaacuccuacgagugcgacauccccaucggcgcuggcaucugcgccagcuaccagacccagaccaacagcccccggcgggcccggagcguggccagccagagcaucaucgccuacaccaugagcuuaggcgccgagaacagcguggccuacagcaacaacagcaucgcgaucccuaccaacuucaccaucagcgugaccaccgagauacugcccgugagcaugaccaagaccagcguggacuguaccauguacaucugcggcgacagcaccgagugcagcaaccugcugcugcaguacggcagcuucugcacccagcugaaccgggcccugaccggcaucgccguggagcaggacaagaacacccaagagguguucgcccaggugaagcagaucuacaagacucccccaaucaaggacuucggcggcuucaacuucagccagauccugcccgaccccagcaagcccagcaagcggagcuucaucgaggaccugcuguucaacaaggugacccuggccgacgccggcuucaucaagcaguacggcgacugccugggggauaucgccgcucgggaccugaucugcgcccagaaguucaacggccugaccgugcugcccccucugcugaccgacgagaugaucgcccaguacaccagcgcccugcuugccggcaccaucaccagcggcuggaccuucggcgccggcgcagcccugcagauccccuucgccaugcagauggccuaccgguucaacggcaucggcgugacccagaacgugcuguacgagaaccagaagcugaucgccaaccaguucaacagcgccaucggcaagauccaggacagccugagcagcaccgccagcgcccugggcaagcugcaggacguggugaaccagaacgcucaggcccugaacacccuggugaagcagcugagcagcaacuucggcgccaucagcucagugcugaaugacauccugagcaggcuggacaagguggaggccgaggugcagaucgaccggcugaucaccggccggcugcagagccugcagaccuacgugacccagcagcugauccgggccgccgagauccgggccagcgccaaccuggcagccaccaagaugagcgagugcgugcugggccagagcaagcggguggacuuuugcggcaagggcuaccaccugaugagcuucccccagagcgccccacacggcgugguguuccuccacgugacauacguccccgcccaggagaagaacuucaccaccgcccccgccauuugccacgacggcaaggcucacuucccccgggagggaguguucgugagcaacggcacccacugguucgugacccagcggaacuucuacgagccccagaucaucaccaccgacaacaccuucgugagcggcaacugcgacguggugaucggcaucgugaacaacaccguguacgacccccugcagccugagcuggacagcuucaaggaggagcuggacaaguacuucaagaaccacaccagccccgacguggaucugggcgacaucagcggcaucaacgccagcguggugaacauccagaaggagaucgaccggcugaacgagguggccaagaaccugaacgagagccugaucgaccugcaggagcugggcaaguacgagcaguacaucaaguggcccugguacaucuggcugggcuucaucgccggccugaucgccaucgugauggugaccaucaugcugugcugcaugaccagcugcuguagcugccugaagggcugcugcagcugcggcagcugcugcaaguucgacgaggacgacagcgagccagugcugaagggcgugaagcugcacuacaccugaggacuagucccuguucccagagcccacuuuuuuuucuuuuuuugaaauaaaauagccugucuuucagaucucaaaggcucuuuucagagccaccaaaaaaaaaaaaaaaaaaaaaaaaaaaaaaaaaaaaaaaaaaaaaaaaaaaaaaaaaaaaaaaaaaaaaaaaaaaaaaaaaaaaaaaaaaaaaaaaaaaaa

SEQ ID NO: 23470 - RNA, 4094 nt, Artificial Sequence
  SARS-CoV-2/Wuhan/WIV05/2019__EPI_ISL_402128 spike protein mRNA gc (1-1273)(Y453F_D614G)
aggagagucccgcagucggcguccagcggcucugcuuguucgugugugugucguugcaggccuuauucaagcuuaccauguucguguuccuggugcugcugccccuggugagcagccagugcgugaaccugaccacccggacccagcugcccccugccuacaccaacagcuucacccggggcguguacuaccccgacaagguguuccggagcagcgugcugcacagcacccaggaccuguuccugcccuucuucagcaacgugaccugguuccacgccauccacgugagcggcaccaacggcaccaagcgguucgacaacccagugcugcccuucaacgacggcguguacuucgccagcaccgagaagucaaacaucauccggggcuggaucuucggcaccacccuggacagcaagacacagagccugcugaucgugaacaacgccaccaacguggugaucaaggugugcgaguuucaguucugcaacgaccccuuccugggcguguacuaccacaagaacaacaagagcuggauggagagcgaguuccgggucuacagcagcgcuaacaauugcaccuucgaguacgugagccagcccuuccugauggaccucgagggcaagcagggcaacuucaagaaccugcgggaguucguguucaagaacaucgauggcuacuucaagaucuacagcaagcacacccccaucaaccuggugcgggaccugccccagggauucagcgcccuggagccucugguggaccugcccaucggcaucaacaucaccagguuccagacccugcuggcccugcaccggagcuaccugacccccggcgacagcagcagcggcuggaccgccggcgccgccgcauacuacgugggcuaccugcagccacggaccuuccugcugaaguacaacgagaacggcaccaucaccgacgccguggacugcgcccuggacccccugagcgagaccaagugcacccuaaagagcuucaccguggagaagggcaucuaccagaccagcaacuuccgggugcagcccacugagagcaucgugcgguuccccaacauuaccaaccugugucccuucggcgagguguucaacgccacccgguucgccagcguguacgccuggaaccggaagcggaucagcaacugcguggccgacuacagcgugcuguacaacagcgccagcuucagcaccuucaagugcuacggcgugagcccuaccaagcugaacgaccugugcuucaccaacguguacgcugacagcuucgugauccggggcgacgaggugcggcagaucgcccccggccagaccggcaagaucgccgacuacaacuacaagcugcccgacgacuucaccggcugcgugaucgccuggaacagcaacaaccuggacagcaaggugggcggcaacuacaacuaccuguuccggcuguuccguaagagcaaccugaagccauuugagcgggacaucagcaccgagaucuaccaggccggcagcacccccugcaacgguguggagggcuucaacugcuacuucccccugcagagcuacggcuuccagcccaccaacggcgugggcuaccagcccuaccgggugguggugcugagcuucgagcugcugcacgcccccgccaccgugugcggcccuaaaaagagcaccaaccuggugaagaacaagugcgugaacuucaauuucaacggccugaccggcaccggcgugcugaccgagagcaacaagaaguuccugcccuuccagcaguucggccgggauaucgccgacaccaccgacgcagugcgggacccccagacccuggagauccuggacaucaccccaugcagcuucggcggcgugagcgucaucacccccggcacaaacaccagcaaccagguggccgugcuguaccagggagugaacugcaccgaggugcccguggccauccacgccgaccagcugacccccaccuggcggguguacagcaccggcagcaacguguuccagacccgggccggcugccugaucggcgccgagcacgugaacaacuccuacgagugcgacauccccaucggcgcuggcaucugcgccagcuaccagacccagaccaacagcccccggcgggcccggagcguggccagccagagcaucaucgccuacaccaugagcuuaggcgccgagaacagcguggccuacagcaacaacagcaucgcgaucccuaccaacuucaccaucagcgugaccaccgagauacugcccgugagcaugaccaagaccagcguggacuguaccauguacaucugcggcgacagcaccgagugcagcaaccugcugcugcaguacggcagcuucugcacccagcugaaccgggcccugaccggcaucgccguggagcaggacaagaacacccaagagguguucgcccaggugaagcagaucuacaagacucccccaaucaaggacuucggcggcuucaacuucagccagauccugcccgaccccagcaagcccagcaagcggagcuucaucgaggaccugcuguucaacaaggugacccuggccgacgccggcuucaucaagcaguacggcgacugccugggggauaucgccgcucgggaccugaucugcgcccagaaguucaacggccugaccgugcugcccccucugcugaccgacgagaugaucgcccaguacaccagcgcccugcuugccggcaccaucaccagcggcuggaccuucggcgccggcgcagcccugcagauccccuucgccaugcagauggccuaccgguucaacggcaucggcgugacccagaacgugcuguacgagaaccagaagcugaucgccaaccaguucaacagcgccaucggcaagauccaggacagccugagcagcaccgccagcgcccugggcaagcugcaggacguggugaaccagaacgcucaggcccugaacacccuggugaagcagcugagcagcaacuuuggcgccaucagcucagugcugaaugacauccugagcaggcuggacaagguggaggccgaggugcagaucgaccggcugaucaccggccggcugcagagccugcagaccuacgugacccagcagcugauccgggccgccgagauccgggccagcgccaaccuggcagccaccaagaugagcgagugcgugcugggccagagcaagcggguggacuucugcggcaagggcuaccaccugaugagcuucccccagagcgccccacacggcgugguguuccuccacgucacauacgugcccgcccaggagaagaacuucaccaccgcccccgccauuugccacgacggcaaggcucacuucccccgggagggaguguucgugagcaacggcacccacugguucgugacccagcggaacuucuacgagccccagaucaucaccaccgacaacaccuucgugagcggcaacugcgacguggugaucggcaucgugaacaacaccguguacgacccccugcagccugagcuggacagcuucaaggaggagcuggacaaguacuucaagaaccacaccagccccgacguggaucugggcgacaucagcggcaucaacgccagcguggugaacauccagaaggagaucgaccggcugaacgagguggccaagaaccugaacgagagccugaucgaccugcaggagcugggcaaguacgagcaguacaucaaguggcccugguacaucuggcugggcuucaucgccggccugaucgccaucgugauggugaccaucaugcugugcugcaugaccagcugcuguagcugccugaagggcugcugcagcugcggcagcugcugcaaguucgacgaggacgacagcgagccagugcugaagggcgugaagcugcacuacaccugaggacuagucccuguucccagagcccacuuuuuuuucuuuuuuugaaauaaaauagccugucuuucagaucucaaaggcucuuuucagagccaccaaaaaaaaaaaaaaaaaaaaaaaaaaaaaaaaaaaaaaaaaaaaaaaaaaaaaaaaaaaaaaaaaaaaaaaaaaaaaaaaaaaaaaaaaaaaaaaaaaaaa

SEQ ID NO: 23471 - RNA, 4094 nt, Artificial Sequence
  SARS-CoV-2/Wuhan/WIV05/2019__EPI_ISL_402128 spike protein mRNA gc (1-1273)(D614G_I692V)
aggagagucccgcagucggcguccagcggcucugcuuguucgugugugugucguugcaggccuuauucaagcuuaccauguucguguuccuggugcugcugccccuggugagcagccagugcgugaaccugaccacccggacccagcugcccccugccuacaccaacagcuucacccggggcguguacuaccccgacaagguguuccggagcagcgugcugcacagcacccaggaccuguuccugcccuucuucagcaacgugaccugguuccacgccauccacgugagcggcaccaacggcaccaagcgguucgacaacccagugcugcccuucaacgacggcguguacuucgccagcaccgagaagucaaacaucauccggggcuggaucuucggcaccacccuggacagcaagacacagagccugcugaucgugaacaacgccaccaacguggugaucaaggugugcgaguuucaguucugcaacgaccccuuccugggcguguacuaccacaagaacaacaagagcuggauggagagcgaguuccgggucuacagcagcgcuaacaauugcaccuucgaguacgugagccagcccuuccugauggaccucgagggcaagcagggcaacuucaagaaccugcgggaguucguguucaagaacaucgauggcuacuucaagaucuacagcaagcacacccccaucaaccuggugcgggaccugccccagggauucagcgcccuggagccucugguggaccugcccaucggcaucaacaucaccagguuccagacccugcuggcccugcaccggagcuaccugacccccggcgacagcagcagcggcuggaccgccggcgccgccgcauacuacgugggcuaccugcagccacggaccuuccugcugaaguacaacgagaacggcaccaucaccgacgccguggacugcgcccuggacccccugagcgagaccaagugcacccuaaagagcuucaccguggagaagggcaucuaccagaccagcaacuuccgggugcagcccacugagagcaucgugcgguuccccaacauuaccaaccugugucccuucggcgagguguucaacgccacccgguucgccagcguguacgccuggaaccggaagcggaucagcaacugcguggccgacuacagcgugcuguacaacagcgccagcuucagcaccuucaagugcuacggcgugagcccuaccaagcugaacgaccugugcuucaccaacguguacgcugacagcuucgugauccggggcgacgaggugcggcagaucgcccccggccagaccggcaagaucgccgacuacaacuacaagcugcccgacgacuucaccggcugcgugaucgccuggaacagcaacaaccuggacagcaaggugggcggcaacuacaacuaccuguaccggcuguuccguaagagcaaccugaagccauucgagcgggacaucagcaccgagaucuaccaggccggcagcacccccugcaacgguguggagggcuuuaacugcuacuucccccugcagagcuacggcuuccagcccaccaacggcgugggcuaccagcccuaccgggugguggugcugagcuucgagcugcugcacgcccccgccaccgugugcggcccuaaaaagagcaccaaccuggugaagaacaagugcgugaacuucaauuucaacggccugaccggcaccggcgugcugaccgagagcaacaagaaguuccugcccuuccagcaguucggccgggauaucgccgacaccaccgacgcagugcgggacccccagacccuggagauccuggacaucaccccaugcagcuucggcggcgugagcgucaucacccccggcacaaacaccagcaaccagguggccgugcuguaccagggagugaacugcaccgaggugcccguggccauccacgccgaccagcugacccccaccuggcggguguacagcaccggcagcaacguguuccagacccgggccggcugccugaucggcgccgagcacgugaacaacuccuacgagugcgacauccccaucggcgcuggcaucugcgccagcuaccagacccagaccaacagcccccggcgggcccggagcguggccagccagagcgugaucgccuacaccaugagcuuaggcgccgagaacagcguggccuacagcaacaacagcaucgcgaucccuaccaacuucaccaucagcgugaccaccgagauccugcccgugagcaugaccaagaccagcguggacuguaccauguacauaugcggcgacagcaccgagugcagcaaccugcugcugcaguacggcagcuucugcacccagcugaaccgggcccugaccggcaucgccguggagcaggacaagaacacccaagagguguucgcccaggugaagcagaucuacaagacucccccaaucaaggacuucggcggcuucaacuucagccagauccugcccgaccccagcaagcccagcaagcggagcuucaucgaggaccugcuguucaacaaggugacccuggccgacgccggcuucaucaagcaguacggcgacugccugggggauaucgccgcucgggaccugaucugcgcccagaaguucaacggccugaccgugcugcccccucugcugaccgacgagaugaucgcccaguacaccagcgcccugcuugccggcaccaucaccagcggcuggaccuucggcgccggcgcagcccugcagauccccuucgccaugcagauggccuaccgguucaacggcaucggcgugacccagaacgugcuguacgagaaccagaagcugaucgccaaccaguucaacagcgccaucggcaagauccaggacagccugagcagcaccgccagcgcccugggcaagcugcaggacguggugaaccagaacgcucaggcccugaacacccuggugaagcagcugagcagcaacuucggcgccaucagcucagugcugaaugacauccugagcaggcuggacaagguggaggccgaggugcagaucgaccggcugaucaccggccggcugcagagccugcagaccuacgugacccagcagcugauccgggccgccgagauccgggccagcgccaaccuggcagccaccaagaugagcgagugcgugcugggccagagcaagcggguggacuuuugcggcaagggcuaccaccugaugagcuucccccagagcgccccacacggcguggucuuccuccacgugacauacgugcccgcccaggagaagaacuucaccaccgcccccgccaucugccacgacggcaaggcucacuucccccgggagggaguguucgugagcaacggcacccacugguucgugacccagcggaacuucuacgagccccagauuaucaccaccgacaacaccuucgugagcggcaacugcgacguggugaucggcaucgugaacaacaccguguacgacccccugcagccugagcuggacagcuucaaggaggagcuggacaaguacuucaagaaccacaccagccccgacguggaucugggcgacaucagcggcaucaacgccagcguggugaacauccagaaggagaucgaccggcugaacgagguggccaagaaccugaacgagagccugaucgaccugcaggagcugggcaaguacgagcaguacaucaaguggcccugguacaucuggcugggcuucaucgccggccugaucgccaucgugauggugaccaucaugcugugcugcaugaccagcugcuguagcugccugaagggcugcugcagcugcggcagcugcugcaaguucgacgaggacgacagcgagccagugcugaagggcgugaagcugcacuacaccugaggacuagucccuguucccagagcccacuuuuuuuucuuuuuuugaaauaaaauagccugucuuucagaucucaaaggcucuuuucagagccaccaaaaaaaaaaaaaaaaaaaaaaaaaaaaaaaaaaaaaaaaaaaaaaaaaaaaaaaaaaaaaaaaaaaaaaaaaaaaaaaaaaaaaaaaaaaaaaaaaaaaa

SEQ ID NO: 23472 - RNA, 4094 nt, Artificial Sequence
  SARS-CoV-2/Wuhan/WIV05/2019__EPI_ISL_402128 spike protein mRNA gc (1-1273)(D614G_M1229I)
aggagagucccgcagucggcguccagcggcucugcuuguucgugugugugucguugcaggccuuauucaagcuuaccauguucguguuccuggugcugcugccccuggugagcagccagugcgugaaccugaccacccggacccagcugcccccugccuacaccaacagcuucacccggggcguguacuaccccgacaagguguuccggagcagcgugcugcacagcacccaggaccuguuccugcccuucuucagcaacgugaccugguuccacgccauccacgugagcggcaccaacggcaccaagcgguucgacaacccagugcugcccuucaacgacggcguguacuucgccagcaccgagaagucaaacaucauccggggcuggaucuucggcaccacccuggacagcaagacacagagccugcugaucgugaacaacgccaccaacguggugaucaaggugugcgaguuucaguucugcaacgaccccuuccugggcguguacuaccacaagaacaacaagagcuggauggagagcgaguuccgggucuacagcagcgcuaacaauugcaccuucgaguacgugagccagcccuuccugauggaccucgagggcaagcagggcaacuucaagaaccugcgggaguucguguucaagaacaucgauggcuacuucaagaucuacagcaagcacacccccaucaaccuggugcgggaccugccccagggauucagcgcccuggagccucugguggaccugcccaucggcaucaacaucaccagguuccagacccugcuggcccugcaccggagcuaccugacccccggcgacagcagcagcggcuggaccgccggcgccgccgcauacuacgugggcuaccugcagccacggaccuuccugcugaaguacaacgagaacggcaccaucaccgacgccguggacugcgcccuggacccccugagcgagaccaagugcacccuaaagagcuucaccguggagaagggcaucuaccagaccagcaacuuccgggugcagcccacugagagcaucgugcgguuccccaacauuaccaaccugugucccuucggcgagguguucaacgccacccgguucgccagcguguacgccuggaaccggaagcggaucagcaacugcguggccgacuacagcgugcuguacaacagcgccagcuucagcaccuucaagugcuacggcgugagcccuaccaagcugaacgaccugugcuucaccaacguguacgcugacagcuucgugauccggggcgacgaggugcggcagaucgcccccggccagaccggcaagaucgccgacuacaacuacaagcugcccgacgacuucaccggcugcgugaucgccuggaacagcaacaaccuggacagcaaggugggcggcaacuacaacuaccuguaccggcuguuccguaagagcaaccugaagccauucgagcgggacaucagcaccgagaucuaccaggccggcagcacccccugcaacgguguggagggcuuuaacugcuacuucccccugcagagcuacggcuuccagcccaccaacggcgugggcuaccagcccuaccgggugguggugcugagcuucgagcugcugcacgcccccgccaccgugugcggcccuaaaaagagcaccaaccuggugaagaacaagugcgugaacuucaauuucaacggccugaccggcaccggcgugcugaccgagagcaacaagaaguuccugcccuuccagcaguucggccgggauaucgccgacaccaccgacgcagugcgggacccccagacccuggagauccuggacaucaccccaugcagcuucggcggcgugagcgucaucacccccggcacaaacaccagcaaccagguggccgugcuguaccagggagugaacugcaccgaggugcccguggccauccacgccgaccagcugacccccaccuggcggguguacagcaccggcagcaacguguuccagacccgggccggcugccugaucggcgccgagcacgugaacaacuccuacgagugcgacauccccaucggcgcuggcaucugcgccagcuaccagacccagaccaacagcccccggcgggcccggagcguggccagccagagcaucaucgccuacaccaugagcuuaggcgccgagaacagcguggccuacagcaacaacagcaucgcgaucccuaccaacuucaccaucagcgugaccaccgagauacugcccgugagcaugaccaagaccagcguggacuguaccauguacaucugcggcgacagcaccgagugcagcaaccugcugcugcaguacggcagcuucugcacccagcugaaccgggcccugaccggcaucgccguggagcaggacaagaacacccaagagguguucgcccaggugaagcagaucuacaagacucccccaaucaaggacuucggcggcuucaacuucagccagauccugcccgaccccagcaagcccagcaagcggagcuucaucgaggaccugcuguucaacaaggugacccuggccgacgccggcuucaucaagcaguacggcgacugccugggggauaucgccgcucgggaccugaucugcgcccagaaguucaacggccugaccgugcugcccccucugcugaccgacgagaugaucgcccaguacaccagcgcccugcuugccggcaccaucaccagcggcuggaccuucggcgccggcgcagcccugcagauccccuucgccaugcagauggccuaccgguucaacggcaucggcgugacccagaacgugcuguacgagaaccagaagcugaucgccaaccaguucaacagcgccaucggcaagauccaggacagccugagcagcaccgccagcgcccugggcaagcugcaggacguggugaaccagaacgcucaggcccugaacacccuggugaagcagcugagcagcaacuucggcgccaucagcucagugcugaaugacauccugagcaggcuggacaagguggaggccgaggugcagaucgaccggcugaucaccggccggcugcagagccugcagaccuacgugacccagcagcugauccgggccgccgagauccgggccagcgccaaccuggcagccaccaagaugagcgagugcgugcugggccagagcaagcggguggacuuuugcggcaagggcuaccaccugaugagcuucccccagagcgccccacacggcgugguguuccuccacgucacauacgugcccgcccaggagaagaacuucaccaccgcccccgccauuugccacgacggcaaggcucacuucccccgggagggaguguucgugagcaacggcacccacugguucgugacccagcggaacuucuacgagccccagaucaucaccaccgacaacaccuucgugagcggcaacugcgacguggugaucggcaucgugaacaacaccguguacgacccccugcagccugagcuggacagcuucaaggaggagcuggacaaguacuucaagaaccacaccagccccgacguggaucugggcgacaucagcggcaucaacgccagcguggugaacauccagaaggagaucgaccggcugaacgagguggccaagaaccugaacgagagccugaucgaccugcaggagcugggcaaguacgagcaguacaucaaguggcccugguacaucuggcugggcuucaucgccggccugaucgccaucgugaucgugaccaucaugcugugcugcaugaccagcugcuguagcugccugaagggcugcugcagcugcggcagcugcugcaaguucgacgaggacgacagcgagccagugcugaagggcgugaagcugcacuacaccugaggacuagucccuguucccagagcccacuuuuuuuucuuuuuuugaaauaaaauagccugucuuucagaucucaaaggcucuuuucagagccaccaaaaaaaaaaaaaaaaaaaaaaaaaaaaaaaaaaaaaaaaaaaaaaaaaaaaaaaaaaaaaaaaaaaaaaaaaaaaaaaaaaaaaaaaaaaaaaaaaaaaa

SEQ ID NO: 23473 - RNA, 4088 nt, Artificial Sequence
  SARS-CoV-2/Wuhan/WIV05/2019__EPI_ISL_402128 spike protein mRNA gc (1-1273)(H69del_V70del_A222V_Y453F_S477N_D614G_I692V)
aggagagucccgcagucggcguccagcggcucugcuuguucgugugugugucguugcaggccuuauucaagcuuaccauguucguguuccuggugcugcugccccuggugagcagccagugcgugaaccugaccacccggacccagcugcccccugccuacaccaacagcuucacccggggcguguacuaccccgacaagguguuccggagcagcgugcugcacagcacccaggaccuguuccugcccuucuucagcaacgugaccugguuccacgccaucagcggcaccaacggcaccaagcgguucgacaacccagugcugcccuucaacgacggcguguacuucgccagcaccgagaagucaaacaucauccggggcuggaucuucggcaccacccuggacagcaagacacagagccugcugaucgugaacaacgccaccaacguggugaucaaggugugcgaguuucaguucugcaacgaccccuuccugggcguguacuaccacaagaacaacaagagcuggauggagagcgaguuccggguguacagcagcgcuaacaauugcaccuucgaguacgucagccagcccuuccugauggaccucgagggcaagcagggcaacuucaagaaccugcgggaguucguguucaagaacaucgauggcuacuucaagaucuacagcaagcacacccccaucaaccuggugcgggaccugccccagggauucagcgugcuggagccucugguggaccugcccaucggcaucaacaucaccagguuccagacccugcuggcccugcaccggagcuaccugacccccggcgacagcagcagcggcuggaccgccggcgccgccgccuacuacgugggcuaccugcagccacggaccuuccugcugaaguacaacgagaacggcaccaucaccgacgcaguggacugcgcccuggacccccugagcgagaccaagugcacccuaaagagcuucaccguggagaagggcaucuaccagaccagcaacuuccgggugcagcccacugagagcaucgugcgguuccccaacauuaccaaccugugucccuucggcgagguguucaacgccacccgguucgccagcguguacgccuggaaccggaagcggaucagcaacugcguggccgacuacagcgugcuguacaacagcgccagcuucagcaccuucaagugcuacggcgugagcccuaccaagcugaacgaccugugcuucaccaacguguacgccgacagcuucgugauccggggcgacgaggugcggcagaucgcucccggccagaccggcaagaucgccgacuacaacuacaagcugcccgacgacuucaccggcugcgugaucgccuggaacagcaacaaccuggacagcaaggugggcggcaacuacaacuaccuguuccggcuguuccguaagagcaaccugaagccauuugagcgggacaucagcaccgagaucuaccaggccggcaacacccccugcaacgguguggagggcuucaacugcuacuucccccugcagagcuacggcuuccagcccaccaacggcgugggcuaccagcccuaccgggugguggugcugagcuucgagcugcugcacgcccccgccaccgugugcggcccuaaaaagagcaccaaccuggugaagaacaagugcgugaauuucaacuucaacggccugaccggcaccggcgugcugaccgagagcaacaagaaguuccugcccuuccagcaguucggccgggauaucgccgacaccaccgacgccgugcgggacccccagacccuggagauccuggacaucaccccaugcagcuucggcggcgugagcgucaucacccccggcacaaacaccagcaaccagguggcagugcuguaccagggagugaacugcaccgaggugcccguggccauccacgccgaccagcugacccccaccuggcggguguacagcaccggcagcaacguguuccagacccgggccggcugccugaucggcgccgagcacgugaacaacagcuacgagugcgacauccccaucggcgccggcaucugcgcuuccuaccagacccagaccaacagcccccggcgggcccggagcguggccagccagagcgugaucgccuacaccaugagcuuaggcgccgagaacagcguggccuacagcaacaacagcaucgccaucccuaccaacuucaccaucagcgugaccaccgagauccugcccgugagcaugaccaagaccagcguggacuguaccauguacauaugcggcgacagcaccgagugcagcaaccugcugcugcaguacggcagcuucugcacccagcugaaccgggcgcugaccggcaucgccguggagcaggacaagaacacccaagagguguucgcccaggugaagcagaucuacaagacucccccaaucaaggacuucggcggcuucaacuucagccagauccugcccgaccccagcaagcccagcaagcggagcuucaucgaggaccugcuguucaacaaggugacccuggccgacgccggcuucaucaagcaguacggcgacugccugggggauaucgccgcccgggaccugaucugcgcucagaaguucaacggccugaccgugcugcccccucugcugaccgacgagaugaucgcccaguacaccagcgcccugcuugccggcaccaucaccagcggcuggaccuucggcgccggcgccgcacugcagauccccuucgccaugcagauggccuaccgguucaacggcaucggcgugacccagaacgugcuguacgagaaccagaagcugaucgccaaccaguucaacagcgccaucggcaagauccaggacagccugagcagcaccgccagcgcccugggcaagcugcaggacguggugaaccagaacgcccaggcucugaacacccuggugaagcagcugagcagcaauuuuggcgccaucagcagcgugcugaacgacauccugucaaggcuggacaagguggaggccgaggugcagaucgaccggcugaucaccggccggcugcagagccugcagaccuacgugacccagcagcugauccgggccgccgagauccgggccagcgccaaccuggccgcaaccaagaugagcgagugcgugcugggccagagcaagcggguggacuucugcggcaagggcuaccaccugaugagcuucccccagagcgccccacacggcguggucuuccuccacgugacauacgugcccgcccaggagaagaacuucaccaccgcccccgccaucugccacgacggcaaggcccacuucccccgggagggaguguucgugagcaacggcacccacugguucgugacccagcggaacuucuacgagccccagauuaucaccaccgacaacaccuucgugagcggcaacugcgacguggugaucggcaucgugaacaacaccguguacgacccccugcagccugagcuggacagcuucaaggaggagcuggacaaguacuucaagaaccacaccagccccgacguggaucugggcgacaucagcggcaucaacgcuagcguggugaacauccagaaggagaucgaccggcugaacgagguggccaagaaccugaacgagagccugaucgaccugcaggagcugggcaaguacgagcaguacaucaaguggcccugguacaucuggcugggcuucaucgccggccugaucgccaucgugauggugaccaucaugcugugcugcaugaccagcugcuguagcugccugaagggcugcugcagcugcggcagcugcugcaaguucgacgaggacgacagcgagccagugcugaagggcgugaagcugcacuacaccugaggacuagucccuguucccagagcccacuuuuuuuucuuuuuuugaaauaaaauagccugucuuucagaucucaaaggcucuuuucagagccaccaaaaaaaaaaaaaaaaaaaaaaaaaaaaaaaaaaaaaaaaaaaaaaaaaaaaaaaaaaaaaaaaaaaaaaaaaaaaaaaaaaaaaaaaaaaaaaaaaaaaa

SEQ ID NO: 23474 - RNA, 4088 nt, Artificial Sequence
  SARS-CoV-2/Wuhan/WIV05/2019__EPI_ISL_402128 spike protein mRNA gc (1-1273)(H69del_V70del_Y453F_D614G_I692V_M1229I)
aggagagucccgcagucggcguccagcggcucugcuuguucgugugugugucguugcaggccuuauucaagcuuaccauguucguguuccuggugcugcugccccuggugagcagccagugcgugaaccugaccacccggacccagcugcccccugccuacaccaacagcuucacccggggcguguacuaccccgacaagguguuccggagcagcgugcugcacagcacccaggaccuguuccugcccuucuucagcaacgugaccugguuccacgccaucagcggcaccaacggcaccaagcgguucgacaacccagugcugcccuucaacgacggcguguacuucgccagcaccgagaagucaaacaucauccggggcuggaucuucggcaccacccuggacagcaagacacagagccugcugaucgugaacaacgccaccaacguggugaucaaggugugcgaguuucaguucugcaacgaccccuuccugggcguguacuaccacaagaacaacaagagcuggauggagagcgaguuccggguguacagcagcgcuaacaauugcaccuucgaguacgucagccagcccuuccugauggaccucgagggcaagcagggcaacuucaagaaccugcgggaguucguguucaagaacaucgauggcuacuucaagaucuacagcaagcacacccccaucaaccuggugcgggaccugccccagggauucagcgcccuggagccucugguggaccugcccaucggcaucaacaucaccagguuccagacccugcuggcccugcaccggagcuaccugacccccggcgacagcagcagcggcuggaccgccggcgccgccgcauacuacgugggcuaccugcagccacggaccuuccugcugaaguacaacgagaacggcaccaucaccgacgccguggacugcgcccuggacccccugagcgagaccaagugcacccuaaagagcuucaccguggagaagggcaucuaccagaccagcaacuuccgggugcagcccacugagagcaucgugcgguuccccaacauuaccaaccugugucccuucggcgagguguucaacgccacccgguucgccagcguguacgccuggaaccggaagcggaucagcaacugcguggccgacuacagcgugcuguacaacagcgccagcuucagcaccuucaagugcuacggcgugagcccuaccaagcugaacgaccugugcuucaccaacguguacgcugacagcuucgugauccggggcgacgaggugcggcagaucgcccccggccagaccggcaagaucgccgacuacaacuacaagcugcccgacgacuucaccggcugcgugaucgccuggaacagcaacaaccuggacagcaaggugggcggcaacuacaacuaccuguuccggcuguuccguaagagcaaccugaagccauuugagcgggacaucagcaccgagaucuaccaggccggcagcacccccugcaacgguguggagggcuucaacugcuacuucccccugcagagcuacggcuuccagcccaccaacggcgugggcuaccagcccuaccgggugguggugcugagcuucgagcugcugcacgcccccgccaccgugugcggcccuaaaaagagcaccaaccuggugaagaacaagugcgugaacuucaauuucaacggccugaccggcaccggcgugcugaccgagagcaacaagaaguuccugcccuuccagcaguucggccgggauaucgccgacaccaccgacgcagugcgggacccccagacccuggagauccuggacaucaccccaugcagcuucggcggcgugagcgugaucacccccggcacaaacaccagcaaccaggucgccgugcuguaccagggagugaacugcaccgaggugcccguggccauccacgccgaccagcugacccccaccuggcggguguacagcaccggcagcaacguguuccagacccgggccggcugccugaucggcgccgagcacgugaacaacuccuacgagugcgacauccccaucggcgcuggcaucugcgccagcuaccagacccagaccaacagcccccggcgggcccggagcguggccagccagagcgugaucgccuacaccaugagcuuaggcgccgagaacagcguggccuacagcaacaacagcaucgcgaucccuaccaacuucaccaucagcgugaccaccgagauccugcccgugagcaugaccaagaccagcguggacuguaccauguacauaugcggcgacagcaccgagugcagcaaccugcugcugcaguacggcagcuucugcacccagcugaaccgggcccugaccggcaucgccguggagcaggacaagaacacccaagagguguucgcccaggugaagcagaucuacaagacucccccaaucaaggacuucggcggcuucaacuucagccagauccugcccgaccccagcaagcccagcaagcggagcuucaucgaggaccugcuguucaacaaggugacccuggccgacgccggcuucaucaagcaguacggcgacugccugggggauaucgccgcucgggaccugaucugcgcccagaaguucaacggccugaccgugcugcccccucugcugaccgacgagaugaucgcccaguacaccagcgcccugcuugccggcaccaucaccagcggcuggaccuucggcgccggcgcagcccugcagauccccuucgccaugcagauggccuaccgguucaacggcaucggcgugacccagaacgugcuguacgagaaccagaagcugaucgccaaccaguucaacagcgccaucggcaagauccaggacagccugagcagcaccgccagcgcccugggcaagcugcaggacguggugaaccagaacgcucaggcccugaacacccuggugaagcagcugagcagcaacuuuggcgccaucagcucagugcugaaugacauccugagcaggcuggacaagguggaggccgaggugcagaucgaccggcugaucaccggccggcugcagagccugcagaccuacgugacccagcagcugauccgggccgccgagauccgggccagcgccaaccuggcagccaccaagaugagcgagugcgugcugggccagagcaagcggguggacuucugcggcaagggcuaccaccugaugagcuucccccagagcgccccacacggcgugguguuccuccacgucacauacgugcccgcccaggagaagaacuucaccaccgcccccgccaucugccacgacggcaaggcucacuucccccgggagggaguguucgugagcaacggcacccacugguucgugacccagcggaacuucuacgagccccagauuaucaccaccgacaacaccuucgugagcggcaacugcgacguggugaucggcaucgugaacaacaccguguacgacccccugcagccugagcuggacagcuucaaggaggagcuggacaaguacuucaagaaccacaccagccccgacguggaucugggcgacaucagcggcaucaacgccagcguggugaacauccagaaggagaucgaccggcugaacgagguggccaagaaccugaacgagagccugaucgaccugcaggagcugggcaaguacgagcaguacaucaaguggcccugguacaucuggcugggcuucaucgccggccugaucgccaucgugaucgugaccaucaugcugugcugcaugaccagcugcuguagcugccugaagggcugcugcagcugcggcagcugcugcaaguucgacgaggacgacagcgagccagugcugaagggcgugaagcugcacuacaccugaggacuagucccuguucccagagcccacuuuuuuuucuuuuuuugaaauaaaauagccugucuuucagaucucaaaggcucuuuucagagccaccaaaaaaaaaaaaaaaaaaaaaaaaaaaaaaaaaaaaaaaaaaaaaaaaaaaaaaaaaaaaaaaaaaaaaaaaaaaaaaaaaaaaaaaaaaaaaaaaaaaaa

SEQ ID NO: 23475 - RNA, 4085 nt, Artificial Sequence
  SARS-CoV-2/Wuhan/WIV05/2019__EPI_ISL_402128 spike protein mRNA gc (1-1273)(H69del_V70del_Y144del_N501Y_A570D_D614G_P681H_T716I_S982 A_D1118H)
aggagagucccgcagucggcguccagcggcucugcuuguucgugugugugucguugcaggccuuauucaagcuuaccauguucguguuccuggugcugcugccccuggugagcagccagugcgugaaccugaccacccggacccagcugcccccugccuacaccaacagcuucacccggggcguguacuaccccgacaagguguuccggagcagcgugcugcacagcacccaggaccuguuccugcccuucuucagcaacgugaccugguuccacgccaucagcggcaccaacggcaccaagcgguucgacaacccagugcugcccuucaacgacggcguguacuucgccagcaccgagaagucaaacaucauccggggcuggaucuucggcaccacccuggacagcaagacacagagccugcugaucgugaacaacgccaccaacguggugaucaaggugugcgaguuucaguucugcaacgaccccuuccugggcguguaccacaagaacaacaagagcuggauggagagcgaguuccggguguacagcagcgcuaacaauugcaccuucgaguacgucagccagcccuuccugauggaccucgagggcaagcagggcaacuucaagaaccugcgggaguucguguucaagaacaucgauggcuacuucaagaucuacagcaagcacacccccaucaaccuggugcgggaccugccccagggauucagcgcccuggagccucugguggaccugcccaucggcaucaacaucaccagguuccagacccugcuggcccugcaccggagcuaccugacccccggcgacagcagcagcggcuggaccgccggcgccgccgcauacuacgugggcuaccugcagccacggaccuuccugcugaaguacaacgagaacggcaccaucaccgacgccguggacugcgcccuggacccccugagcgagaccaagugcacccuaaagagcuucaccguggagaagggcaucuaccagaccagcaacuuccgggugcagcccacugagagcaucgugcgguuccccaacauuaccaaccugugucccuucggcgagguguucaacgccacccgguucgccagcguguacgccuggaaccggaagcggaucagcaacugcguggccgacuacagcgugcuguacaacagcgccagcuucagcaccuucaagugcuacggcgugagcccuaccaagcugaacgaccugugcuucaccaacguguacgcugacagcuucgugauccggggcgacgaggugcggcagaucgcccccggccagaccggcaagaucgccgacuacaacuacaagcugcccgacgacuucaccggcugcgugaucgccuggaacagcaacaaccuggacagcaaggugggcggcaacuacaacuaccuguaccggcuguuccguaagagcaaccugaagccauucgagcgggacaucagcaccgagaucuaccaggccggcagcacccccugcaacgguguggagggcuuuaacugcuacuucccccugcagagcuacggcuuccagcccaccuacggcgugggcuaccagcccuaccgggugguggugcugagcuucgagcugcugcacgcccccgccaccgugugcggcccuaaaaagagcaccaaccuggugaagaacaagugcgugaacuucaacuucaauggccugaccggcaccggcgugcugaccgagagcaacaagaaguuccugcccuuccagcaguucggccgggauaucgacgacaccaccgacgccgugcgggacccccagacccuggagauccuggacaucaccccaugcagcuucggcggcgugagcgugaucacccccggcacaaacaccagcaaccaggucgcagugcuguaccagggagugaacugcaccgaggugcccguggccauccacgccgaccagcugacccccaccuggcggguguacagcaccggcagcaacguguuccagacccgggccggcugccugaucggcgccgagcacgugaacaacuccuacgagugcgacauccccaucggcgccggcaucugcgcuagcuaccagacccagaccaacagccaccggcgggcccggagcguggccagccagagcaucaucgccuacaccaugagcuuaggcgccgagaacagcguggccuacagcaacaacagcaucgccauccccaucaacuucaccauaagcgugaccaccgagauccugccugugagcaugaccaagaccagcguggacuguaccauguacaucugcggcgacagcaccgagugcagcaaccugcugcugcaguacggcagcuucugcacccagcugaaccgggcgcugaccggcaucgccguggagcaggacaagaacacccaagagguguucgcccaggugaagcagaucuacaagaccccacccaucaaggacuucggcggcuucaacuucagccagauccugcccgaccccagcaagcccagcaagcggagcuucaucgaggaccugcuguucaacaaggugacucuggccgacgccggcuucaucaagcaguacggcgauugccugggggacaucgccgcccgggaccugaucugcgcucagaaguucaacggccugaccgugcugccuccccugcugaccgacgagaugaucgcccaguacaccagcgcccugcuugccggcaccaucaccagcggcuggaccuucggcgccggcgccgcacugcagauccccuucgccaugcagauggccuaccgguucaacggcaucggcgugacccagaacgugcuguacgagaaccagaagcugaucgccaaccaguucaacagcgccaucggcaagauccaggacagccugagcagcaccgccagcgcccugggcaagcugcaggacguggugaaccagaacgcccaggcucugaacacccuggugaagcagcugagcagcaacuucggcgccaucagcucagugcugaacgacauccuggccaggcuggacaagguggaggccgaggugcagaucgaccggcugaucaccggccggcugcagagccugcagaccuacgugacccagcagcugauccgggccgccgagauucgggccagcgccaaucuggcagccaccaagaugagcgagugcgugcugggccagagcaagcggguggacuuuugcggcaagggcuaccaccugaugagcuucccccagagcgcuccccacggcgugguguuccuccacgugaccuacgucccagcccaggagaagaacuucacaaccgcccccgccaucugccacgacggcaaggcccacuucccccgggagggaguguucgugagcaacggcacccacugguucgugacccagcggaacuucuacgagccccagaucaucaccacccacaacaccuucgugagcggcaacugcgacguggugaucggcaucgugaacaacaccguguacgacccccugcagcccgagcuggacagcuucaaggaggagcuggacaaguacuucaagaaccacaccagcccugacguggaucugggcgacaucagcggcaucaacgccagcguggugaacauccagaaggagaucgaccggcugaacgagguggccaagaaccugaacgagagccugaucgaccugcaggagcugggcaaguacgagcaguacaucaaguggcccugguacaucuggcugggcuucaucgccggccugaucgccaucgugauggugaccaucaugcugugcugcaugaccagcugcuguagcugccugaagggcugcugcagcugcggcagcugcugcaaguucgacgaggacgacagcgagcccgugcugaagggcgugaagcugcacuacaccugaggacuagucccuguucccagagcccacuuuuuuuucuuuuuuugaaauaaaauagccugucuuucagaucucaaaggcucuuuucagagccaccaaaaaaaaaaaaaaaaaaaaaaaaaaaaaaaaaaaaaaaaaaaaaaaaaaaaaaaaaaaaaaaaaaaaaaaaaaaaaaaaaaaaaaaaaaaaaaaaaaaaa

SEQ ID NO: 23476 - RNA, 4094 nt, Artificial Sequence
  SARS-CoV-2/Wuhan/WIV05/2019__EPI_ISL_402128 spike protein mRNA gc (1-1273)(K417N_E484K_N501Y_D614G)
aggagagucccgcagucggcguccagcggcucugcuuguucgugugugugucguugcaggccuuauucaagcuuaccauguucguguuccuggugcugcugccccuggugagcagccagugcgugaaccugaccacccggacccagcugcccccugccuacaccaacagcuucacccggggcguguacuaccccgacaagguguuccggagcagcgugcugcacagcacccaggaccuguuccugcccuucuucagcaacgugaccugguuccacgccauccacgugagcggcaccaacggcaccaagcgguucgacaacccagugcugcccuucaacgacggcguguacuucgccagcaccgagaagucaaacaucauccggggcuggaucuucggcaccacccuggacagcaagacacagagccugcugaucgugaacaacgccaccaacguggugaucaaggugugcgaguuucaguucugcaacgaccccuuccugggcguguacuaccacaagaacaacaagagcuggauggagagcgaguuccgggucuacagcagcgcuaacaauugcaccuucgaguacgugagccagcccuuccugauggaccucgagggcaagcagggcaacuucaagaaccugcgggaguucguguucaagaacaucgauggcuacuucaagaucuacagcaagcacacccccaucaaccuggugcgggaccugccccagggauucagcgcccuggagccucugguggaccugcccaucggcaucaacaucaccagguuccagacccugcuggcccugcaccggagcuaccugacccccggcgacagcagcagcggcuggaccgccggcgccgccgcauacuacgugggcuaccugcagccacggaccuuccugcugaaguacaacgagaacggcaccaucaccgacgccguggacugcgcccuggacccccugagcgagaccaagugcacccuaaagagcuucaccguggagaagggcaucuaccagaccagcaacuuccgggugcagcccacugagagcaucgugcgguuccccaacauuaccaaccugugucccuucggcgagguguucaacgccacccgguucgccagcguguacgccuggaaccggaagcggaucagcaacugcguggccgacuacagcgugcuguacaacagcgccagcuucagcaccuucaagugcuacggcgugagcccuaccaagcugaacgaccugugcuucaccaacguguacgcugacagcuucgugauccggggcgacgaggugcggcagaucgcccccggccagaccggcaacaucgccgacuacaacuacaagcugcccgacgacuucaccggcugcgugaucgccuggaacagcaacaaccuggacagcaaggugggcggcaacuacaacuaccuguaccggcuguuccguaagagcaaccugaagccauucgagcgggacaucagcaccgagaucuaccaggccggcagcacccccugcaacggugugaagggcuuuaacugcuacuucccccugcagagcuacggcuuccagcccaccuacggcgugggcuaccagcccuaccgggugguggugcugagcuucgagcugcugcacgcccccgccaccgugugcggcccuaaaaagagcaccaaccuggugaagaacaagugcgugaacuucaauuucaacggccugaccggcaccggcgugcugaccgagagcaacaagaaguuccugcccuuccagcaguucggccgggauaucgccgacaccaccgacgcagugcgggacccccagacccuggagauccuggacaucaccccaugcagcuucggcggcgugagcgucaucacccccggcacaaacaccagcaaccagguggccgugcuguaccagggagugaacugcaccgaggugcccguggccauccacgccgaccagcugacccccaccuggcggguguacagcaccggcagcaacguguuccagacccgggccggcugccugaucggcgccgagcacgugaacaacuccuacgagugcgacauccccaucggcgcuggcaucugcgccagcuaccagacccagaccaacagcccccggcgggcccggagcguggccagccagagcaucaucgccuacaccaugagcuuaggcgccgagaacagcguggccuacagcaacaacagcaucgcgaucccuaccaacuucaccaucagcgugaccaccgagauacugcccgugagcaugaccaagaccagcguggacuguaccauguacaucugcggcgacagcaccgagugcagcaaccugcugcugcaguacggcagcuucugcacccagcugaaccgggcccugaccggcaucgccguggagcaggacaagaacacccaagagguguucgcccaggugaagcagaucuacaagacucccccaaucaaggacuucggcggcuucaacuucagccagauccugcccgaccccagcaagcccagcaagcggagcuucaucgaggaccugcuguucaacaaggugacccuggccgacgccggcuucaucaagcaguacggcgacugccugggggauaucgccgcucgggaccugaucugcgcccagaaguucaacggccugaccgugcugcccccucugcugaccgacgagaugaucgcccaguacaccagcgcccugcuugccggcaccaucaccagcggcuggaccuucggcgccggcgcagcccugcagauccccuucgccaugcagauggccuaccgguucaacggcaucggcgugacccagaacgugcuguacgagaaccagaagcugaucgccaaccaguucaacagcgccaucggcaagauccaggacagccugagcagcaccgccagcgcccugggcaagcugcaggacguggugaaccagaacgcucaggcccugaacacccuggugaagcagcugagcagcaacuucggcgccaucagcucagugcugaaugacauccugagcaggcuggacaagguggaggccgaggugcagaucgaccggcugaucaccggccggcugcagagccugcagaccuacgugacccagcagcugauccgggccgccgagauccgggccagcgccaaccuggcagccaccaagaugagcgagugcgugcugggccagagcaagcggguggacuuuugcggcaagggcuaccaccugaugagcuucccccagagcgccccacacggcgugguguuccuccacgucacauacgugcccgcccaggagaagaacuucaccaccgcccccgccauuugccacgacggcaaggcucacuucccccgggagggaguguucgugagcaacggcacccacugguucgugacccagcggaacuucuacgagccccagaucaucaccaccgacaacaccuucgugagcggcaacugcgacguggugaucggcaucgugaacaacaccguguacgacccccugcagccugagcuggacagcuucaaggaggagcuggacaaguacuucaagaaccacaccagccccgacguggaucugggcgacaucagcggcaucaacgccagcguggugaacauccagaaggagaucgaccggcugaacgagguggccaagaaccugaacgagagccugaucgaccugcaggagcugggcaaguacgagcaguacaucaaguggcccugguacaucuggcugggcuucaucgccggccugaucgccaucgugauggugaccaucaugcugugcugcaugaccagcugcuguagcugccugaagggcugcugcagcugcggcagcugcugcaaguucgacgaggacgacagcgagccagugcugaagggcgugaagcugcacuacaccugaggacuagucccuguucccagagcccacuuuuuuuucuuuuuuugaaauaaaauagccugucuuucagaucucaaaggcucuuuucagagccaccaaaaaaaaaaaaaaaaaaaaaaaaaaaaaaaaaaaaaaaaaaaaaaaaaaaaaaaaaaaaaaaaaaaaaaaaaaaaaaaaaaaaaaaaaaaaaaaaaaaaa

SEQ ID NO: 23477 - RNA, 4085 nt, Artificial Sequence
  SARS-CoV-2/Wuhan/WIV05/2019__EPI_ISL_402128 spike protein mRNA gc (1-1273)(L18F_D80A_D215G_L242del_A243del_L244del_R246I_K417N_E484 K_N501Y_D614G_A701V)
aggagagucccgcagucggcguccagcggcucugcuuguucgugugugugucguugcaggccuuauucaagcuuaccauguucguguuccuggugcugcugccccuggugagcagccagugcgugaacuucaccacccggacccagcugcccccugccuacaccaacagcuucacccggggcguguacuaccccgacaagguguuccggagcagcgugcugcacagcacccaggaccuguuccugcccuucuucagcaacgugaccugguuccacgccauccacgugagcggcaccaacggcaccaagcgguucgccaacccagugcugcccuucaacgacggcguguacuucgccagcaccgagaagucaaacaucauccggggcuggaucuuuggcaccacccuggacagcaagacacagagccugcugaucgugaacaacgcuaccaacguggugaucaaggugugcgaguuccaguucugcaacgaccccuuccugggcguguacuaccacaagaacaacaagagcuggauggagagcgaguuccgggucuacagcagcgccaacaauugcaccuucgaguacgugagccagcccuuccugauggaccuggagggcaagcagggcaacuucaagaaccuccgggaguucguguucaagaacaucgacggcuacuucaagaucuacagcaagcacacccccaucaaccuggugcggggacugccccagggcuucagcgcccuggagccucugguggaucugcccaucggcaucaacaucaccagguuccagacccugcacaucagcuaccugacccccggcgacagcagcagcggcuggaccgccggcgccgccgcauacuacgugggcuaccugcagccacggaccuuccugcugaaguacaacgagaacggcaccaucaccgacgccguggacugcgcccuggacccccugagcgagaccaagugcacccuuaagagcuucaccguggagaagggcaucuaccagaccagcaacuuccgggugcagcccacugagagcauugugcgguuccccaacaucaccaaccugugucccuucggcgagguguucaacgccacccgguucgccagcguguacgccuggaaccggaagcggaucagcaacugcguggccgacuacagcgugcuguacaacagcgccagcuucagcaccuucaagugcuacggcgugagcccuaccaagcugaacgaccugugcuucaccaacguguacgcugacagcuucgugauccggggcgacgaggugcggcagaucgcccccggccagaccggcaacaucgccgacuacaacuacaagcugcccgacgacuucaccggcugcgugaucgccuggaacagcaacaaccuggacagcaaggugggcggcaacuacaacuaccuguaccggcuauuccguaagagcaaccugaagccauuugagcgggacaucagcaccgagaucuaccaggccgguagcacccccugcaacggcgugaagggcuucaacugcuacuucccccugcagagcuacggcuuccagcccaccuacggcgugggcuaccagcccuaccgggugguggugcugagcuucgagcugcugcacgcccccgccaccgugugcggcccuaaaaagagcaccaaccuggugaagaacaagugcgugaacuucaauuucaacggccugaccggcaccggcgugcugaccgagagcaacaagaaguuccugcccuuccagcaguucggccgggacaucgccgacaccaccgaugcagugcgggacccccagacccuggagauccuggacaucaccccaugcagcuucggcggcgugagcgucaucacccccggaacaaacaccagcaaccagguggccgugcuguaccagggcgugaacugcaccgaggugcccguggccauccacgccgaccagcugacccccaccuggcggguguacagcaccggcagcaacguguuccagacccgggccggcugccugaucggcgccgagcacgugaacaacuccuacgagugcgacauccccaucggcgcuggcaucugcgccagcuaccagacccagaccaacagcccccggcgggcccggagcguggccagccagagcaucaucgccuacaccaugagccugggcguggagaacagcguggccuacagcaacaacagcaucgccaucccuaccaacuucaccauaagcgugaccaccgagauccugcccgugagcaugaccaagaccagcguggacuguaccauguacaucugcggcgacagcaccgagugcagcaaccuguuacugcaguacggcagcuucugcacccagcugaaccgggcgcugaccggcaucgccguggagcaggacaagaacacccaagagguguucgcccaggugaagcagaucuacaagacucccccaaucaaggacuucggcggcuucaacuucagccagauccugcccgaccccagcaagcccagcaagcggagcuucaucgaggaccugcuguucaacaaggugacccuggccgacgccggcuucaucaagcaguacggggacugccugggcgacaucgccgcccgggaccugaucugcgcucagaaguucaacggccugaccgugcugcccccucugcugaccgaugagaugaucgcccaguacaccagcgcccugcuggccggcaccaucaccagcggcuggaccuucggcgccggcgccgcacugcagauccccuucgccaugcagauggccuaccgguucaacggcaucggcgugacccagaacgugcuguacgagaaccagaagcugaucgccaaccaguucaacagcgccaucggcaagauccaggacagccugagcagcaccgccagcgcccugggcaagcugcaggacguggugaaccagaacgcccaggcucugaacacccuggugaagcagcugagcagcaacuuuggcgccaucagcucagugcugaaugacauccugagccggcuggacaagguggaggccgaggugcagaucgacaggcugaucaccggccggcugcagagccugcagaccuacgugacccagcagcugauccgggccgccgagauucgggccagcgccaaccuggccgcaaccaagaugagcgagugcgugcugggccagagcaagcggguggacuucugcggcaagggcuaccaccugaugagcuucccccagagcgccccacacggcguggucuuccugcacgugacauacgugcccgcccaggagaagaacuucaccaccgcccccgccaucugccacgacggaaaggcccacuucccccgggagggcguguucgugagcaacggcacccacugguucgugacccagcggaacuucuacgagccccagaucaucaccaccgacaacaccuucgugagcggcaacugcgacguggugaucggcaucgugaacaacaccguguacgacccccugcagccugagcuggacagcuucaaggaggagcucgacaaguacuucaagaaccacaccagccccgacguggaccugggcgacaucagcggcaucaacgcuagcguggugaacauccagaaggagaucgaucggcugaacgagguggccaagaaccugaacgagagccugaucgaccugcaggagcugggcaaguacgagcaguacaucaaguggcccugguacaucuggcugggcuucaucgccggccugaucgccaucgugauggugaccaucaugcugugcugcaugaccagcugcuguagcugccugaagggcugcugcagcugcggcagcugcugcaaguucgacgaggacgacagcgagccagugcugaagggcgugaagcugcacuacaccugaggacuagucccuguucccagagcccacuuuuuuuucuuuuuuugaaauaaaauagccugucuuucagaucucaaaggcucuuuucagagccaccaaaaaaaaaaaaaaaaaaaaaaaaaaaaaaaaaaaaaaaaaaaaaaaaaaaaaaaaaaaaaaaaaaaaaaaaaaaaaaaaaaaaaaaaaaaaaaaaaaaaa

SEQ ID NO: 23478 - RNA, 4094 nt, Artificial Sequence
  SARS-CoV-2/Wuhan/WIV05/2019__EPI_ISL_402128 spike protein mRNA gc (1-1273)(E484K_D614G)
aggagagucccgcagucggcguccagcggcucugcuuguucgugugugugucguugcaggccuuauucaagcuuaccauguucguguuccuggugcugcugccccuggugagcagccagugcgugaaccugaccacccggacccagcugcccccugccuacaccaacagcuucacccggggcguguacuaccccgacaagguguuccggagcagcgugcugcacagcacccaggaccuguuccugcccuucuucagcaacgugaccugguuccacgccauccacgugagcggcaccaacggcaccaagcgguucgacaacccagugcugcccuucaacgacggcguguacuucgccagcaccgagaagucaaacaucauccggggcuggaucuucggcaccacccuggacagcaagacacagagccugcugaucgugaacaacgccaccaacguggugaucaaggugugcgaguuucaguucugcaacgaccccuuccugggcguguacuaccacaagaacaacaagagcuggauggagagcgaguuccgggucuacagcagcgcuaacaauugcaccuucgaguacgugagccagcccuuccugauggaccucgagggcaagcagggcaacuucaagaaccugcgggaguucguguucaagaacaucgauggcuacuucaagaucuacagcaagcacacccccaucaaccuggugcgggaccugccccagggauucagcgcccuggagccucugguggaccugcccaucggcaucaacaucaccagguuccagacccugcuggcccugcaccggagcuaccugacccccggcgacagcagcagcggcuggaccgccggcgccgccgcauacuacgugggcuaccugcagccacggaccuuccugcugaaguacaacgagaacggcaccaucaccgacgccguggacugcgcccuggacccccugagcgagaccaagugcacccuaaagagcuucaccguggagaagggcaucuaccagaccagcaacuuccgggugcagcccacugagagcaucgugcgguuccccaacauuaccaaccugugucccuucggcgagguguucaacgccacccgguucgccagcguguacgccuggaaccggaagcggaucagcaacugcguggccgacuacagcgugcuguacaacagcgccagcuucagcaccuucaagugcuacggcgugagcccuaccaagcugaacgaccugugcuucaccaacguguacgcugacagcuucgugauccggggcgacgaggugcggcagaucgcccccggccagaccggcaagaucgccgacuacaacuacaagcugcccgacgacuucaccggcugcgugaucgccuggaacagcaacaaccuggacagcaaggugggcggcaacuacaacuaccuguaccggcuguuccguaagagcaaccugaagccauucgagcgggacaucagcaccgagaucuaccaggccggcagcacccccugcaacggugugaagggcuuuaacugcuacuucccccugcagagcuacggcuuccagcccaccaacggcgugggcuaccagcccuaccgggugguggugcugagcuucgagcugcugcacgcccccgccaccgugugcggcccuaaaaagagcaccaaccuggugaagaacaagugcgugaacuucaauuucaacggccugaccggcaccggcgugcugaccgagagcaacaagaaguuccugcccuuccagcaguucggccgggauaucgccgacaccaccgacgcagugcgggacccccagacccuggagauccuggacaucaccccaugcagcuucggcggcgugagcgucaucacccccggcacaaacaccagcaaccagguggccgugcuguaccagggagugaacugcaccgaggugcccguggccauccacgccgaccagcugacccccaccuggcggguguacagcaccggcagcaacguguuccagacccgggccggcugccugaucggcgccgagcacgugaacaacuccuacgagugcgacauccccaucggcgcuggcaucugcgccagcuaccagacccagaccaacagcccccggcgggcccggagcguggccagccagagcaucaucgccuacaccaugagcuuaggcgccgagaacagcguggccuacagcaacaacagcaucgcgaucccuaccaacuucaccaucagcgugaccaccgagauacugcccgugagcaugaccaagaccagcguggacuguaccauguacaucugcggcgacagcaccgagugcagcaaccugcugcugcaguacggcagcuucugcacccagcugaaccgggcccugaccggcaucgccguggagcaggacaagaacacccaagagguguucgcccaggugaagcagaucuacaagacucccccaaucaaggacuucggcggcuucaacuucagccagauccugcccgaccccagcaagcccagcaagcggagcuucaucgaggaccugcuguucaacaaggugacccuggccgacgccggcuucaucaagcaguacggcgacugccugggggauaucgccgcucgggaccugaucugcgcccagaaguucaacggccugaccgugcugcccccucugcugaccgacgagaugaucgcccaguacaccagcgcccugcuugccggcaccaucaccagcggcuggaccuucggcgccggcgcagcccugcagauccccuucgccaugcagauggccuaccgguucaacggcaucggcgugacccagaacgugcuguacgagaaccagaagcugaucgccaaccaguucaacagcgccaucggcaagauccaggacagccugagcagcaccgccagcgcccugggcaagcugcaggacguggugaaccagaacgcucaggcccugaacacccuggugaagcagcugagcagcaacuucggcgccaucagcucagugcugaaugacauccugagcaggcuggacaagguggaggccgaggugcagaucgaccggcugaucaccggccggcugcagagccugcagaccuacgugacccagcagcugauccgggccgccgagauccgggccagcgccaaccuggcagccaccaagaugagcgagugcgugcugggccagagcaagcggguggacuuuugcggcaagggcuaccaccugaugagcuucccccagagcgccccacacggcgugguguuccuccacgucacauacgugcccgcccaggagaagaacuucaccaccgcccccgccauuugccacgacggcaaggcucacuucccccgggagggaguguucgugagcaacggcacccacugguucgugacccagcggaacuucuacgagccccagaucaucaccaccgacaacaccuucgugagcggcaacugcgacguggugaucggcaucgugaacaacaccguguacgacccccugcagccugagcuggacagcuucaaggaggagcuggacaaguacuucaagaaccacaccagccccgacguggaucugggcgacaucagcggcaucaacgccagcguggugaacauccagaaggagaucgaccggcugaacgagguggccaagaaccugaacgagagccugaucgaccugcaggagcugggcaaguacgagcaguacaucaaguggcccugguacaucuggcugggcuucaucgccggccugaucgccaucgugauggugaccaucaugcugugcugcaugaccagcugcuguagcugccugaagggcugcugcagcugcggcagcugcugcaaguucgacgaggacgacagcgagccagugcugaagggcgugaagcugcacuacaccugaggacuagucccuguucccagagcccacuuuuuuuucuuuuuuugaaauaaaauagccugucuuucagaucucaaaggcucuuuucagagccaccaaaaaaaaaaaaaaaaaaaaaaaaaaaaaaaaaaaaaaaaaaaaaaaaaaaaaaaaaaaaaaaaaaaaaaaaaaaaaaaaaaaaaaaaaaaaaaaaaaaaa

SEQ ID NO: 23479 - RNA, 4094 nt, Artificial Sequence
  SARS-CoV-2/Wuhan/WIV05/2019__EPI_ISL_402128 spike protein mRNA gc (1-1273)(L18F_T20N_P26S_D138Y_R190S_K417T_E484K_N501Y_D614G_H655Y _T1027I)
aggagagucccgcagucggcguccagcggcucugcuuguucgugugugugucguugcaggccuuauucaagcuuaccauguucguguuccuggugcugcugccccuggugagcagccagugcgugaacuucaccaaccggacccagcugcccagcgccuacaccaacagcuucacccggggcguguacuacccugacaagguguuccggagcagcgugcugcacagcacccaggaccuguuccugcccuucuucagcaacgugaccugguuccacgccauccacgugagcggcaccaacggcaccaagcgguucgacaaccccgugcugccauucaacgacggcguguacuucgccagcaccgagaagucaaacaucauccggggcuggaucuuuggcaccacccuggacagcaagacccagagccugcugaucgugaacaacgccacaaacguggugaucaaggugugcgaguuccaguucugcaacuaccccuuccugggcguguacuaccacaagaacaacaagagcuggauggagagcgaguuccgggucuacagcagcgcuaauaacugcaccuucgaguacgugagccagcccuuccugauggaccuggagggcaagcagggcaacuucaagaaccucagcgaguucguguucaagaacaucgacggcuacuucaagaucuacagcaagcacacccccaucaaccuggugcgggaucugccccagggauucagcgcccuggagccccugguggaccugccuaucggcaucaacaucacccgguuccagacccugcuggcccugcacaggagcuaccugacccccggcgacagcagcagcggcuggaccgccggcgccgccgcauacuacgugggcuaccugcagccccggaccuuccugcugaaguacaacgagaacggcaccaucaccgacgccguggacugcgcccuggacccacugagcgagaccaagugcacccuaaagagcuucaccguggagaagggcaucuaccagaccagcaacuuccgggugcagcccaccgagagcaucgugcgguuccccaacauuacuaaccugugucccuucggcgagguguucaacgccacccgguucgccagcguguacgccuggaaccggaagcggaucagcaacugcguggccgacuacagcgugcuguacaacagcgccagcuucagcaccuucaagugcuacggcgugagccccaccaagcugaacgaccugugcuucaccaacguguacgcugacagcuucgugauccggggcgacgaggugcggcagaucgccccuggccagaccggcaccaucgccgacuacaacuacaagcugcccgacgacuucaccggcugcgugaucgccuggaacagcaacaaccuggacagcaaggugggcggcaacuacaacuaccuguaccggcuguuccguaagagcaaccugaagcccuuugagcgggacaucagcaccgagaucuaccaggccggcagcaccccaugcaacggugugaagggcuucaacugcuacuucccccugcagagcuacggcuuccagcccaccuacggcgugggcuaccagcccuaccgggugguggugcugagcuucgagcugcugcacgcccccgccaccgugugcggccccaaaaagagcaccaaccuggugaagaacaagugcgugaacuucaauuucaacggccugaccggcaccggcgugcugaccgagagcaacaagaaguuccugccuuuccagcaguucggccgggacaucgccgauaccaccgacgcagugcgggacccccagacccuggagauccuggacaucacccccugcagcuucggcggcgugagcgucaucaccccaggcacaaacaccagcaaccagguggccgugcuguaccagggagugaacugcaccgaggugcccguggccauccacgccgaccagcugacccccaccuggcggguguacuccaccggcagcaacguguuccagacccgggccggcugccugaucggcgccgaguacgugaacaacagcuacgagugcgacauccccaucggcgcuggcaucugcgccagcuaccagacccagaccaacagcccccggcgggcccggagcguggccagccagagcaucaucgccuacaccaugagccugggcgccgagaacagcguggccuacagcaacaacagcaucgcgauccccaccaacuucaccaucagcgugaccaccgagauauuaccugugagcaugaccaagaccagcguggacuguaccauguacaucugcggcgacagcaccgagugcagcaaccugcugcugcaguacggcagcuucugcacccagcugaaccgggcccugaccggcaucgccguggagcaggacaagaacacccaagagguguucgcccaggugaagcagaucuacaagacuccacccaucaaggacuucggcggcuucaacuucagccagauccugcccgaccccagcaagcccagcaagcggagcuucaucgaggaccugcuguucaacaaggugacccuggccgacgccggcuucaucaagcaguacggcgacugccugggggacaucgccgcucgggaucugaucugcgcccagaaguucaacggccugaccgugcugccuccccugcugaccgacgagaugaucgcccaguacaccagcgcccugcuggccggcaccaucaccagcggcuggaccuucggcgccggcgcagcccuucagauccccuucgccaugcagauggccuaccgguucaacggcaucggcgugacccagaacgugcuguacgagaaccagaagcugaucgccaaccaguucaacagcgccaucggcaagauccaggacagccugagcagcaccgccagcgcccugggcaagcugcaggacguggugaaccagaacgcucaggcccugaacacccuggugaagcagcugagcucaaacuuuggcgccaucagcagcgugcugaaugacauccugagccggcuggacaagguggaggccgaggugcagaucgacaggcugaucaccggccggcugcagagccugcagaccuacgugacccagcagcugauccgggccgccgagauccgggccagcgccaaccuggcagccauuaagaugagcgagugcgugcugggccagagcaagcggguggacuucugcggcaagggcuaccaccugaugagcuucccccagagcgcuccccacggcgugguguuccugcacgucaccuacgugccagcccaggagaagaacuucacaaccgcccccgccaucugccacgacggcaaggcccacuucccccgggagggaguguucgugagcaacggcacccacugguucgugacccagcggaacuucuacgagccccagaucaucaccaccgacaacaccuucgugagcggcaacugcgacguggugaucggcaucgugaacaacaccguguacgacccccuccagcccgagcuggacagcuucaaggaggagcuggacaaguacuucaagaaccacaccagcccugacguggaccugggcgauaucagcggcaucaacgccagcguggugaacauccagaaggagaucgaccggcugaacgagguggccaagaaccugaacgagagccugaucgaccugcaggagcugggcaaguacgagcaguacaucaaguggcccugguacaucuggcugggcuucaucgccggccugaucgccaucgugauggugaccaucaugcugugcugcaugaccagcugcuguagcugccugaagggcugcugcagcugcggcagcugcugcaaguucgacgaggacgacagcgagcccgugcugaagggcgugaagcugcacuacaccugaggacuagucccuguucccagagcccacuuuuuuuucuuuuuuugaaauaaaauagccugucuuucagaucucaaaggcucuuuucagagccaccaaaaaaaaaaaaaaaaaaaaaaaaaaaaaaaaaaaaaaaaaaaaaaaaaaaaaaaaaaaaaaaaaaaaaaaaaaaaaaaaaaaaaaaaaaaaaaaaaaaaa

SEQ ID NO: 23480 - RNA, 4094 nt, Artificial Sequence
  SARS-CoV-2/Wuhan/WIV05/2019__EPI_ISL_402128 spike protein mRNA gc (1-1273)(S13I_W152C_L452R_D614G)
aggagagucccgcagucggcguccagcggcucugcuuguucgugugugugucguugcaggccuuauucaagcuuaccauguucguguuccuggugcugcugccccuggugagcauccagugcgugaaccugaccacccggacccagcugcccccugccuacaccaacagcuucacccggggcguguacuaccccgacaagguguuccggagcagcgugcugcacagcacccaggaccuguuccugcccuucuucagcaacgugaccugguuccacgccauccacgugagcggcaccaacggcaccaagcgguucgacaacccagugcugcccuucaacgacggcguguacuucgccagcaccgagaagucaaacaucauccggggcuggaucuucggcaccacccuggacagcaagacacagagccugcugaucgugaacaacgccaccaacguggugaucaaggugugcgaguuucaguucugcaacgaccccuuccugggcguguacuaccacaagaacaacaagagcugcauggagagcgaguuccgggucuacagcagcgcuaacaauugcaccuucgaguacgugagccagcccuuccugauggaccucgagggcaagcagggcaacuucaagaaccugcgggaguucguguucaagaacaucgauggcuacuucaagaucuacagcaagcacacccccaucaaccuggugcgggaccugccccagggauucagcgcccuggagccucugguggaccugcccaucggcaucaacaucaccagguuccagacccugcuggcccugcaccggagcuaccugacccccggcgacagcagcagcggcuggaccgccggcgccgccgcauacuacgugggcuaccugcagccacggaccuuccugcugaaguacaacgagaacggcaccaucaccgacgccguggacugcgcccuggacccccugagcgagaccaaguguacccuaaagagcuucaccguggagaagggcaucuaccagaccagcaacuuccgggugcagcccacugagagcauugugcgguuccccaacaucaccaaccugugccccuucggcgagguguucaacgccacccgguucgccagcguguacgccuggaaccggaagcggaucagcaacugcguggccgacuacagcgugcuguacaacagcgccagcuucagcaccuucaagugcuacggcgugagcccuaccaagcugaacgaccugugcuucaccaacguguacgcugacagcuucgugauccggggcgacgaggugcggcagaucgcccccggccagaccggcaagaucgccgacuacaacuacaagcugcccgacgacuucaccggcugcgugaucgccuggaacagcaacaaccuggacagcaaggugggcggcaacuacaacuaccgguaccggcuguuccguaagagcaaccugaagccauucgagcgggacaucagcaccgagaucuaccaggccggcagcacccccugcaacgguguggagggcuuuaacugcuacuucccccugcagagcuacggcuuccagcccaccaacggcgugggcuaccagcccuaccgggugguggugcugagcuucgagcugcugcacgcccccgccaccgugugcggcccuaaaaagagcaccaaccuggugaagaacaagugcgugaacuucaauuucaacggccugaccggcaccggcgugcugaccgagagcaacaagaaguuccugcccuuccagcaguucggccgggauaucgccgacaccaccgacgcagugcgggacccccagacccuggagauccuggacaucaccccaugcagcuucggcggcgugagcgucaucacccccggcacaaacaccagcaaccagguggccgugcuguaccagggagugaacugcaccgaggugcccguggccauccacgccgaccagcugacccccaccuggcggguguacagcaccggcagcaacguguuccagacccgggccggcugccugaucggcgccgagcacgugaacaacagcuacgagugcgacauccccaucggcgcuggcaucugugccuccuaccagacccagaccaacagcccccggcgggcccggagcguggccagccagagcaucaucgccuacaccaugagccugggcgccgagaacagcguggccuacagcaacaacagcaucgcgaucccuaccaacuucaccauaagcgugaccaccgagaucuuacccgugagcaugaccaagaccagcguggacugcaccauguacaucugcggcgacagcaccgagugcagcaaccugcugcugcaguacggcagcuucugcacccagcugaaccgggcccugaccggcaucgccguggagcaggacaagaacacccaagagguguucgcccaggugaagcagaucuacaagacucccccaaucaaggacuucggcggcuucaacuucagccagauccugcccgaccccagcaagcccagcaagcggagcuucaucgaggaccugcuguucaacaaggugacccuggccgacgccggcuucaucaagcaguacggcgacugccugggggauaucgccgcucgggaccugaucugcgcccagaaguucaacggccugaccgugcugcccccucugcugaccgacgagaugaucgcccaguacaccagcgcccugcuggccggcaccaucaccagcggcuggaccuucggcgccggcgcagcccuucagauccccuucgccaugcagauggccuacagguucaacggcaucggcgugacccagaacgugcuguacgagaaccagaagcugaucgccaaccaguucaacagcgccaucggcaagauccaggacagccugagcagcaccgccagcgcccugggcaagcugcaggacguggugaaccagaacgcucaggcccugaacacccuggugaagcagcugagcagcaacuucggcgccaucagcagcgugcugaaugacauccugucacggcuggacaagguggaggccgaggugcagaucgaccggcugaucaccggccggcugcagagccugcagaccuacgugacccagcagcugauccgggccgccgagauucgggccagcgccaaccuggcagccaccaagaugagcgagugcgugcugggccagagcaagcggguggacuuuugcggcaagggcuaccaccugaugagcuucccccagagcgccccacacggcgugguguuccugcacgucacauacgugcccgcccaggagaagaacuucaccaccgcccccgccaucugccacgacggcaaggcucacuucccccgggagggaguguucgugagcaacggcacccacugguucgugacccagcggaacuucuacgagccccagaucaucaccaccgacaacaccuucgugagcggcaacugcgacguggugaucggcaucgugaacaacaccguguacgacccccuccagccugagcuggacagcuucaaggaggagcuggacaaguacuucaagaaccacaccagccccgacguggaucugggcgacaucagcggcaucaacgccagcguggugaacauccagaaggagaucgaccggcugaacgagguggccaagaaccugaacgagagccugaucgaccugcaggagcugggcaaguacgagcaguacaucaaguggcccugguacaucuggcugggcuucaucgccggccugaucgccaucgugauggugaccaucaugcugugcugcaugaccagcuguugcagcugccugaagggcugcugcagcugcggcagcugcugcaaguucgacgaggacgacagcgagccagugcugaagggcgugaagcugcacuacaccugaggacuagucccuguucccagagcccacuuuuuuuucuuuuuuugaaauaaaauagccugucuuucagaucucaaaggcucuuuucagagccaccaaaaaaaaaaaaaaaaaaaaaaaaaaaaaaaaaaaaaaaaaaaaaaaaaaaaaaaaaaaaaaaaaaaaaaaaaaaaaaaaaaaaaaaaaaaaaaaaaaaaa

SEQ ID NO: 23481 - RNA, 4094 nt, Artificial Sequence; identical to SEQ ID NO: 12540
  SARS-CoV-2/Wuhan/WIV05/2019__EPI_ISL_402128 spike protein mRNA gc mod (1-1273)

SEQ ID NO: 23482 - RNA, 4094 nt, Artificial Sequence
  SARS-CoV-2/Wuhan/WIV05/2019__EPI_ISL_402128 spike protein mRNA gc mod (1-1273)(D614G)
aggagagucccgcagucggcguccagcggcucugcuuguucgugugugugucguugcaggccuuauucaagcuuaccauguucguguuucuggugcugcugccccugguguccagccagugugugaaccugaccaccagaacacagcugccuccagccuacaccaacagcuucaccagaggcguguacuaccccgacaagguguucagauccagcgugcugcacucuacccaggaccuguuccugccuuucuucagcaacgugaccugguuccacgccauccacguguccggcaccaauggcaccaagagauucgacaaccccgugcugcccuucaacgacgggguguacuuugccagcaccgagaaguccaacaucaucagaggcuggaucuucggcaccacacuggacagcaagacccagagccugcugaucgugaacaacgccaccaacguggucaucaaagugugcgaguuccaguucugcaacgaccccuuccugggcgucuacuaccacaagaacaacaagagcuggauggaaagcgaguuccggguguacagcagcgccaacaacugcaccuucgaguacgugucccagccuuuccugauggaccuggaaggcaagcagggcaacuucaagaaccugcgcgaguucguguucaagaacaucgacggcuacuucaaaaucuacagcaagcacaccccuaucaaccucgugcgggaucugccucagggcuucucugcucuggaaccccugguggaucugcccaucggcaucaacaucacccgguuucagacacugcuggcccugcacagaagcuaccugacaccuggcgauagcagcagcggauggacagcuggugccgccgcuuacuaugugggcuaccugcagccuagaaccuuccugcugaaguacaacgagaacggcaccaucaccgacgccguggauugugcucuggauccucugagcgagacaaagugcacccugaaguccuucaccguggaaaagggcaucuaccagaccagcaacuuccgggugcagcccaccgaauccaucgugcgguuccccaauaucaccaaucugugccccuucggcgagguguucaaugccaccagauucgccucuguguacgccuggaaccggaagcggaucagcaauugcguggccgacuacuccgugcuguacaacuccgccagcuucagcaccuucaagugcuacggcguguccccuaccaagcugaacgaccugugcuucacaaacguguacgccgacagcuucgugauccggggagaugaagugcggcagauugccccuggacagacaggcaagaucgccgacuacaacuacaagcugcccgacgacuucaccggcugugugauugccuggaacagcaacaaccuggacuccaaagucggcggcaacuacaauuaccuguaccggcuguuccggaaguccaaucugaagcccuucgagcgggacaucagcaccgaaaucuaucaggccggcagcaccccuugcaacggcguggaaggcuucaacugcuacuucccacugcaguccuacggcuuucagcccacaaauggcgugggcuaucagcccuacagagugguggugcugagcuucgaacugcugcaugcuccugccacagugugcggcccuaagaaaagcaccaaucucgugaagaacaaaugcgugaacuucaacuucaacggccugaccggcaccggcgugcugacagagagcaacaagaaguuccugccauuccagcaguuuggccgggauaucgccgauaccacagacgccguuagagauccccagacacuggaaauccuggacaucaccccaugcagcuucggcggagugucugugaucaccccuggcaccaacaccagcaaucagguggcagugcuguaccagggcgugaacuguaccgaagugcccguggccauucacgccgaucagcugacaccuacauggcggguguacuccaccggcagcaauguguuucagaccagagccggcugucugaucggagccgagcacgugaacaauagcuacgagugcgacauccccaucggcgcuggcaucugugccagcuaccagacacagacaaacagccccagacgggcuagaagcguggccagccagagcaucauugccuacacaaugucucugggcgccgagaacagcguggccuacuccaacaacucuaucgcuauccccaccaacuucaccaucagcgugaccaccgagauccugccuguguccaugaccaagaccagcguggacugcaccauguacaucugcggcgauuccaccgagugcuccaaccugcugcugcaguacggcagcuucugcacccagcugaauagagcccugacagggaucgccguggaacaggacaagaacacccaagagguguucgcccaagugaagcaaaucuacaagaccccuccuaucaaggacuucggcggcuucaauuucagccagauucugcccgauccuagcaagcccagcaagcggagcuucaucgaggaccugcuguucaacaaagugacacuggccgacgccggcuucaucaagcaguauggcgauugucugggcgacauugccgccagggaucugauuugcgcccagaaguuuaacggacugacagugcugccuccucugcugaccgaugagaugaucgcccaguacacaucugcccugcuggccggcacaaucacaagcggcuggacauuuggagcuggcgccgcucugcagauccccuuugcuaugcagauggccuaccgguucaacggcaucggagugacccagaaugugcuguacgagaaccagaagcugaucgccaaccaguucaacagcgccaucggcaagauccaggacagccugagcagcacagcaagcgcccugggaaagcugcaggacguggucaaccagaaugcccaggcacugaacacccuggucaagcagcuguccuccaacuucggcgccaucagcucugugcugaacgauauccugagcagacuggacaaggucgaggccgaggugcagaucgacagacugaucacaggcagacugcagagccuccagacauacgugacccagcagcugaucagagccgccgagauuagagccucugccaaucuggccgccaccaagaugucugagugugugcugggccagagcaagagaguggacuuuugcggcaagggcuaccaccugaugagcuucccucagucugccccucacggcgugguguuucugcacgugacauaugugcccgcucaagagaagaauuucaccaccgcuccagccaucugccacgacggcaaagcccacuuuccuagagaaggcguguucguguccaacggcacccauugguucgugacacagcggaacuucuacgagccccagaucaucaccaccgacaacaccuucgugucuggcaacugcgacguugugaucggcauugugaacaauaccguguacgacccucugcagcccgagcuggacagcuucaaagaggaacuggacaaguacuuuaagaaccacacaagccccgacguggaccugggcgauaucagcggaaucaaugccagcgucgugaacauccagaaagagaucgaccggcugaacgagguggccaagaaucugaacgagagccugaucgaccugcaagaacuggggaaguacgagcaguacaucaaguggcccugguacaucuggcugggcuuuaucgccggacugauugccaucgugauggucacaaucaugcuguguugcaugaccagcugcuguagcugccugaagggcuguuguagcuguggcagcugcugcaaguucgacgaggacgauucugagcccgugcugaagggcgugaaacugcacuacaccugaggacuagucccuguucccagagcccacuuuuuuuucuuuuuuugaaauaaaauagccugucuuucagaucucaaaggcucuuuucagagccaccaaaaaaaaaaaaaaaaaaaaaaaaaaaaaaaaaaaaaaaaaaaaaaaaaaaaaaaaaaaaaaaaaaaaaaaaaaaaaaaaaaaaaaaaaaaaaaaaaaaaa

SEQ ID NO: 23483 - RNA, 4094 nt, Artificial Sequence
  SARS-CoV-2/Wuhan/WIV05/2019__EPI_ISL_402128 spike protein mRNA gc mod (1-1273)(A222V_D614G)
aggagagucccgcagucggcguccagcggcucugcuuguucgugugugugucguugcaggccuuauucaagcuuaccauguucguguuucuggugcugcugccccugguguccagccagugugugaaccugaccaccagaacacagcugccuccagccuacaccaacagcuucaccagaggcguguacuaccccgacaagguguucagauccagcgugcugcacucuacccaggaccuguuccugccuuucuucagcaacgugaccugguuccacgccauccacguguccggcaccaauggcaccaagagauucgacaaccccgugcugcccuucaacgacgggguguacuuugccagcaccgagaaguccaacaucaucagaggcuggaucuucggcaccacacuggacagcaagacccagagccugcugaucgugaacaacgccaccaacguggucaucaaagugugcgaguuccaguucugcaacgaccccuuccugggcgucuacuaccacaagaacaacaagagcuggauggaaagcgaguuccggguguacagcagcgccaacaacugcaccuucgaguacgugucccagccuuuccugauggaccuggaaggcaagcagggcaacuucaagaaccugcgcgaguucguguucaagaacaucgacggcuacuucaaaaucuacagcaagcacaccccuaucaaccucgugcgggaucugccucagggcuucucugugcuggaaccccugguggaucugcccaucggcaucaacaucacccgguuucagacacugcuggcccugcacagaagcuaccugacaccuggcgauagcagcagcggauggacagcuggugccgccgcuuacuaugugggcuaccugcagccuagaaccuuccugcugaaguacaacgagaacggcaccaucaccgacgccguggauugugcucuggauccucugagcgagacaaagugcacccugaaguccuucaccguggaaaagggcaucuaccagaccagcaacuuccgggugcagcccaccgaauccaucgugcgguuccccaauaucaccaaucugugccccuucggcgagguguucaaugccaccagauucgccucuguguacgccuggaaccggaagcggaucagcaauugcguggccgacuacuccgugcuguacaacuccgccagcuucagcaccuucaagugcuacggcguguccccuaccaagcugaacgaccugugcuucacaaacguguacgccgacagcuucgugauccggggagaugaagugcggcagauugccccuggacagacaggcaagaucgccgacuacaacuacaagcugcccgacgacuucaccggcugugugauugccuggaacagcaacaaccuggacuccaaagucggcggcaacuacaauuaccuguaccggcuguuccggaaguccaaucugaagcccuucgagcgggacaucagcaccgaaaucuaucaggccggcagcaccccuugcaacggcguggaaggcuucaacugcuacuucccacugcaguccuacggcuuucagcccacaaauggcgugggcuaucagcccuacagagugguggugcugagcuucgaacugcugcaugcuccugccacagugugcggcccuaagaaaagcaccaaucucgugaagaacaaaugcgugaacuucaacuucaacggccugaccggcaccggcgugcugacagagagcaacaagaaguuccugccauuccagcaguuuggccgggauaucgccgauaccacagacgccguuagagauccccagacacuggaaauccuggacaucaccccaugcagcuucggcggagugucugugaucaccccuggcaccaacaccagcaaucagguggcagugcuguaccagggcgugaacuguaccgaagugcccguggccauucacgccgaucagcugacaccuacauggcggguguacuccaccggcagcaauguguuucagaccagagccggcugucugaucggagccgagcacgugaacaauagcuacgagugcgacauccccaucggcgcuggcaucugugccagcuaccagacacagacaaacagccccagacgggcuagaagcguggccagccagagcaucauugccuacacaaugucucugggcgccgagaacagcguggccuacuccaacaacucuaucgcuauccccaccaacuucaccaucagcgugaccaccgagauccugccuguguccaugaccaagaccagcguggacugcaccauguacaucugcggcgauuccaccgagugcuccaaccugcugcugcaguacggcagcuucugcacccagcugaauagagcccugacagggaucgccguggaacaggacaagaacacccaagagguguucgcccaagugaagcaaaucuacaagaccccuccuaucaaggacuucggcggcuucaauuucagccagauucugcccgauccuagcaagcccagcaagcggagcuucaucgaggaccugcuguucaacaaagugacacuggccgacgccggcuucaucaagcaguauggcgauugucugggcgacauugccgccagggaucugauuugcgcccagaaguuuaacggacugacagugcugccuccucugcugaccgaugagaugaucgcccaguacacaucugcccugcuggccggcacaaucacaagcggcuggacauuuggagcuggcgccgcucugcagauccccuuugcuaugcagauggccuaccgguucaacggcaucggagugacccagaaugugcuguacgagaaccagaagcugaucgccaaccaguucaacagcgccaucggcaagauccaggacagccugagcagcacagcaagcgcccugggaaagcugcaggacguggucaaccagaaugcccaggcacugaacacccuggucaagcagcuguccuccaacuucggcgccaucagcucugugcugaacgauauccugagcagacuggacaaggucgaggccgaggugcagaucgacagacugaucacaggcagacugcagagccuccagacauacgugacccagcagcugaucagagccgccgagauuagagccucugccaaucuggccgccaccaagaugucugagugugugcugggccagagcaagagaguggacuuuugcggcaagggcuaccaccugaugagcuucccucagucugccccucacggcgugguguuucugcacgugacauaugugcccgcucaagagaagaauuucaccaccgcuccagccaucugccacgacggcaaagcccacuuuccuagagaaggcguguucguguccaacggcacccauugguucgugacacagcggaacuucuacgagccccagaucaucaccaccgacaacaccuucgugucuggcaacugcgacguugugaucggcauugugaacaauaccguguacgacccucugcagcccgagcuggacagcuucaaagaggaacuggacaaguacuuuaagaaccacacaagccccgacguggaccugggcgauaucagcggaaucaaugccagcgucgugaacauccagaaagagaucgaccggcugaacgagguggccaagaaucugaacgagagccugaucgaccugcaagaacuggggaaguacgagcaguacaucaaguggcccugguacaucuggcugggcuuuaucgccggacugauugccaucgugauggucacaaucaugcuguguugcaugaccagcugcuguagcugccugaagggcuguuguagcuguggcagcugcugcaaguucgacgaggacgauucugagcccgugcugaagggcgugaaacugcacuacaccugaggacuagucccuguucccagagcccacuuuuuuuucuuuuuuugaaauaaaauagccugucuuucagaucucaaaggcucuuuucagagccaccaaaaaaaaaaaaaaaaaaaaaaaaaaaaaaaaaaaaaaaaaaaaaaaaaaaaaaaaaaaaaaaaaaaaaaaaaaaaaaaaaaaaaaaaaaaaaaaaaaaaa

SEQ ID NO: 23484 - RNA, 4094 nt, Artificial Sequence
  SARS-CoV-2/Wuhan/WIV05/2019__EPI_ISL_402128 spike protein mRNA gc mod (1-1273)(N439K_D614G)
aggagagucccgcagucggcguccagcggcucugcuuguucgugugugugucguugcaggccuuauucaagcuuaccauguucguguuucuggugcugcugccccugguguccagccagugugugaaccugaccaccagaacacagcugccuccagccuacaccaacagcuucaccagaggcguguacuaccccgacaagguguucagauccagcgugcugcacucuacccaggaccuguuccugccuuucuucagcaacgugaccugguuccacgccauccacguguccggcaccaauggcaccaagagauucgacaaccccgugcugcccuucaacgacgggguguacuuugccagcaccgagaaguccaacaucaucagaggcuggaucuucggcaccacacuggacagcaagacccagagccugcugaucgugaacaacgccaccaacguggucaucaaagugugcgaguuccaguucugcaacgaccccuuccugggcgucuacuaccacaagaacaacaagagcuggauggaaagcgaguuccggguguacagcagcgccaacaacugcaccuucgaguacgugucccagccuuuccugauggaccuggaaggcaagcagggcaacuucaagaaccugcgcgaguucguguucaagaacaucgacggcuacuucaaaaucuacagcaagcacaccccuaucaaccucgugcgggaucugccucagggcuucucugcucuggaaccccugguggaucugcccaucggcaucaacaucacccgguuucagacacugcuggcccugcacagaagcuaccugacaccuggcgauagcagcagcggauggacagcuggugccgccgcuuacuaugugggcuaccugcagccuagaaccuuccugcugaaguacaacgagaacggcaccaucaccgacgccguggauugugcucuggauccucugagcgagacaaagugcacccugaaguccuucaccguggaaaagggcaucuaccagaccagcaacuuccgggugcagcccaccgaauccaucgugcgguuccccaauaucaccaaucugugccccuucggcgagguguucaaugccaccagauucgccucuguguacgccuggaaccggaagcggaucagcaauugcguggccgacuacuccgugcuguacaacuccgccagcuucagcaccuucaagugcuacggcguguccccuaccaagcugaacgaccugugcuucacaaacguguacgccgacagcuucgugauccggggagaugaagugcggcagauugccccuggacagacaggcaagaucgccgacuacaacuacaagcugcccgacgacuucaccggcugugugauugccuggaacagcaagaaccuggacuccaaagucggcggcaacuacaauuaccuguaccggcuguuccggaaguccaaucugaagcccuucgagcgggacaucagcaccgaaaucuaucaggccggcagcaccccuugcaacggcguggaaggcuucaacugcuacuucccacugcaguccuacggcuuucagcccacaaauggcgugggcuaucagcccuacagagugguggugcugagcuucgaacugcugcaugcuccugccacagugugcggcccuaagaaaagcaccaaucucgugaagaacaaaugcgugaacuucaacuucaacggccugaccggcaccggcgugcugacagagagcaacaagaaguuccugccauuccagcaguuuggccgggauaucgccgauaccacagacgccguuagagauccccagacacuggaaauccuggacaucaccccaugcagcuucggcggagugucugugaucaccccuggcaccaacaccagcaaucagguggcagugcuguaccagggcgugaacuguaccgaagugcccguggccauucacgccgaucagcugacaccuacauggcggguguacuccaccggcagcaauguguuucagaccagagccggcugucugaucggagccgagcacgugaacaauagcuacgagugcgacauccccaucggcgcuggcaucugugccagcuaccagacacagacaaacagccccagacgggcuagaagcguggccagccagagcaucauugccuacacaaugucucugggcgccgagaacagcguggccuacuccaacaacucuaucgcuauccccaccaacuucaccaucagcgugaccaccgagauccugccuguguccaugaccaagaccagcguggacugcaccauguacaucugcggcgauuccaccgagugcuccaaccugcugcugcaguacggcagcuucugcacccagcugaauagagcccugacagggaucgccguggaacaggacaagaacacccaagagguguucgcccaagugaagcaaaucuacaagaccccuccuaucaaggacuucggcggcuucaauuucagccagauucugcccgauccuagcaagcccagcaagcggagcuucaucgaggaccugcuguucaacaaagugacacuggccgacgccggcuucaucaagcaguauggcgauugucugggcgacauugccgccagggaucugauuugcgcccagaaguuuaacggacugacagugcugccuccucugcugaccgaugagaugaucgcccaguacacaucugcccugcuggccggcacaaucacaagcggcuggacauuuggagcuggcgccgcucugcagauccccuuugcuaugcagauggccuaccgguucaacggcaucggagugacccagaaugugcuguacgagaaccagaagcugaucgccaaccaguucaacagcgccaucggcaagauccaggacagccugagcagcacagcaagcgcccugggaaagcugcaggacguggucaaccagaaugcccaggcacugaacacccuggucaagcagcuguccuccaacuucggcgccaucagcucugugcugaacgauauccugagcagacuggacaaggucgaggccgaggugcagaucgacagacugaucacaggcagacugcagagccuccagacauacgugacccagcagcugaucagagccgccgagauuagagccucugccaaucuggccgccaccaagaugucugagugugugcugggccagagcaagagaguggacuuuugcggcaagggcuaccaccugaugagcuucccucagucugccccucacggcgugguguuucugcacgugacauaugugcccgcucaagagaagaauuucaccaccgcuccagccaucugccacgacggcaaagcccacuuuccuagagaaggcguguucguguccaacggcacccauugguucgugacacagcggaacuucuacgagccccagaucaucaccaccgacaacaccuucgugucuggcaacugcgacguugugaucggcauugugaacaauaccguguacgacccucugcagcccgagcuggacagcuucaaagaggaacuggacaaguacuuuaagaaccacacaagccccgacguggaccugggcgauaucagcggaaucaaugccagcgucgugaacauccagaaagagaucgaccggcugaacgagguggccaagaaucugaacgagagccugaucgaccugcaagaacuggggaaguacgagcaguacaucaaguggcccugguacaucuggcugggcuuuaucgccggacugauugccaucgugauggucacaaucaugcuguguugcaugaccagcugcuguagcugccugaagggcuguuguagcuguggcagcugcugcaaguucgacgaggacgauucugagcccgugcugaagggcgugaaacugcacuacaccugaggacuagucccuguucccagagcccacuuuuuuuucuuuuuuugaaauaaaauagccugucuuucagaucucaaaggcucuuuucagagccaccaaaaaaaaaaaaaaaaaaaaaaaaaaaaaaaaaaaaaaaaaaaaaaaaaaaaaaaaaaaaaaaaaaaaaaaaaaaaaaaaaaaaaaaaaaaaaaaaaaaaa

SEQ ID NO: 23485 - RNA, 4094 nt, Artificial Sequence
  SARS-CoV-2/Wuhan/WIV05/2019__EPI_ISL_402128 spike protein mRNA gc mod (1-1273)(S477N_D614G)
aggagagucccgcagucggcguccagcggcucugcuuguucgugugugugucguugcaggccuuauucaagcuuaccauguucguguuucuggugcugcugccccugguguccagccagugugugaaccugaccaccagaacacagcugccuccagccuacaccaacagcuucaccagaggcguguacuaccccgacaagguguucagauccagcgugcugcacucuacccaggaccuguuccugccuuucuucagcaacgugaccugguuccacgccauccacguguccggcaccaauggcaccaagagauucgacaaccccgugcugcccuucaacgacgggguguacuuugccagcaccgagaaguccaacaucaucagaggcuggaucuucggcaccacacuggacagcaagacccagagccugcugaucgugaacaacgccaccaacguggucaucaaagugugcgaguuccaguucugcaacgaccccuuccugggcgucuacuaccacaagaacaacaagagcuggauggaaagcgaguuccggguguacagcagcgccaacaacugcaccuucgaguacgugucccagccuuuccugauggaccuggaaggcaagcagggcaacuucaagaaccugcgcgaguucguguucaagaacaucgacggcuacuucaaaaucuacagcaagcacaccccuaucaaccucgugcgggaucugccucagggcuucucugcucuggaaccccugguggaucugcccaucggcaucaacaucacccgguuucagacacugcuggcccugcacagaagcuaccugacaccuggcgauagcagcagcggauggacagcuggugccgccgcuuacuaugugggcuaccugcagccuagaaccuuccugcugaaguacaacgagaacggcaccaucaccgacgccguggauugugcucuggauccucugagcgagacaaagugcacccugaaguccuucaccguggaaaagggcaucuaccagaccagcaacuuccgggugcagcccaccgaauccaucgugcgguuccccaauaucaccaaucugugccccuucggcgagguguucaaugccaccagauucgccucuguguacgccuggaaccggaagcggaucagcaauugcguggccgacuacuccgugcuguacaacuccgccagcuucagcaccuucaagugcuacggcguguccccuaccaagcugaacgaccugugcuucacaaacguguacgccgacagcuucgugauccggggagaugaagugcggcagauugccccuggacagacaggcaagaucgccgacuacaacuacaagcugcccgacgacuucaccggcugugugauugccuggaacagcaacaaccuggacuccaaagucggcggcaacuacaauuaccuguaccggcuguuccggaaguccaaucugaagcccuucgagcgggacaucagcaccgaaaucuaucaggccggcaacaccccuugcaacggcguggaaggcuucaacugcuacuucccacugcaguccuacggcuuucagcccacaaauggcgugggcuaucagcccuacagagugguggugcugagcuucgaacugcugcaugcuccugccacagugugcggcccuaagaaaagcaccaaucucgugaagaacaaaugcgugaacuucaacuucaacggccugaccggcaccggcgugcugacagagagcaacaagaaguuccugccauuccagcaguuuggccgggauaucgccgauaccacagacgccguuagagauccccagacacuggaaauccuggacaucaccccaugcagcuucggcggagugucugugaucaccccuggcaccaacaccagcaaucagguggcagugcuguaccagggcgugaacuguaccgaagugcccguggccauucacgccgaucagcugacaccuacauggcggguguacuccaccggcagcaauguguuucagaccagagccggcugucugaucggagccgagcacgugaacaauagcuacgagugcgacauccccaucggcgcuggcaucugugccagcuaccagacacagacaaacagccccagacgggcuagaagcguggccagccagagcaucauugccuacacaaugucucugggcgccgagaacagcguggccuacuccaacaacucuaucgcuauccccaccaacuucaccaucagcgugaccaccgagauccugccuguguccaugaccaagaccagcguggacugcaccauguacaucugcggcgauuccaccgagugcuccaaccugcugcugcaguacggcagcuucugcacccagcugaauagagcccugacagggaucgccguggaacaggacaagaacacccaagagguguucgcccaagugaagcaaaucuacaagaccccuccuaucaaggacuucggcggcuucaauuucagccagauucugcccgauccuagcaagcccagcaagcggagcuucaucgaggaccugcuguucaacaaagugacacuggccgacgccggcuucaucaagcaguauggcgauugucugggcgacauugccgccagggaucugauuugcgcccagaaguuuaacggacugacagugcugccuccucugcugaccgaugagaugaucgcccaguacacaucugcccugcuggccggcacaaucacaagcggcuggacauuuggagcuggcgccgcucugcagauccccuuugcuaugcagauggccuaccgguucaacggcaucggagugacccagaaugugcuguacgagaaccagaagcugaucgccaaccaguucaacagcgccaucggcaagauccaggacagccugagcagcacagcaagcgcccugggaaagcugcaggacguggucaaccagaaugcccaggcacugaacacccuggucaagcagcuguccuccaacuucggcgccaucagcucugugcugaacgauauccugagcagacuggacaaggucgaggccgaggugcagaucgacagacugaucacaggcagacugcagagccuccagacauacgugacccagcagcugaucagagccgccgagauuagagccucugccaaucuggccgccaccaagaugucugagugugugcugggccagagcaagagaguggacuuuugcggcaagggcuaccaccugaugagcuucccucagucugccccucacggcgugguguuucugcacgugacauaugugcccgcucaagagaagaauuucaccaccgcuccagccaucugccacgacggcaaagcccacuuuccuagagaaggcguguucguguccaacggcacccauugguucgugacacagcggaacuucuacgagccccagaucaucaccaccgacaacaccuucgugucuggcaacugcgacguugugaucggcauugugaacaauaccguguacgacccucugcagcccgagcuggacagcuucaaagaggaacuggacaaguacuuuaagaaccacacaagccccgacguggaccugggcgauaucagcggaaucaaugccagcgucgugaacauccagaaagagaucgaccggcugaacgagguggccaagaaucugaacgagagccugaucgaccugcaagaacuggggaaguacgagcaguacaucaaguggcccugguacaucuggcugggcuuuaucgccggacugauugccaucgugauggucacaaucaugcuguguugcaugaccagcugcuguagcugccugaagggcuguuguagcuguggcagcugcugcaaguucgacgaggacgauucugagcccgugcugaagggcgugaaacugcacuacaccugaggacuagucccuguucccagagcccacuuuuuuuucuuuuuuugaaauaaaauagccugucuuucagaucucaaaggcucuuuucagagccaccaaaaaaaaaaaaaaaaaaaaaaaaaaaaaaaaaaaaaaaaaaaaaaaaaaaaaaaaaaaaaaaaaaaaaaaaaaaaaaaaaaaaaaaaaaaaaaaaaaaaa

SEQ ID NO: 23486 - RNA, 4094 nt, Artificial Sequence
  SARS-CoV-2/Wuhan/WIV05/2019__EPI_ISL_402128 spike protein mRNA gc mod (1-1273)(N501Y_D614G)
aggagagucccgcagucggcguccagcggcucugcuuguucgugugugugucguugcaggccuuauucaagcuuaccauguucguguuucuggugcugcugccccugguguccagccagugugugaaccugaccaccagaacacagcugccuccagccuacaccaacagcuucaccagaggcguguacuaccccgacaagguguucagauccagcgugcugcacucuacccaggaccuguuccugccuuucuucagcaacgugaccugguuccacgccauccacguguccggcaccaauggcaccaagagauucgacaaccccgugcugcccuucaacgacgggguguacuuugccagcaccgagaaguccaacaucaucagaggcuggaucuucggcaccacacuggacagcaagacccagagccugcugaucgugaacaacgccaccaacguggucaucaaagugugcgaguuccaguucugcaacgaccccuuccugggcgucuacuaccacaagaacaacaagagcuggauggaaagcgaguuccggguguacagcagcgccaacaacugcaccuucgaguacgugucccagccuuuccugauggaccuggaaggcaagcagggcaacuucaagaaccugcgcgaguucguguucaagaacaucgacggcuacuucaaaaucuacagcaagcacaccccuaucaaccucgugcgggaucugccucagggcuucucugcucuggaaccccugguggaucugcccaucggcaucaacaucacccgguuucagacacugcuggcccugcacagaagcuaccugacaccuggcgauagcagcagcggauggacagcuggugccgccgcuuacuaugugggcuaccugcagccuagaaccuuccugcugaaguacaacgagaacggcaccaucaccgacgccguggauugugcucuggauccucugagcgagacaaagugcacccugaaguccuucaccguggaaaagggcaucuaccagaccagcaacuuccgggugcagcccaccgaauccaucgugcgguuccccaauaucaccaaucugugccccuucggcgagguguucaaugccaccagauucgccucuguguacgccuggaaccggaagcggaucagcaauugcguggccgacuacuccgugcuguacaacuccgccagcuucagcaccuucaagugcuacggcguguccccuaccaagcugaacgaccugugcuucacaaacguguacgccgacagcuucgugauccggggagaugaagugcggcagauugccccuggacagacaggcaagaucgccgacuacaacuacaagcugcccgacgacuucaccggcugugugauugccuggaacagcaacaaccuggacuccaaagucggcggcaacuacaauuaccuguaccggcuguuccggaaguccaaucugaagcccuucgagcgggacaucagcaccgaaaucuaucaggccggcagcaccccuugcaacggcguggaaggcuucaacugcuacuucccacugcaguccuacggcuuucagcccacauacggcgugggcuaucagcccuacagagugguggugcugagcuucgaacugcugcaugcuccugccacagugugcggcccuaagaaaagcaccaaucucgugaagaacaaaugcgugaacuucaacuucaacggccugaccggcaccggcgugcugacagagagcaacaagaaguuccugccauuccagcaguuuggccgggauaucgccgauaccacagacgccguuagagauccccagacacuggaaauccuggacaucaccccaugcagcuucggcggagugucugugaucaccccuggcaccaacaccagcaaucagguggcagugcuguaccagggcgugaacuguaccgaagugcccguggccauucacgccgaucagcugacaccuacauggcggguguacuccaccggcagcaauguguuucagaccagagccggcugucugaucggagccgagcacgugaacaauagcuacgagugcgacauccccaucggcgcuggcaucugugccagcuaccagacacagacaaacagccccagacgggcuagaagcguggccagccagagcaucauugccuacacaaugucucugggcgccgagaacagcguggccuacuccaacaacucuaucgcuauccccaccaacuucaccaucagcgugaccaccgagauccugccuguguccaugaccaagaccagcguggacugcaccauguacaucugcggcgauuccaccgagugcuccaaccugcugcugcaguacggcagcuucugcacccagcugaauagagcccugacagggaucgccguggaacaggacaagaacacccaagagguguucgcccaagugaagcaaaucuacaagaccccuccuaucaaggacuucggcggcuucaauuucagccagauucugcccgauccuagcaagcccagcaagcggagcuucaucgaggaccugcuguucaacaaagugacacuggccgacgccggcuucaucaagcaguauggcgauugucugggcgacauugccgccagggaucugauuugcgcccagaaguuuaacggacugacagugcugccuccucugcugaccgaugagaugaucgcccaguacacaucugcccugcuggccggcacaaucacaagcggcuggacauuuggagcuggcgccgcucugcagauccccuuugcuaugcagauggccuaccgguucaacggcaucggagugacccagaaugugcuguacgagaaccagaagcugaucgccaaccaguucaacagcgccaucggcaagauccaggacagccugagcagcacagcaagcgcccugggaaagcugcaggacguggucaaccagaaugcccaggcacugaacacccuggucaagcagcuguccuccaacuucggcgccaucagcucugugcugaacgauauccugagcagacuggacaaggucgaggccgaggugcagaucgacagacugaucacaggcagacugcagagccuccagacauacgugacccagcagcugaucagagccgccgagauuagagccucugccaaucuggccgccaccaagaugucugagugugugcugggccagagcaagagaguggacuuuugcggcaagggcuaccaccugaugagcuucccucagucugccccucacggcgugguguuucugcacgugacauaugugcccgcucaagagaagaauuucaccaccgcuccagccaucugccacgacggcaaagcccacuuuccuagagaaggcguguucguguccaacggcacccauugguucgugacacagcggaacuucuacgagccccagaucaucaccaccgacaacaccuucgugucuggcaacugcgacguugugaucggcauugugaacaauaccguguacgacccucugcagcccgagcuggacagcuucaaagaggaacuggacaaguacuuuaagaaccacacaagccccgacguggaccugggcgauaucagcggaaucaaugccagcgucgugaacauccagaaagagaucgaccggcugaacgagguggccaagaaucugaacgagagccugaucgaccugcaagaacuggggaaguacgagcaguacaucaaguggcccugguacaucuggcugggcuuuaucgccggacugauugccaucgugauggucacaaucaugcuguguugcaugaccagcugcuguagcugccugaagggcuguuguagcuguggcagcugcugcaaguucgacgaggacgauucugagcccgugcugaagggcgugaaacugcacuacaccugaggacuagucccuguucccagagcccacuuuuuuuucuuuuuuugaaauaaaauagccugucuuucagaucucaaaggcucuuuucagagccaccaaaaaaaaaaaaaaaaaaaaaaaaaaaaaaaaaaaaaaaaaaaaaaaaaaaaaaaaaaaaaaaaaaaaaaaaaaaaaaaaaaaaaaaaaaaaaaaaaaaaa

SEQ ID NO: 23487 - RNA, 4088 nt, Artificial Sequence
  SARS-CoV-2/Wuhan/WIV05/2019__EPI_ISL_402128 spike protein mRNA gc mod (1-1273)(H69del_V70del_D614G)
aggagagucccgcagucggcguccagcggcucugcuuguucgugugugugucguugcaggccuuauucaagcuuaccauguucguguuucuggugcugcugccccugguguccagccagugugugaaccugaccaccagaacacagcugccuccagccuacaccaacagcuucaccagaggcguguacuaccccgacaagguguucagauccagcgugcugcacucuacccaggaccuguuccugccuuucuucagcaacgugaccugguuccacgccaucuccggcaccaauggcaccaagagauucgacaaccccgugcugcccuucaacgacgggguguacuuugccagcaccgagaaguccaacaucaucagaggcuggaucuucggcaccacacuggacagcaagacccagagccugcugaucgugaacaacgccaccaacguggucaucaaagugugcgaguuccaguucugcaacgaccccuuccugggcgucuacuaccacaagaacaacaagagcuggauggaaagcgaguuccggguguacagcagcgccaacaacugcaccuucgaguacgugucccagccuuuccugauggaccuggaaggcaagcagggcaacuucaagaaccugcgcgaguucguguucaagaacaucgacggcuacuucaaaaucuacagcaagcacaccccuaucaaccucgugcgggaucugccucagggcuucucugcucuggaaccccugguggaucugcccaucggcaucaacaucacccgguuucagacacugcuggcccugcacagaagcuaccugacaccuggcgauagcagcagcggauggacagcuggugccgccgcuuacuaugugggcuaccugcagccuagaaccuuccugcugaaguacaacgagaacggcaccaucaccgacgccguggauugugcucuggauccucugagcgagacaaagugcacccugaaguccuucaccguggaaaagggcaucuaccagaccagcaacuuccgggugcagcccaccgaauccaucgugcgguuccccaauaucaccaaucugugccccuucggcgagguguucaaugccaccagauucgccucuguguacgccuggaaccggaagcggaucagcaauugcguggccgacuacuccgugcuguacaacuccgccagcuucagcaccuucaagugcuacggcguguccccuaccaagcugaacgaccugugcuucacaaacguguacgccgacagcuucgugauccggggagaugaagugcggcagauugccccuggacagacaggcaagaucgccgacuacaacuacaagcugcccgacgacuucaccggcugugugauugccuggaacagcaacaaccuggacuccaaagucggcggcaacuacaauuaccuguaccggcuguuccggaaguccaaucugaagcccuucgagcgggacaucagcaccgaaaucuaucaggccggcagcaccccuugcaacggcguggaaggcuucaacugcuacuucccacugcaguccuacggcuuucagcccacaaauggcgugggcuaucagcccuacagagugguggugcugagcuucgaacugcugcaugcuccugccacagugugcggcccuaagaaaagcaccaaucucgugaagaacaaaugcgugaacuucaacuucaacggccugaccggcaccggcgugcugacagagagcaacaagaaguuccugccauuccagcaguuuggccgggauaucgccgauaccacagacgccguuagagauccccagacacuggaaauccuggacaucaccccaugcagcuucggcggagugucugugaucaccccuggcaccaacaccagcaaucagguggcagugcuguaccagggcgugaacuguaccgaagugcccguggccauucacgccgaucagcugacaccuacauggcggguguacuccaccggcagcaauguguuucagaccagagccggcugucugaucggagccgagcacgugaacaauagcuacgagugcgacauccccaucggcgcuggcaucugugccagcuaccagacacagacaaacagccccagacgggcuagaagcguggccagccagagcaucauugccuacacaaugucucugggcgccgagaacagcguggccuacuccaacaacucuaucgcuauccccaccaacuucaccaucagcgugaccaccgagauccugccuguguccaugaccaagaccagcguggacugcaccauguacaucugcggcgauuccaccgagugcuccaaccugcugcugcaguacggcagcuucugcacccagcugaauagagcccugacagggaucgccguggaacaggacaagaacacccaagagguguucgcccaagugaagcaaaucuacaagaccccuccuaucaaggacuucggcggcuucaauuucagccagauucugcccgauccuagcaagcccagcaagcggagcuucaucgaggaccugcuguucaacaaagugacacuggccgacgccggcuucaucaagcaguauggcgauugucugggcgacauugccgccagggaucugauuugcgcccagaaguuuaacggacugacagugcugccuccucugcugaccgaugagaugaucgcccaguacacaucugcccugcuggccggcacaaucacaagcggcuggacauuuggagcuggcgccgcucugcagauccccuuugcuaugcagauggccuaccgguucaacggcaucggagugacccagaaugugcuguacgagaaccagaagcugaucgccaaccaguucaacagcgccaucggcaagauccaggacagccugagcagcacagcaagcgcccugggaaagcugcaggacguggucaaccagaaugcccaggcacugaacacccuggucaagcagcuguccuccaacuucggcgccaucagcucugugcugaacgauauccugagcagacuggacaaggucgaggccgaggugcagaucgacagacugaucacaggcagacugcagagccuccagacauacgugacccagcagcugaucagagccgccgagauuagagccucugccaaucuggccgccaccaagaugucugagugugugcugggccagagcaagagaguggacuuuugcggcaagggcuaccaccugaugagcuucccucagucugccccucacggcgugguguuucugcacgugacauaugugcccgcucaagagaagaauuucaccaccgcuccagccaucugccacgacggcaaagcccacuuuccuagagaaggcguguucguguccaacggcacccauugguucgugacacagcggaacuucuacgagccccagaucaucaccaccgacaacaccuucgugucuggcaacugcgacguugugaucggcauugugaacaauaccguguacgacccucugcagcccgagcuggacagcuucaaagaggaacuggacaaguacuuuaagaaccacacaagccccgacguggaccugggcgauaucagcggaaucaaugccagcgucgugaacauccagaaagagaucgaccggcugaacgagguggccaagaaucugaacgagagccugaucgaccugcaagaacuggggaaguacgagcaguacaucaaguggcccugguacaucuggcugggcuuuaucgccggacugauugccaucgugauggucacaaucaugcuguguugcaugaccagcugcuguagcugccugaagggcuguuguagcuguggcagcugcugcaaguucgacgaggacgauucugagcccgugcugaagggcgugaaacugcacuacaccugaggacuagucccuguucccagagcccacuuuuuuuucuuuuuuugaaauaaaauagccugucuuucagaucucaaaggcucuuuucagagccaccaaaaaaaaaaaaaaaaaaaaaaaaaaaaaaaaaaaaaaaaaaaaaaaaaaaaaaaaaaaaaaaaaaaaaaaaaaaaaaaaaaaaaaaaaaaaaaaaaaaaa

SEQ ID NO: 23488 - RNA, 4094 nt, Artificial Sequence
  SARS-CoV-2/Wuhan/WIV05/2019__EPI_ISL_402128 spike protein mRNA gc mod (1-1273)(Y453F_D614G)
aggagagucccgcagucggcguccagcggcucugcuuguucgugugugugucguugcaggccuuauucaagcuuaccauguucguguuucuggugcugcugccccugguguccagccagugugugaaccugaccaccagaacacagcugccuccagccuacaccaacagcuucaccagaggcguguacuaccccgacaagguguucagauccagcgugcugcacucuacccaggaccuguuccugccuuucuucagcaacgugaccugguuccacgccauccacguguccggcaccaauggcaccaagagauucgacaaccccgugcugcccuucaacgacgggguguacuuugccagcaccgagaaguccaacaucaucagaggcuggaucuucggcaccacacuggacagcaagacccagagccugcugaucgugaacaacgccaccaacguggucaucaaagugugcgaguuccaguucugcaacgaccccuuccugggcgucuacuaccacaagaacaacaagagcuggauggaaagcgaguuccggguguacagcagcgccaacaacugcaccuucgaguacgugucccagccuuuccugauggaccuggaaggcaagcagggcaacuucaagaaccugcgcgaguucguguucaagaacaucgacggcuacuucaaaaucuacagcaagcacaccccuaucaaccucgugcgggaucugccucagggcuucucugcucuggaaccccugguggaucugcccaucggcaucaacaucacccgguuucagacacugcuggcccugcacagaagcuaccugacaccuggcgauagcagcagcggauggacagcuggugccgccgcuuacuaugugggcuaccugcagccuagaaccuuccugcugaaguacaacgagaacggcaccaucaccgacgccguggauugugcucuggauccucugagcgagacaaagugcacccugaaguccuucaccguggaaaagggcaucuaccagaccagcaacuuccgggugcagcccaccgaauccaucgugcgguuccccaauaucaccaaucugugccccuucggcgagguguucaaugccaccagauucgccucuguguacgccuggaaccggaagcggaucagcaauugcguggccgacuacuccgugcuguacaacuccgccagcuucagcaccuucaagugcuacggcguguccccuaccaagcugaacgaccugugcuucacaaacguguacgccgacagcuucgugauccggggagaugaagugcggcagauugccccuggacagacaggcaagaucgccgacuacaacuacaagcugcccgacgacuucaccggcugugugauugccuggaacagcaacaaccuggacuccaaagucggcggcaacuacaauuaccuguuccggcuguuccggaaguccaaucugaagcccuucgagcgggacaucagcaccgaaaucuaucaggccggcagcaccccuugcaacggcguggaaggcuucaacugcuacuucccacugcaguccuacggcuuucagcccacaaauggcgugggcuaucagcccuacagagugguggugcugagcuucgaacugcugcaugcuccugccacagugugcggcccuaagaaaagcaccaaucucgugaagaacaaaugcgugaacuucaacuucaacggccugaccggcaccggcgugcugacagagagcaacaagaaguuccugccauuccagcaguuuggccgggauaucgccgauaccacagacgccguuagagauccccagacacuggaaauccuggacaucaccccaugcagcuucggcggagugucugugaucaccccuggcaccaacaccagcaaucagguggcagugcuguaccagggcgugaacuguaccgaagugcccguggccauucacgccgaucagcugacaccuacauggcggguguacuccaccggcagcaauguguuucagaccagagccggcugucugaucggagccgagcacgugaacaauagcuacgagugcgacauccccaucggcgcuggcaucugugccagcuaccagacacagacaaacagccccagacgggcuagaagcguggccagccagagcaucauugccuacacaaugucucugggcgccgagaacagcguggccuacuccaacaacucuaucgcuauccccaccaacuucaccaucagcgugaccaccgagauccugccuguguccaugaccaagaccagcguggacugcaccauguacaucugcggcgauuccaccgagugcuccaaccugcugcugcaguacggcagcuucugcacccagcugaauagagcccugacagggaucgccguggaacaggacaagaacacccaagagguguucgcccaagugaagcaaaucuacaagaccccuccuaucaaggacuucggcggcuucaauuucagccagauucugcccgauccuagcaagcccagcaagcggagcuucaucgaggaccugcuguucaacaaagugacacuggccgacgccggcuucaucaagcaguauggcgauugucugggcgacauugccgccagggaucugauuugcgcccagaaguuuaacggacugacagugcugccuccucugcugaccgaugagaugaucgcccaguacacaucugcccugcuggccggcacaaucacaagcggcuggacauuuggagcuggcgccgcucugcagauccccuuugcuaugcagauggccuaccgguucaacggcaucggagugacccagaaugugcuguacgagaaccagaagcugaucgccaaccaguucaacagcgccaucggcaagauccaggacagccugagcagcacagcaagcgcccugggaaagcugcaggacguggucaaccagaaugcccaggcacugaacacccuggucaagcagcuguccuccaacuucggcgccaucagcucugugcugaacgauauccugagcagacuggacaaggucgaggccgaggugcagaucgacagacugaucacaggcagacugcagagccuccagacauacgugacccagcagcugaucagagccgccgagauuagagccucugccaaucuggccgccaccaagaugucugagugugugcugggccagagcaagagaguggacuuuugcggcaagggcuaccaccugaugagcuucccucagucugccccucacggcgugguguuucugcacgugacauaugugcccgcucaagagaagaauuucaccaccgcuccagccaucugccacgacggcaaagcccacuuuccuagagaaggcguguucguguccaacggcacccauugguucgugacacagcggaacuucuacgagccccagaucaucaccaccgacaacaccuucgugucuggcaacugcgacguugugaucggcauugugaacaauaccguguacgacccucugcagcccgagcuggacagcuucaaagaggaacuggacaaguacuuuaagaaccacacaagccccgacguggaccugggcgauaucagcggaaucaaugccagcgucgugaacauccagaaagagaucgaccggcugaacgagguggccaagaaucugaacgagagccugaucgaccugcaagaacuggggaaguacgagcaguacaucaaguggcccugguacaucuggcugggcuuuaucgccggacugauugccaucgugauggucacaaucaugcuguguugcaugaccagcugcuguagcugccugaagggcuguuguagcuguggcagcugcugcaaguucgacgaggacgauucugagcccgugcugaagggcgugaaacugcacuacaccugaggacuagucccuguucccagagcccacuuuuuuuucuuuuuuugaaauaaaauagccugucuuucagaucucaaaggcucuuuucagagccaccaaaaaaaaaaaaaaaaaaaaaaaaaaaaaaaaaaaaaaaaaaaaaaaaaaaaaaaaaaaaaaaaaaaaaaaaaaaaaaaaaaaaaaaaaaaaaaaaaaaaa

SEQ ID NO: 23489 - RNA, 4094 nt, Artificial Sequence
  SARS-CoV-2/Wuhan/WIV05/2019__EPI_ISL_402128 spike protein mRNA gc mod (1-1273)(D614G_I692V)
aggagagucccgcagucggcguccagcggcucugcuuguucgugugugugucguugcaggccuuauucaagcuuaccauguucguguuucuggugcugcugccccugguguccagccagugugugaaccugaccaccagaacacagcugccuccagccuacaccaacagcuucaccagaggcguguacuaccccgacaagguguucagauccagcgugcugcacucuacccaggaccuguuccugccuuucuucagcaacgugaccugguuccacgccauccacguguccggcaccaauggcaccaagagauucgacaaccccgugcugcccuucaacgacgggguguacuuugccagcaccgagaaguccaacaucaucagaggcuggaucuucggcaccacacuggacagcaagacccagagccugcugaucgugaacaacgccaccaacguggucaucaaagugugcgaguuccaguucugcaacgaccccuuccugggcgucuacuaccacaagaacaacaagagcuggauggaaagcgaguuccggguguacagcagcgccaacaacugcaccuucgaguacgugucccagccuuuccugauggaccuggaaggcaagcagggcaacuucaagaaccugcgcgaguucguguucaagaacaucgacggcuacuucaaaaucuacagcaagcacaccccuaucaaccucgugcgggaucugccucagggcuucucugcucuggaaccccugguggaucugcccaucggcaucaacaucacccgguuucagacacugcuggcccugcacagaagcuaccugacaccuggcgauagcagcagcggauggacagcuggugccgccgcuuacuaugugggcuaccugcagccuagaaccuuccugcugaaguacaacgagaacggcaccaucaccgacgccguggauugugcucuggauccucugagcgagacaaagugcacccugaaguccuucaccguggaaaagggcaucuaccagaccagcaacuuccgggugcagcccaccgaauccaucgugcgguuccccaauaucaccaaucugugccccuucggcgagguguucaaugccaccagauucgccucuguguacgccuggaaccggaagcggaucagcaauugcguggccgacuacuccgugcuguacaacuccgccagcuucagcaccuucaagugcuacggcguguccccuaccaagcugaacgaccugugcuucacaaacguguacgccgacagcuucgugauccggggagaugaagugcggcagauugccccuggacagacaggcaagaucgccgacuacaacuacaagcugcccgacgacuucaccggcugugugauugccuggaacagcaacaaccuggacuccaaagucggcggcaacuacaauuaccuguaccggcuguuccggaaguccaaucugaagcccuucgagcgggacaucagcaccgaaaucuaucaggccggcagcaccccuugcaacggcguggaaggcuucaacugcuacuucccacugcaguccuacggcuuucagcccacaaauggcgugggcuaucagcccuacagagugguggugcugagcuucgaacugcugcaugcuccugccacagugugcggcccuaagaaaagcaccaaucucgugaagaacaaaugcgugaacuucaacuucaacggccugaccggcaccggcgugcugacagagagcaacaagaaguuccugccauuccagcaguuuggccgggauaucgccgauaccacagacgccguuagagauccccagacacuggaaauccuggacaucaccccaugcagcuucggcggagugucugugaucaccccuggcaccaacaccagcaaucagguggcagugcuguaccagggcgugaacuguaccgaagugcccguggccauucacgccgaucagcugacaccuacauggcggguguacuccaccggcagcaauguguuucagaccagagccggcugucugaucggagccgagcacgugaacaauagcuacgagugcgacauccccaucggcgcuggcaucugugccagcuaccagacacagacaaacagccccagacgggcuagaagcguggccagccagagcgugauugccuacacaaugucucugggcgccgagaacagcguggccuacuccaacaacucuaucgcuauccccaccaacuucaccaucagcgugaccaccgagauccugccuguguccaugaccaagaccagcguggacugcaccauguacaucugcggcgauuccaccgagugcuccaaccugcugcugcaguacggcagcuucugcacccagcugaauagagcccugacagggaucgccguggaacaggacaagaacacccaagagguguucgcccaagugaagcaaaucuacaagaccccuccuaucaaggacuucggcggcuucaauuucagccagauucugcccgauccuagcaagcccagcaagcggagcuucaucgaggaccugcuguucaacaaagugacacuggccgacgccggcuucaucaagcaguauggcgauugucugggcgacauugccgccagggaucugauuugcgcccagaaguuuaacggacugacagugcugccuccucugcugaccgaugagaugaucgcccaguacacaucugcccugcuggccggcacaaucacaagcggcuggacauuuggagcuggcgccgcucugcagauccccuuugcuaugcagauggccuaccgguucaacggcaucggagugacccagaaugugcuguacgagaaccagaagcugaucgccaaccaguucaacagcgccaucggcaagauccaggacagccugagcagcacagcaagcgcccugggaaagcugcaggacguggucaaccagaaugcccaggcacugaacacccuggucaagcagcuguccuccaacuucggcgccaucagcucugugcugaacgauauccugagcagacuggacaaggucgaggccgaggugcagaucgacagacugaucacaggcagacugcagagccuccagacauacgugacccagcagcugaucagagccgccgagauuagagccucugccaaucuggccgccaccaagaugucugagugugugcugggccagagcaagagaguggacuuuugcggcaagggcuaccaccugaugagcuucccucagucugccccucacggcgugguguuucugcacgugacauaugugcccgcucaagagaagaauuucaccaccgcuccagccaucugccacgacggcaaagcccacuuuccuagagaaggcguguucguguccaacggcacccauugguucgugacacagcggaacuucuacgagccccagaucaucaccaccgacaacaccuucgugucuggcaacugcgacguugugaucggcauugugaacaauaccguguacgacccucugcagcccgagcuggacagcuucaaagaggaacuggacaaguacuuuaagaaccacacaagccccgacguggaccugggcgauaucagcggaaucaaugccagcgucgugaacauccagaaagagaucgaccggcugaacgagguggccaagaaucugaacgagagccugaucgaccugcaagaacuggggaaguacgagcaguacaucaaguggcccugguacaucuggcugggcuuuaucgccggacugauugccaucgugauggucacaaucaugcuguguugcaugaccagcugcuguagcugccugaagggcuguuguagcuguggcagcugcugcaaguucgacgaggacgauucugagcccgugcugaagggcgugaaacugcacuacaccugaggacuagucccuguucccagagcccacuuuuuuuucuuuuuuugaaauaaaauagccugucuuucagaucucaaaggcucuuuucagagccaccaaaaaaaaaaaaaaaaaaaaaaaaaaaaaaaaaaaaaaaaaaaaaaaaaaaaaaaaaaaaaaaaaaaaaaaaaaaaaaaaaaaaaaaaaaaaaaaaaaaaa

SEQ ID NO: 23490 - RNA, 4094 nt, Artificial Sequence
  SARS-CoV-2/Wuhan/WIV05/2019__EPI_ISL_402128 spike protein mRNA gc mod (1-1273)(D614G_M1229I)
aggagagucccgcagucggcguccagcggcucugcuuguucgugugugugucguugcaggccuuauucaagcuuaccauguucguguuucuggugcugcugccccugguguccagccagugugugaaccugaccaccagaacacagcugccuccagccuacaccaacagcuucaccagaggcguguacuaccccgacaagguguucagauccagcgugcugcacucuacccaggaccuguuccugccuuucuucagcaacgugaccugguuccacgccauccacguguccggcaccaauggcaccaagagauucgacaaccccgugcugcccuucaacgacgggguguacuuugccagcaccgagaaguccaacaucaucagaggcuggaucuucggcaccacacuggacagcaagacccagagccugcugaucgugaacaacgccaccaacguggucaucaaagugugcgaguuccaguucugcaacgaccccuuccugggcgucuacuaccacaagaacaacaagagcuggauggaaagcgaguuccggguguacagcagcgccaacaacugcaccuucgaguacgugucccagccuuuccugauggaccuggaaggcaagcagggcaacuucaagaaccugcgcgaguucguguucaagaacaucgacggcuacuucaaaaucuacagcaagcacaccccuaucaaccucgugcgggaucugccucagggcuucucugcucuggaaccccugguggaucugcccaucggcaucaacaucacccgguuucagacacugcuggcccugcacagaagcuaccugacaccuggcgauagcagcagcggauggacagcuggugccgccgcuuacuaugugggcuaccugcagccuagaaccuuccugcugaaguacaacgagaacggcaccaucaccgacgccguggauugugcucuggauccucugagcgagacaaagugcacccugaaguccuucaccguggaaaagggcaucuaccagaccagcaacuuccgggugcagcccaccgaauccaucgugcgguuccccaauaucaccaaucugugccccuucggcgagguguucaaugccaccagauucgccucuguguacgccuggaaccggaagcggaucagcaauugcguggccgacuacuccgugcuguacaacuccgccagcuucagcaccuucaagugcuacggcguguccccuaccaagcugaacgaccugugcuucacaaacguguacgccgacagcuucgugauccggggagaugaagugcggcagauugccccuggacagacaggcaagaucgccgacuacaacuacaagcugcccgacgacuucaccggcugugugauugccuggaacagcaacaaccuggacuccaaagucggcggcaacuacaauuaccuguaccggcuguuccggaaguccaaucugaagcccuucgagcgggacaucagcaccgaaaucuaucaggccggcagcaccccuugcaacggcguggaaggcuucaacugcuacuucccacugcaguccuacggcuuucagcccacaaauggcgugggcuaucagcccuacagagugguggugcugagcuucgaacugcugcaugcuccugccacagugugcggcccuaagaaaagcaccaaucucgugaagaacaaaugcgugaacuucaacuucaacggccugaccggcaccggcgugcugacagagagcaacaagaaguuccugccauuccagcaguuuggccgggauaucgccgauaccacagacgccguuagagauccccagacacuggaaauccuggacaucaccccaugcagcuucggcggagugucugugaucaccccuggcaccaacaccagcaaucagguggcagugcuguaccagggcgugaacuguaccgaagugcccguggccauucacgccgaucagcugacaccuacauggcggguguacuccaccggcagcaauguguuucagaccagagccggcugucugaucggagccgagcacgugaacaauagcuacgagugcgacauccccaucggcgcuggcaucugugccagcuaccagacacagacaaacagccccagacgggcuagaagcguggccagccagagcaucauugccuacacaaugucucugggcgccgagaacagcguggccuacuccaacaacucuaucgcuauccccaccaacuucaccaucagcgugaccaccgagauccugccuguguccaugaccaagaccagcguggacugcaccauguacaucugcggcgauuccaccgagugcuccaaccugcugcugcaguacggcagcuucugcacccagcugaauagagcccugacagggaucgccguggaacaggacaagaacacccaagagguguucgcccaagugaagcaaaucuacaagaccccuccuaucaaggacuucggcggcuucaauuucagccagauucugcccgauccuagcaagcccagcaagcggagcuucaucgaggaccugcuguucaacaaagugacacuggccgacgccggcuucaucaagcaguauggcgauugucugggcgacauugccgccagggaucugauuugcgcccagaaguuuaacggacugacagugcugccuccucugcugaccgaugagaugaucgcccaguacacaucugcccugcuggccggcacaaucacaagcggcuggacauuuggagcuggcgccgcucugcagauccccuuugcuaugcagauggccuaccgguucaacggcaucggagugacccagaaugugcuguacgagaaccagaagcugaucgccaaccaguucaacagcgccaucggcaagauccaggacagccugagcagcacagcaagcgcccugggaaagcugcaggacguggucaaccagaaugcccaggcacugaacacccuggucaagcagcuguccuccaacuucggcgccaucagcucugugcugaacgauauccugagcagacuggacaaggucgaggccgaggugcagaucgacagacugaucacaggcagacugcagagccuccagacauacgugacccagcagcugaucagagccgccgagauuagagccucugccaaucuggccgccaccaagaugucugagugugugcugggccagagcaagagaguggacuuuugcggcaagggcuaccaccugaugagcuucccucagucugccccucacggcgugguguuucugcacgugacauaugugcccgcucaagagaagaauuucaccaccgcuccagccaucugccacgacggcaaagcccacuuuccuagagaaggcguguucguguccaacggcacccauugguucgugacacagcggaacuucuacgagccccagaucaucaccaccgacaacaccuucgugucuggcaacugcgacguugugaucggcauugugaacaauaccguguacgacccucugcagcccgagcuggacagcuucaaagaggaacuggacaaguacuuuaagaaccacacaagccccgacguggaccugggcgauaucagcggaaucaaugccagcgucgugaacauccagaaagagaucgaccggcugaacgagguggccaagaaucugaacgagagccugaucgaccugcaagaacuggggaaguacgagcaguacaucaaguggcccugguacaucuggcugggcuuuaucgccggacugauugccaucgugaucgucacaaucaugcuguguugcaugaccagcugcuguagcugccugaagggcuguuguagcuguggcagcugcugcaaguucgacgaggacgauucugagcccgugcugaagggcgugaaacugcacuacaccugaggacuagucccuguucccagagcccacuuuuuuuucuuuuuuugaaauaaaauagccugucuuucagaucucaaaggcucuuuucagagccaccaaaaaaaaaaaaaaaaaaaaaaaaaaaaaaaaaaaaaaaaaaaaaaaaaaaaaaaaaaaaaaaaaaaaaaaaaaaaaaaaaaaaaaaaaaaaaaaaaaaaa

SEQ ID NO: 23491 - RNA, 4088 nt, Artificial Sequence
  SARS-CoV-2/Wuhan/WIV05/2019__EPI_ISL_402128 spike protein mRNA gc mod (1-1273)(H69del_V70del_A222V_Y453F_S477N_D614G_I692V)
aggagagucccgcagucggcguccagcggcucugcuuguucgugugugugucguugcaggccuuauucaagcuuaccauguucguguuucuggugcugcugccccugguguccagccagugugugaaccugaccaccagaacacagcugccuccagccuacaccaacagcuucaccagaggcguguacuaccccgacaagguguucagauccagcgugcugcacucuacccaggaccuguuccugccuuucuucagcaacgugaccugguuccacgccaucuccggcaccaauggcaccaagagauucgacaaccccgugcugcccuucaacgacgggguguacuuugccagcaccgagaaguccaacaucaucagaggcuggaucuucggcaccacacuggacagcaagacccagagccugcugaucgugaacaacgccaccaacguggucaucaaagugugcgaguuccaguucugcaacgaccccuuccugggcgucuacuaccacaagaacaacaagagcuggauggaaagcgaguuccggguguacagcagcgccaacaacugcaccuucgaguacgugucccagccuuuccugauggaccuggaaggcaagcagggcaacuucaagaaccugcgcgaguucguguucaagaacaucgacggcuacuucaaaaucuacagcaagcacaccccuaucaaccucgugcgggaucugccucagggcuucucugugcuggaaccccugguggaucugcccaucggcaucaacaucacccgguuucagacacugcuggcccugcacagaagcuaccugacaccuggcgauagcagcagcggauggacagcuggugccgccgcuuacuaugugggcuaccugcagccuagaaccuuccugcugaaguacaacgagaacggcaccaucaccgacgccguggauugugcucuggauccucugagcgagacaaagugcacccugaaguccuucaccguggaaaagggcaucuaccagaccagcaacuuccgggugcagcccaccgaauccaucgugcgguuccccaauaucaccaaucugugccccuucggcgagguguucaaugccaccagauucgccucuguguacgccuggaaccggaagcggaucagcaauugcguggccgacuacuccgugcuguacaacuccgccagcuucagcaccuucaagugcuacggcguguccccuaccaagcugaacgaccugugcuucacaaacguguacgccgacagcuucgugauccggggagaugaagugcggcagauugccccuggacagacaggcaagaucgccgacuacaacuacaagcugcccgacgacuucaccggcugugugauugccuggaacagcaacaaccuggacuccaaagucggcggcaacuacaauuaccuguuccggcuguuccggaaguccaaucugaagcccuucgagcgggacaucagcaccgaaaucuaucaggccggcaacaccccuugcaacggcguggaaggcuucaacugcuacuucccacugcaguccuacggcuuucagcccacaaauggcgugggcuaucagcccuacagagugguggugcugagcuucgaacugcugcaugcuccugccacagugugcggcccuaagaaaagcaccaaucucgugaagaacaaaugcgugaacuucaacuucaacggccugaccggcaccggcgugcugacagagagcaacaagaaguuccugccauuccagcaguuuggccgggauaucgccgauaccacagacgccguuagagauccccagacacuggaaauccuggacaucaccccaugcagcuucggcggagugucugugaucaccccuggcaccaacaccagcaaucagguggcagugcuguaccagggcgugaacuguaccgaagugcccguggccauucacgccgaucagcugacaccuacauggcggguguacuccaccggcagcaauguguuucagaccagagccggcugucugaucggagccgagcacgugaacaauagcuacgagugcgacauccccaucggcgcuggcaucugugccagcuaccagacacagacaaacagccccagacgggcuagaagcguggccagccagagcgugauugccuacacaaugucucugggcgccgagaacagcguggccuacuccaacaacucuaucgcuauccccaccaacuucaccaucagcgugaccaccgagauccugccuguguccaugaccaagaccagcguggacugcaccauguacaucugcggcgauuccaccgagugcuccaaccugcugcugcaguacggcagcuucugcacccagcugaauagagcccugacagggaucgccguggaacaggacaagaacacccaagagguguucgcccaagugaagcaaaucuacaagaccccuccuaucaaggacuucggcggcuucaauuucagccagauucugcccgauccuagcaagcccagcaagcggagcuucaucgaggaccugcuguucaacaaagugacacuggccgacgccggcuucaucaagcaguauggcgauugucugggcgacauugccgccagggaucugauuugcgcccagaaguuuaacggacugacagugcugccuccucugcugaccgaugagaugaucgcccaguacacaucugcccugcuggccggcacaaucacaagcggcuggacauuuggagcuggcgccgcucugcagauccccuuugcuaugcagauggccuaccgguucaacggcaucggagugacccagaaugugcuguacgagaaccagaagcugaucgccaaccaguucaacagcgccaucggcaagauccaggacagccugagcagcacagcaagcgcccugggaaagcugcaggacguggucaaccagaaugcccaggcacugaacacccuggucaagcagcuguccuccaacuucggcgccaucagcucugugcugaacgauauccugagcagacuggacaaggucgaggccgaggugcagaucgacagacugaucacaggcagacugcagagccuccagacauacgugacccagcagcugaucagagccgccgagauuagagccucugccaaucuggccgccaccaagaugucugagugugugcugggccagagcaagagaguggacuuuugcggcaagggcuaccaccugaugagcuucccucagucugccccucacggcgugguguuucugcacgugacauaugugcccgcucaagagaagaauuucaccaccgcuccagccaucugccacgacggcaaagcccacuuuccuagagaaggcguguucguguccaacggcacccauugguucgugacacagcggaacuucuacgagccccagaucaucaccaccgacaacaccuucgugucuggcaacugcgacguugugaucggcauugugaacaauaccguguacgacccucugcagcccgagcuggacagcuucaaagaggaacuggacaaguacuuuaagaaccacacaagccccgacguggaccugggcgauaucagcggaaucaaugccagcgucgugaacauccagaaagagaucgaccggcugaacgagguggccaagaaucugaacgagagccugaucgaccugcaagaacuggggaaguacgagcaguacaucaaguggcccugguacaucuggcugggcuuuaucgccggacugauugccaucgugauggucacaaucaugcuguguugcaugaccagcugcuguagcugccugaagggcuguuguagcuguggcagcugcugcaaguucgacgaggacgauucugagcccgugcugaagggcgugaaacugcacuacaccugaggacuagucccuguucccagagcccacuuuuuuuucuuuuuuugaaauaaaauagccugucuuucagaucucaaaggcucuuuucagagccaccaaaaaaaaaaaaaaaaaaaaaaaaaaaaaaaaaaaaaaaaaaaaaaaaaaaaaaaaaaaaaaaaaaaaaaaaaaaaaaaaaaaaaaaaaaaaaaaaaaaaa

SEQ ID NO: 23492 - RNA, 4088 nt, Artificial Sequence
  SARS-CoV-2/Wuhan/WIV05/2019__EPI_ISL_402128 spike protein mRNA gc mod (1-1273)(H69del_V70del_Y453F_D614G_I692V_M1229I)
aggagagucccgcagucggcguccagcggcucugcuuguucgugugugugucguugcaggccuuauucaagcuuaccauguucguguuucuggugcugcugccccugguguccagccagugugugaaccugaccaccagaacacagcugccuccagccuacaccaacagcuucaccagaggcguguacuaccccgacaagguguucagauccagcgugcugcacucuacccaggaccuguuccugccuuucuucagcaacgugaccugguuccacgccaucuccggcaccaauggcaccaagagauucgacaaccccgugcugcccuucaacgacgggguguacuuugccagcaccgagaaguccaacaucaucagaggcuggaucuucggcaccacacuggacagcaagacccagagccugcugaucgugaacaacgccaccaacguggucaucaaagugugcgaguuccaguucugcaacgaccccuuccugggcgucuacuaccacaagaacaacaagagcuggauggaaagcgaguuccggguguacagcagcgccaacaacugcaccuucgaguacgugucccagccuuuccugauggaccuggaaggcaagcagggcaacuucaagaaccugcgcgaguucguguucaagaacaucgacggcuacuucaaaaucuacagcaagcacaccccuaucaaccucgugcgggaucugccucagggcuucucugcucuggaaccccugguggaucugcccaucggcaucaacaucacccgguuucagacacugcuggcccugcacagaagcuaccugacaccuggcgauagcagcagcggauggacagcuggugccgccgcuuacuaugugggcuaccugcagccuagaaccuuccugcugaaguacaacgagaacggcaccaucaccgacgccguggauugugcucuggauccucugagcgagacaaagugcacccugaaguccuucaccguggaaaagggcaucuaccagaccagcaacuuccgggugcagcccaccgaauccaucgugcgguuccccaauaucaccaaucugugccccuucggcgagguguucaaugccaccagauucgccucuguguacgccuggaaccggaagcggaucagcaauugcguggccgacuacuccgugcuguacaacuccgccagcuucagcaccuucaagugcuacggcguguccccuaccaagcugaacgaccugugcuucacaaacguguacgccgacagcuucgugauccggggagaugaagugcggcagauugccccuggacagacaggcaagaucgccgacuacaacuacaagcugcccgacgacuucaccggcugugugauugccuggaacagcaacaaccuggacuccaaagucggcggcaacuacaauuaccuguuccggcuguuccggaaguccaaucugaagcccuucgagcgggacaucagcaccgaaaucuaucaggccggcagcaccccuugcaacggcguggaaggcuucaacugcuacuucccacugcaguccuacggcuuucagcccacaaauggcgugggcuaucagcccuacagagugguggugcugagcuucgaacugcugcaugcuccugccacagugugcggcccuaagaaaagcaccaaucucgugaagaacaaaugcgugaacuucaacuucaacggccugaccggcaccggcgugcugacagagagcaacaagaaguuccugccauuccagcaguuuggccgggauaucgccgauaccacagacgccguuagagauccccagacacuggaaauccuggacaucaccccaugcagcuucggcggagugucugugaucaccccuggcaccaacaccagcaaucagguggcagugcuguaccagggcgugaacuguaccgaagugcccguggccauucacgccgaucagcugacaccuacauggcggguguacuccaccggcagcaauguguuucagaccagagccggcugucugaucggagccgagcacgugaacaauagcuacgagugcgacauccccaucggcgcuggcaucugugccagcuaccagacacagacaaacagccccagacgggcuagaagcguggccagccagagcgugauugccuacacaaugucucugggcgccgagaacagcguggccuacuccaacaacucuaucgcuauccccaccaacuucaccaucagcgugaccaccgagauccugccuguguccaugaccaagaccagcguggacugcaccauguacaucugcggcgauuccaccgagugcuccaaccugcugcugcaguacggcagcuucugcacccagcugaauagagcccugacagggaucgccguggaacaggacaagaacacccaagagguguucgcccaagugaagcaaaucuacaagaccccuccuaucaaggacuucggcggcuucaauuucagccagauucugcccgauccuagcaagcccagcaagcggagcuucaucgaggaccugcuguucaacaaagugacacuggccgacgccggcuucaucaagcaguauggcgauugucugggcgacauugccgccagggaucugauuugcgcccagaaguuuaacggacugacagugcugccuccucugcugaccgaugagaugaucgcccaguacacaucugcccugcuggccggcacaaucacaagcggcuggacauuuggagcuggcgccgcucugcagauccccuuugcuaugcagauggccuaccgguucaacggcaucggagugacccagaaugugcuguacgagaaccagaagcugaucgccaaccaguucaacagcgccaucggcaagauccaggacagccugagcagcacagcaagcgcccugggaaagcugcaggacguggucaaccagaaugcccaggcacugaacacccuggucaagcagcuguccuccaacuucggcgccaucagcucugugcugaacgauauccugagcagacuggacaaggucgaggccgaggugcagaucgacagacugaucacaggcagacugcagagccuccagacauacgugacccagcagcugaucagagccgccgagauuagagccucugccaaucuggccgccaccaagaugucugagugugugcugggccagagcaagagaguggacuuuugcggcaagggcuaccaccugaugagcuucccucagucugccccucacggcgugguguuucugcacgugacauaugugcccgcucaagagaagaauuucaccaccgcuccagccaucugccacgacggcaaagcccacuuuccuagagaaggcguguucguguccaacggcacccauugguucgugacacagcggaacuucuacgagccccagaucaucaccaccgacaacaccuucgugucuggcaacugcgacguugugaucggcauugugaacaauaccguguacgacccucugcagcccgagcuggacagcuucaaagaggaacuggacaaguacuuuaagaaccacacaagccccgacguggaccugggcgauaucagcggaaucaaugccagcgucgugaacauccagaaagagaucgaccggcugaacgagguggccaagaaucugaacgagagccugaucgaccugcaagaacuggggaaguacgagcaguacaucaaguggcccugguacaucuggcugggcuuuaucgccggacugauugccaucgugaucgucacaaucaugcuguguugcaugaccagcugcuguagcugccugaagggcuguuguagcuguggcagcugcugcaaguucgacgaggacgauucugagcccgugcugaagggcgugaaacugcacuacaccugaggacuagucccuguucccagagcccacuuuuuuuucuuuuuuugaaauaaaauagccugucuuucagaucucaaaggcucuuuucagagccaccaaaaaaaaaaaaaaaaaaaaaaaaaaaaaaaaaaaaaaaaaaaaaaaaaaaaaaaaaaaaaaaaaaaaaaaaaaaaaaaaaaaaaaaaaaaaaaaaaaaaa

SEQ ID NO: 23493 - RNA, 4085 nt, Artificial Sequence
  SARS-CoV-2/Wuhan/WIV05/2019__EPI_ISL_402128 spike protein mRNA gc mod (1-1273)(H69del_V70del_Y144del_N501Y_A570D_D614G_P681H_T716I_S982 A_D1118H)
aggagagucccgcagucggcguccagcggcucugcuuguucgugugugugucguugcaggccuuauucaagcuuaccauguucguguuucuggugcugcugccccugguguccagccagugugugaaccugaccaccagaacacagcugccuccagccuacaccaacagcuucaccagaggcguguacuaccccgacaagguguucagauccagcgugcugcacucuacccaggaccuguuccugccuuucuucagcaacgugaccugguuccacgccaucuccggcaccaauggcaccaagagauucgacaaccccgugcugcccuucaacgacgggguguacuuugccagcaccgagaaguccaacaucaucagaggcuggaucuucggcaccacacuggacagcaagacccagagccugcugaucgugaacaacgccaccaacguggucaucaaagugugcgaguuccaguucugcaacgaccccuuccugggcgucuaccacaagaacaacaagagcuggauggaaagcgaguuccggguguacagcagcgccaacaacugcaccuucgaguacgugucccagccuuuccugauggaccuggaaggcaagcagggcaacuucaagaaccugcgcgaguucguguucaagaacaucgacggcuacuucaaaaucuacagcaagcacaccccuaucaaccucgugcgggaucugccucagggcuucucugcucuggaaccccugguggaucugcccaucggcaucaacaucacccgguuucagacacugcuggcccugcacagaagcuaccugacaccuggcgauagcagcagcggauggacagcuggugccgccgcuuacuaugugggcuaccugcagccuagaaccuuccugcugaaguacaacgagaacggcaccaucaccgacgccguggauugugcucuggauccucugagcgagacaaagugcacccugaaguccuucaccguggaaaagggcaucuaccagaccagcaacuuccgggugcagcccaccgaauccaucgugcgguuccccaauaucaccaaucugugccccuucggcgagguguucaaugccaccagauucgccucuguguacgccuggaaccggaagcggaucagcaauugcguggccgacuacuccgugcuguacaacuccgccagcuucagcaccuucaagugcuacggcguguccccuaccaagcugaacgaccugugcuucacaaacguguacgccgacagcuucgugauccggggagaugaagugcggcagauugccccuggacagacaggcaagaucgccgacuacaacuacaagcugcccgacgacuucaccggcugugugauugccuggaacagcaacaaccuggacuccaaagucggcggcaacuacaauuaccuguaccggcuguuccggaaguccaaucugaagcccuucgagcgggacaucagcaccgaaaucuaucaggccggcagcaccccuugcaacggcguggaaggcuucaacugcuacuucccacugcaguccuacggcuuucagcccacauacggcgugggcuaucagcccuacagagugguggugcugagcuucgaacugcugcaugcuccugccacagugugcggcccuaagaaaagcaccaaucucgugaagaacaaaugcgugaacuucaacuucaacggccugaccggcaccggcgugcugacagagagcaacaagaaguuccugccauuccagcaguuuggccgggauaucgacgauaccacagacgccguuagagauccccagacacuggaaauccuggacaucaccccaugcagcuucggcggagugucugugaucaccccuggcaccaacaccagcaaucagguggcagugcuguaccagggcgugaacuguaccgaagugcccguggccauucacgccgaucagcugacaccuacauggcggguguacuccaccggcagcaauguguuucagaccagagccggcugucugaucggagccgagcacgugaacaauagcuacgagugcgacauccccaucggcgcuggcaucugugccagcuaccagacacagacaaacagccacagacgggcuagaagcguggccagccagagcaucauugccuacacaaugucucugggcgccgagaacagcguggccuacuccaacaacucuaucgcuauccccaucaacuucaccaucagcgugaccaccgagauccugccuguguccaugaccaagaccagcguggacugcaccauguacaucugcggcgauuccaccgagugcuccaaccugcugcugcaguacggcagcuucugcacccagcugaauagagcccugacagggaucgccguggaacaggacaagaacacccaagagguguucgcccaagugaagcaaaucuacaagaccccuccuaucaaggacuucggcggcuucaauuucagccagauucugcccgauccuagcaagcccagcaagcggagcuucaucgaggaccugcuguucaacaaagugacacuggccgacgccggcuucaucaagcaguauggcgauugucugggcgacauugccgccagggaucugauuugcgcccagaaguuuaacggacugacagugcugccuccucugcugaccgaugagaugaucgcccaguacacaucugcccugcuggccggcacaaucacaagcggcuggacauuuggagcuggcgccgcucugcagauccccuuugcuaugcagauggccuaccgguucaacggcaucggagugacccagaaugugcuguacgagaaccagaagcugaucgccaaccaguucaacagcgccaucggcaagauccaggacagccugagcagcacagcaagcgcccugggaaagcugcaggacguggucaaccagaaugcccaggcacugaacacccuggucaagcagcuguccuccaacuucggcgccaucagcucugugcugaacgauauccuggccagacuggacaaggucgaggccgaggugcagaucgacagacugaucacaggcagacugcagagccuccagacauacgugacccagcagcugaucagagccgccgagauuagagccucugccaaucuggccgccaccaagaugucugagugugugcugggccagagcaagagaguggacuuuugcggcaagggcuaccaccugaugagcuucccucagucugccccucacggcgugguguuucugcacgugacauaugugcccgcucaagagaagaauuucaccaccgcuccagccaucugccacgacggcaaagcccacuuuccuagagaaggcguguucguguccaacggcacccauugguucgugacacagcggaacuucuacgagccccagaucaucaccacccacaacaccuucgugucuggcaacugcgacguugugaucggcauugugaacaauaccguguacgacccucugcagcccgagcuggacagcuucaaagaggaacuggacaaguacuuuaagaaccacacaagccccgacguggaccugggcgauaucagcggaaucaaugccagcgucgugaacauccagaaagagaucgaccggcugaacgagguggccaagaaucugaacgagagccugaucgaccugcaagaacuggggaaguacgagcaguacaucaaguggcccugguacaucuggcugggcuuuaucgccggacugauugccaucgugauggucacaaucaugcuguguugcaugaccagcugcuguagcugccugaagggcuguuguagcuguggcagcugcugcaaguucgacgaggacgauucugagcccgugcugaagggcgugaaacugcacuacaccugaggacuagucccuguucccagagcccacuuuuuuuucuuuuuuugaaauaaaauagccugucuuucagaucucaaaggcucuuuucagagccaccaaaaaaaaaaaaaaaaaaaaaaaaaaaaaaaaaaaaaaaaaaaaaaaaaaaaaaaaaaaaaaaaaaaaaaaaaaaaaaaaaaaaaaaaaaaaaaaaaaaaa

SEQ ID NO: 23494 - RNA, 4094 nt, Artificial Sequence
  SARS-CoV-2/Wuhan/WIV05/2019__EPI_ISL_402128 spike protein mRNA gc mod (1-1273)(K417N_E484K_N501Y_D614G)
aggagagucccgcagucggcguccagcggcucugcuuguucgugugugugucguugcaggccuuauucaagcuuaccauguucguguuucuggugcugcugccccugguguccagccagugugugaaccugaccaccagaacacagcugccuccagccuacaccaacagcuucaccagaggcguguacuaccccgacaagguguucagauccagcgugcugcacucuacccaggaccuguuccugccuuucuucagcaacgugaccugguuccacgccauccacguguccggcaccaauggcaccaagagauucgacaaccccgugcugcccuucaacgacgggguguacuuugccagcaccgagaaguccaacaucaucagaggcuggaucuucggcaccacacuggacagcaagacccagagccugcugaucgugaacaacgccaccaacguggucaucaaagugugcgaguuccaguucugcaacgaccccuuccugggcgucuacuaccacaagaacaacaagagcuggauggaaagcgaguuccggguguacagcagcgccaacaacugcaccuucgaguacgugucccagccuuuccugauggaccuggaaggcaagcagggcaacuucaagaaccugcgcgaguucguguucaagaacaucgacggcuacuucaaaaucuacagcaagcacaccccuaucaaccucgugcgggaucugccucagggcuucucugcucuggaaccccugguggaucugcccaucggcaucaacaucacccgguuucagacacugcuggcccugcacagaagcuaccugacaccuggcgauagcagcagcggauggacagcuggugccgccgcuuacuaugugggcuaccugcagccuagaaccuuccugcugaaguacaacgagaacggcaccaucaccgacgccguggauugugcucuggauccucugagcgagacaaagugcacccugaaguccuucaccguggaaaagggcaucuaccagaccagcaacuuccgggugcagcccaccgaauccaucgugcgguuccccaauaucaccaaucugugccccuucggcgagguguucaaugccaccagauucgccucuguguacgccuggaaccggaagcggaucagcaauugcguggccgacuacuccgugcuguacaacuccgccagcuucagcaccuucaagugcuacggcguguccccuaccaagcugaacgaccugugcuucacaaacguguacgccgacagcuucgugauccggggagaugaagugcggcagauugccccuggacagacaggcaacaucgccgacuacaacuacaagcugcccgacgacuucaccggcugugugauugccuggaacagcaacaaccuggacuccaaagucggcggcaacuacaauuaccuguaccggcuguuccggaaguccaaucugaagcccuucgagcgggacaucagcaccgaaaucuaucaggccggcagcaccccuugcaacggcgugaagggcuucaacugcuacuucccacugcaguccuacggcuuucagcccacauacggcgugggcuaucagcccuacagagugguggugcugagcuucgaacugcugcaugcuccugccacagugugcggcccuaagaaaagcaccaaucucgugaagaacaaaugcgugaacuucaacuucaacggccugaccggcaccggcgugcugacagagagcaacaagaaguuccugccauuccagcaguuuggccgggauaucgccgauaccacagacgccguuagagauccccagacacuggaaauccuggacaucaccccaugcagcuucggcggagugucugugaucaccccuggcaccaacaccagcaaucagguggcagugcuguaccagggcgugaacuguaccgaagugcccguggccauucacgccgaucagcugacaccuacauggcggguguacuccaccggcagcaauguguuucagaccagagccggcugucugaucggagccgagcacgugaacaauagcuacgagugcgacauccccaucggcgcuggcaucugugccagcuaccagacacagacaaacagccccagacgggcuagaagcguggccagccagagcaucauugccuacacaaugucucugggcgccgagaacagcguggccuacuccaacaacucuaucgcuauccccaccaacuucaccaucagcgugaccaccgagauccugccuguguccaugaccaagaccagcguggacugcaccauguacaucugcggcgauuccaccgagugcuccaaccugcugcugcaguacggcagcuucugcacccagcugaauagagcccugacagggaucgccguggaacaggacaagaacacccaagagguguucgcccaagugaagcaaaucuacaagaccccuccuaucaaggacuucggcggcuucaauuucagccagauucugcccgauccuagcaagcccagcaagcggagcuucaucgaggaccugcuguucaacaaagugacacuggccgacgccggcuucaucaagcaguauggcgauugucugggcgacauugccgccagggaucugauuugcgcccagaaguuuaacggacugacagugcugccuccucugcugaccgaugagaugaucgcccaguacacaucugcccugcuggccggcacaaucacaagcggcuggacauuuggagcuggcgccgcucugcagauccccuuugcuaugcagauggccuaccgguucaacggcaucggagugacccagaaugugcuguacgagaaccagaagcugaucgccaaccaguucaacagcgccaucggcaagauccaggacagccugagcagcacagcaagcgcccugggaaagcugcaggacguggucaaccagaaugcccaggcacugaacacccuggucaagcagcuguccuccaacuucggcgccaucagcucugugcugaacgauauccugagcagacuggacaaggucgaggccgaggugcagaucgacagacugaucacaggcagacugcagagccuccagacauacgugacccagcagcugaucagagccgccgagauuagagccucugccaaucuggccgccaccaagaugucugagugugugcugggccagagcaagagaguggacuuuugcggcaagggcuaccaccugaugagcuucccucagucugccccucacggcgugguguuucugcacgugacauaugugcccgcucaagagaagaauuucaccaccgcuccagccaucugccacgacggcaaagcccacuuuccuagagaaggcguguucguguccaacggcacccauugguucgugacacagcggaacuucuacgagccccagaucaucaccaccgacaacaccuucgugucuggcaacugcgacguugugaucggcauugugaacaauaccguguacgacccucugcagcccgagcuggacagcuucaaagaggaacuggacaaguacuuuaagaaccacacaagccccgacguggaccugggcgauaucagcggaaucaaugccagcgucgugaacauccagaaagagaucgaccggcugaacgagguggccaagaaucugaacgagagccugaucgaccugcaagaacuggggaaguacgagcaguacaucaaguggcccugguacaucuggcugggcuuuaucgccggacugauugccaucgugauggucacaaucaugcuguguugcaugaccagcugcuguagcugccugaagggcuguuguagcuguggcagcugcugcaaguucgacgaggacgauucugagcccgugcugaagggcgugaaacugcacuacaccugaggacuagucccuguucccagagcccacuuuuuuuucuuuuuuugaaauaaaauagccugucuuucagaucucaaaggcucuuuucagagccaccaaaaaaaaaaaaaaaaaaaaaaaaaaaaaaaaaaaaaaaaaaaaaaaaaaaaaaaaaaaaaaaaaaaaaaaaaaaaaaaaaaaaaaaaaaaaaaaaaaaaa

SEQ ID NO: 23495 - RNA, 4085 nt, Artificial Sequence
  SARS-CoV-2/Wuhan/WIV05/2019__EPI_ISL_402128 spike protein mRNA gc mod (1-1273)(L18F_D80A_D215G_L242del_A243del_L244del_R246I_K417N_E484 K_N501Y_D614G_A701V)
aggagagucccgcagucggcguccagcggcucugcuuguucgugugugugucguugcaggccuuauucaagcuuaccauguucguguuucuggugcugcugccccugguguccagccagugugugaacuucaccaccagaacacagcugccuccagccuacaccaacagcuucaccagaggcguguacuaccccgacaagguguucagauccagcgugcugcacucuacccaggaccuguuccugccuuucuucagcaacgugaccugguuccacgccauccacguguccggcaccaauggcaccaagagauucgccaaccccgugcugcccuucaacgacgggguguacuuugccagcaccgagaaguccaacaucaucagaggcuggaucuucggcaccacacuggacagcaagacccagagccugcugaucgugaacaacgccaccaacguggucaucaaagugugcgaguuccaguucugcaacgaccccuuccugggcgucuacuaccacaagaacaacaagagcuggauggaaagcgaguuccggguguacagcagcgccaacaacugcaccuucgaguacgugucccagccuuuccugauggaccuggaaggcaagcagggcaacuucaagaaccugcgcgaguucguguucaagaacaucgacggcuacuucaaaaucuacagcaagcacaccccuaucaaccucgugcggggccugccucagggcuucucugcucuggaaccccugguggaucugcccaucggcaucaacaucacccgguuucagacacugcacaucagcuaccugacaccuggcgauagcagcagcggauggacagcuggugccgccgcuuacuaugugggcuaccugcagccuagaaccuuccugcugaaguacaacgagaacggcaccaucaccgacgccguggauugugcucuggauccucugagcgagacaaagugcacccugaaguccuucaccguggaaaagggcaucuaccagaccagcaacuuccgggugcagcccaccgaauccaucgugcgguuccccaauaucaccaaucugugccccuucggcgagguguucaaugccaccagauucgccucuguguacgccuggaaccggaagcggaucagcaauugcguggccgacuacuccgugcuguacaacuccgccagcuucagcaccuucaagugcuacggcguguccccuaccaagcugaacgaccugugcuucacaaacguguacgccgacagcuucgugauccggggagaugaagugcggcagauugccccuggacagacaggcaacaucgccgacuacaacuacaagcugcccgacgacuucaccggcugugugauugccuggaacagcaacaaccuggacuccaaagucggcggcaacuacaauuaccuguaccggcuguuccggaaguccaaucugaagcccuucgagcgggacaucagcaccgaaaucuaucaggccggcagcaccccuugcaacggcgugaagggcuucaacugcuacuucccacugcaguccuacggcuuucagcccacauacggcgugggcuaucagcccuacagagugguggugcugagcuucgaacugcugcaugcuccugccacagugugcggcccuaagaaaagcaccaaucucgugaagaacaaaugcgugaacuucaacuucaacggccugaccggcaccggcgugcugacagagagcaacaagaaguuccugccauuccagcaguuuggccgggauaucgccgauaccacagacgccguuagagauccccagacacuggaaauccuggacaucaccccaugcagcuucggcggagugucugugaucaccccuggcaccaacaccagcaaucagguggcagugcuguaccagggcgugaacuguaccgaagugcccguggccauucacgccgaucagcugacaccuacauggcggguguacuccaccggcagcaauguguuucagaccagagccggcugucugaucggagccgagcacgugaacaauagcuacgagugcgacauccccaucggcgcuggcaucugugccagcuaccagacacagacaaacagccccagacgggcuagaagcguggccagccagagcaucauugccuacacaaugucucugggcguggagaacagcguggccuacuccaacaacucuaucgcuauccccaccaacuucaccaucagcgugaccaccgagauccugccuguguccaugaccaagaccagcguggacugcaccauguacaucugcggcgauuccaccgagugcuccaaccugcugcugcaguacggcagcuucugcacccagcugaauagagcccugacagggaucgccguggaacaggacaagaacacccaagagguguucgcccaagugaagcaaaucuacaagaccccuccuaucaaggacuucggcggcuucaauuucagccagauucugcccgauccuagcaagcccagcaagcggagcuucaucgaggaccugcuguucaacaaagugacacuggccgacgccggcuucaucaagcaguauggcgauugucugggcgacauugccgccagggaucugauuugcgcccagaaguuuaacggacugacagugcugccuccucugcugaccgaugagaugaucgcccaguacacaucugcccugcuggccggcacaaucacaagcggcuggacauuuggagcuggcgccgcucugcagauccccuuugcuaugcagauggccuaccgguucaacggcaucggagugacccagaaugugcuguacgagaaccagaagcugaucgccaaccaguucaacagcgccaucggcaagauccaggacagccugagcagcacagcaagcgcccugggaaagcugcaggacguggucaaccagaaugcccaggcacugaacacccuggucaagcagcuguccuccaacuucggcgccaucagcucugugcugaacgauauccugagcagacuggacaaggucgaggccgaggugcagaucgacagacugaucacaggcagacugcagagccuccagacauacgugacccagcagcugaucagagccgccgagauuagagccucugccaaucuggccgccaccaagaugucugagugugugcugggccagagcaagagaguggacuuuugcggcaagggcuaccaccugaugagcuucccucagucugccccucacggcgugguguuucugcacgugacauaugugcccgcucaagagaagaauuucaccaccgcuccagccaucugccacgacggcaaagcccacuuuccuagagaaggcguguucguguccaacggcacccauugguucgugacacagcggaacuucuacgagccccagaucaucaccaccgacaacaccuucgugucuggcaacugcgacguugugaucggcauugugaacaauaccguguacgacccucugcagcccgagcuggacagcuucaaagaggaacuggacaaguacuuuaagaaccacacaagccccgacguggaccugggcgauaucagcggaaucaaugccagcgucgugaacauccagaaagagaucgaccggcugaacgagguggccaagaaucugaacgagagccugaucgaccugcaagaacuggggaaguacgagcaguacaucaaguggcccugguacaucuggcugggcuuuaucgccggacugauugccaucgugauggucacaaucaugcuguguugcaugaccagcugcuguagcugccugaagggcuguuguagcuguggcagcugcugcaaguucgacgaggacgauucugagcccgugcugaagggcgugaaacugcacuacaccugaggacuagucccuguucccagagcccacuuuuuuuucuuuuuuugaaauaaaauagccugucuuucagaucucaaaggcucuuuucagagccaccaaaaaaaaaaaaaaaaaaaaaaaaaaaaaaaaaaaaaaaaaaaaaaaaaaaaaaaaaaaaaaaaaaaaaaaaaaaaaaaaaaaaaaaaaaaaaaaaaaaaa

SEQ ID NO: 23496 - RNA, 4094 nt, Artificial Sequence
  SARS-CoV-2/Wuhan/WIV05/2019__EPI_ISL_402128 spike protein mRNA gc mod (1-1273)(E484K_D614G)
aggagagucccgcagucggcguccagcggcucugcuuguucgugugugugucguugcaggccuuauucaagcuuaccauguucguguuucuggugcugcugccccugguguccagccagugugugaaccugaccaccagaacacagcugccuccagccuacaccaacagcuucaccagaggcguguacuaccccgacaagguguucagauccagcgugcugcacucuacccaggaccuguuccugccuuucuucagcaacgugaccugguuccacgccauccacguguccggcaccaauggcaccaagagauucgacaaccccgugcugcccuucaacgacgggguguacuuugccagcaccgagaaguccaacaucaucagaggcuggaucuucggcaccacacuggacagcaagacccagagccugcugaucgugaacaacgccaccaacguggucaucaaagugugcgaguuccaguucugcaacgaccccuuccugggcgucuacuaccacaagaacaacaagagcuggauggaaagcgaguuccggguguacagcagcgccaacaacugcaccuucgaguacgugucccagccuuuccugauggaccuggaaggcaagcagggcaacuucaagaaccugcgcgaguucguguucaagaacaucgacggcuacuucaaaaucuacagcaagcacaccccuaucaaccucgugcgggaucugccucagggcuucucugcucuggaaccccugguggaucugcccaucggcaucaacaucacccgguuucagacacugcuggcccugcacagaagcuaccugacaccuggcgauagcagcagcggauggacagcuggugccgccgcuuacuaugugggcuaccugcagccuagaaccuuccugcugaaguacaacgagaacggcaccaucaccgacgccguggauugugcucuggauccucugagcgagacaaagugcacccugaaguccuucaccguggaaaagggcaucuaccagaccagcaacuuccgggugcagcccaccgaauccaucgugcgguuccccaauaucaccaaucugugccccuucggcgagguguucaaugccaccagauucgccucuguguacgccuggaaccggaagcggaucagcaauugcguggccgacuacuccgugcuguacaacuccgccagcuucagcaccuucaagugcuacggcguguccccuaccaagcugaacgaccugugcuucacaaacguguacgccgacagcuucgugauccggggagaugaagugcggcagauugccccuggacagacaggcaagaucgccgacuacaacuacaagcugcccgacgacuucaccggcugugugauugccuggaacagcaacaaccuggacuccaaagucggcggcaacuacaauuaccuguaccggcuguuccggaaguccaaucugaagcccuucgagcgggacaucagcaccgaaaucuaucaggccggcagcaccccuugcaacggcgugaagggcuucaacugcuacuucccacugcaguccuacggcuuucagcccacaaauggcgugggcuaucagcccuacagagugguggugcugagcuucgaacugcugcaugcuccugccacagugugcggcccuaagaaaagcaccaaucucgugaagaacaaaugcgugaacuucaacuucaacggccugaccggcaccggcgugcugacagagagcaacaagaaguuccugccauuccagcaguuuggccgggauaucgccgauaccacagacgccguuagagauccccagacacuggaaauccuggacaucaccccaugcagcuucggcggagugucugugaucaccccuggcaccaacaccagcaaucagguggcagugcuguaccagggcgugaacuguaccgaagugcccguggccauucacgccgaucagcugacaccuacauggcggguguacuccaccggcagcaauguguuucagaccagagccggcugucugaucggagccgagcacgugaacaauagcuacgagugcgacauccccaucggcgcuggcaucugugccagcuaccagacacagacaaacagccccagacgggcuagaagcguggccagccagagcaucauugccuacacaaugucucugggcgccgagaacagcguggccuacuccaacaacucuaucgcuauccccaccaacuucaccaucagcgugaccaccgagauccugccuguguccaugaccaagaccagcguggacugcaccauguacaucugcggcgauuccaccgagugcuccaaccugcugcugcaguacggcagcuucugcacccagcugaauagagcccugacagggaucgccguggaacaggacaagaacacccaagagguguucgcccaagugaagcaaaucuacaagaccccuccuaucaaggacuucggcggcuucaauuucagccagauucugcccgauccuagcaagcccagcaagcggagcuucaucgaggaccugcuguucaacaaagugacacuggccgacgccggcuucaucaagcaguauggcgauugucugggcgacauugccgccagggaucugauuugcgcccagaaguuuaacggacugacagugcugccuccucugcugaccgaugagaugaucgcccaguacacaucugcccugcuggccggcacaaucacaagcggcuggacauuuggagcuggcgccgcucugcagauccccuuugcuaugcagauggccuaccgguucaacggcaucggagugacccagaaugugcuguacgagaaccagaagcugaucgccaaccaguucaacagcgccaucggcaagauccaggacagccugagcagcacagcaagcgcccugggaaagcugcaggacguggucaaccagaaugcccaggcacugaacacccuggucaagcagcuguccuccaacuucggcgccaucagcucugugcugaacgauauccugagcagacuggacaaggucgaggccgaggugcagaucgacagacugaucacaggcagacugcagagccuccagacauacgugacccagcagcugaucagagccgccgagauuagagccucugccaaucuggccgccaccaagaugucugagugugugcugggccagagcaagagaguggacuuuugcggcaagggcuaccaccugaugagcuucccucagucugccccucacggcgugguguuucugcacgugacauaugugcccgcucaagagaagaauuucaccaccgcuccagccaucugccacgacggcaaagcccacuuuccuagagaaggcguguucguguccaacggcacccauugguucgugacacagcggaacuucuacgagccccagaucaucaccaccgacaacaccuucgugucuggcaacugcgacguugugaucggcauugugaacaauaccguguacgacccucugcagcccgagcuggacagcuucaaagaggaacuggacaaguacuuuaagaaccacacaagccccgacguggaccugggcgauaucagcggaaucaaugccagcgucgugaacauccagaaagagaucgaccggcugaacgagguggccaagaaucugaacgagagccugaucgaccugcaagaacuggggaaguacgagcaguacaucaaguggcccugguacaucuggcugggcuuuaucgccggacugauugccaucgugauggucacaaucaugcuguguugcaugaccagcugcuguagcugccugaagggcuguuguagcuguggcagcugcugcaaguucgacgaggacgauucugagcccgugcugaagggcgugaaacugcacuacaccugaggacuagucccuguucccagagcccacuuuuuuuucuuuuuuugaaauaaaauagccugucuuucagaucucaaaggcucuuuucagagccaccaaaaaaaaaaaaaaaaaaaaaaaaaaaaaaaaaaaaaaaaaaaaaaaaaaaaaaaaaaaaaaaaaaaaaaaaaaaaaaaaaaaaaaaaaaaaaaaaaaaaa

SEQ ID NO: 23497 - RNA, 4094 nt, Artificial Sequence
  SARS-CoV-2/Wuhan/WIV05/2019__EPI_ISL_402128 spike protein mRNA gc mod (1-1273)(L18F_T20N_P26S_D138Y_R190S_K417T_E484K_N501Y_D614G_H655Y _T1027I)
aggagagucccgcagucggcguccagcggcucugcuuguucgugugugugucguugcaggccuuauucaagcuuaccauguucguguuucuggugcugcugccccugguguccagccagugugugaacuucaccaacagaacacagcugccuagcgccuacaccaacagcuucaccagaggcguguacuaccccgacaagguguucagauccagcgugcugcacucuacccaggaccuguuccugccuuucuucagcaacgugaccugguuccacgccauccacguguccggcaccaauggcaccaagagauucgacaaccccgugcugcccuucaacgacgggguguacuuugccagcaccgagaaguccaacaucaucagaggcuggaucuucggcaccacacuggacagcaagacccagagccugcugaucgugaacaacgccaccaacguggucaucaaagugugcgaguuccaguucugcaacuaccccuuccugggcgucuacuaccacaagaacaacaagagcuggauggaaagcgaguuccggguguacagcagcgccaacaacugcaccuucgaguacgugucccagccuuuccugauggaccuggaaggcaagcagggcaacuucaagaaccugagcgaguucguguucaagaacaucgacggcuacuucaaaaucuacagcaagcacaccccuaucaaccucgugcgggaucugccucagggcuucucugcucuggaaccccugguggaucugcccaucggcaucaacaucacccgguuucagacacugcuggcccugcacagaagcuaccugacaccuggcgauagcagcagcggauggacagcuggugccgccgcuuacuaugugggcuaccugcagccuagaaccuuccugcugaaguacaacgagaacggcaccaucaccgacgccguggauugugcucuggauccucugagcgagacaaagugcacccugaaguccuucaccguggaaaagggcaucuaccagaccagcaacuuccgggugcagcccaccgaauccaucgugcgguuccccaauaucaccaaucugugccccuucggcgagguguucaaugccaccagauucgccucuguguacgccuggaaccggaagcggaucagcaauugcguggccgacuacuccgugcuguacaacuccgccagcuucagcaccuucaagugcuacggcguguccccuaccaagcugaacgaccugugcuucacaaacguguacgccgacagcuucgugauccggggagaugaagugcggcagauugccccuggacagacaggcaccaucgccgacuacaacuacaagcugcccgacgacuucaccggcugugugauugccuggaacagcaacaaccuggacuccaaagucggcggcaacuacaauuaccuguaccggcuguuccggaaguccaaucugaagcccuucgagcgggacaucagcaccgaaaucuaucaggccggcagcaccccuugcaacggcgugaagggcuucaacugcuacuucccacugcaguccuacggcuuucagcccacauacggcgugggcuaucagcccuacagagugguggugcugagcuucgaacugcugcaugcuccugccacagugugcggcccuaagaaaagcaccaaucucgugaagaacaaaugcgugaacuucaacuucaacggccugaccggcaccggcgugcugacagagagcaacaagaaguuccugccauuccagcaguuuggccgggauaucgccgauaccacagacgccguuagagauccccagacacuggaaauccuggacaucaccccaugcagcuucggcggagugucugugaucaccccuggcaccaacaccagcaaucagguggcagugcuguaccagggcgugaacuguaccgaagugcccguggccauucacgccgaucagcugacaccuacauggcggguguacuccaccggcagcaauguguuucagaccagagccggcugucugaucggagccgaguacgugaacaauagcuacgagugcgacauccccaucggcgcuggcaucugugccagcuaccagacacagacaaacagccccagacgggcuagaagcguggccagccagagcaucauugccuacacaaugucucugggcgccgagaacagcguggccuacuccaacaacucuaucgcuauccccaccaacuucaccaucagcgugaccaccgagauccugccuguguccaugaccaagaccagcguggacugcaccauguacaucugcggcgauuccaccgagugcuccaaccugcugcugcaguacggcagcuucugcacccagcugaauagagcccugacagggaucgccguggaacaggacaagaacacccaagagguguucgcccaagugaagcaaaucuacaagaccccuccuaucaaggacuucggcggcuucaauuucagccagauucugcccgauccuagcaagcccagcaagcggagcuucaucgaggaccugcuguucaacaaagugacacuggccgacgccggcuucaucaagcaguauggcgauugucugggcgacauugccgccagggaucugauuugcgcccagaaguuuaacggacugacagugcugccuccucugcugaccgaugagaugaucgcccaguacacaucugcccugcuggccggcacaaucacaagcggcuggacauuuggagcuggcgccgcucugcagauccccuuugcuaugcagauggccuaccgguucaacggcaucggagugacccagaaugugcuguacgagaaccagaagcugaucgccaaccaguucaacagcgccaucggcaagauccaggacagccugagcagcacagcaagcgcccugggaaagcugcaggacguggucaaccagaaugcccaggcacugaacacccuggucaagcagcuguccuccaacuucggcgccaucagcucugugcugaacgauauccugagcagacuggacaaggucgaggccgaggugcagaucgacagacugaucacaggcagacugcagagccuccagacauacgugacccagcagcugaucagagccgccgagauuagagccucugccaaucuggccgccaucaagaugucugagugugugcugggccagagcaagagaguggacuuuugcggcaagggcuaccaccugaugagcuucccucagucugccccucacggcgugguguuucugcacgugacauaugugcccgcucaagagaagaauuucaccaccgcuccagccaucugccacgacggcaaagcccacuuuccuagagaaggcguguucguguccaacggcacccauugguucgugacacagcggaacuucuacgagccccagaucaucaccaccgacaacaccuucgugucuggcaacugcgacguugugaucggcauugugaacaauaccguguacgacccucugcagcccgagcuggacagcuucaaagaggaacuggacaaguacuuuaagaaccacacaagccccgacguggaccugggcgauaucagcggaaucaaugccagcgucgugaacauccagaaagagaucgaccggcugaacgagguggccaagaaucugaacgagagccugaucgaccugcaagaacuggggaaguacgagcaguacaucaaguggcccugguacaucuggcugggcuuuaucgccggacugauugccaucgugauggucacaaucaugcuguguugcaugaccagcugcuguagcugccugaagggcuguuguagcuguggcagcugcugcaaguucgacgaggacgauucugagcccgugcugaagggcgugaaacugcacuacaccugaggacuagucccuguucccagagcccacuuuuuuuucuuuuuuugaaauaaaauagccugucuuucagaucucaaaggcucuuuucagagccaccaaaaaaaaaaaaaaaaaaaaaaaaaaaaaaaaaaaaaaaaaaaaaaaaaaaaaaaaaaaaaaaaaaaaaaaaaaaaaaaaaaaaaaaaaaaaaaaaaaaaa

SEQ ID NO: 23498 - RNA, 4094 nt, Artificial Sequence
  SARS-CoV-2/Wuhan/WIV05/2019__EPI_ISL_402128 spike protein mRNA gc mod (1-1273)(S13I_W152C_L452R_D614G)
aggagagucccgcagucggcguccagcggcucugcuuguucgugugugugucguugcaggccuuauucaagcuuaccauguucguguuucuggugcugcugccccugguguccauccagugugugaaccugaccaccagaacacagcugccuccagccuacaccaacagcuucaccagaggcguguacuaccccgacaagguguucagauccagcgugcugcacucuacccaggaccuguuccugccuuucuucagcaacgugaccugguuccacgccauccacguguccggcaccaauggcaccaagagauucgacaaccccgugcugcccuucaacgacgggguguacuuugccagcaccgagaaguccaacaucaucagaggcuggaucuucggcaccacacuggacagcaagacccagagccugcugaucgugaacaacgccaccaacguggucaucaaagugugcgaguuccaguucugcaacgaccccuuccugggcgucuacuaccacaagaacaacaagagcugcauggaaagcgaguuccggguguacagcagcgccaacaacugcaccuucgaguacgugucccagccuuuccugauggaccuggaaggcaagcagggcaacuucaagaaccugcgcgaguucguguucaagaacaucgacggcuacuucaaaaucuacagcaagcacaccccuaucaaccucgugcgggaucugccucagggcuucucugcucuggaaccccugguggaucugcccaucggcaucaacaucacccgguuucagacacugcuggcccugcacagaagcuaccugacaccuggcgauagcagcagcggauggacagcuggugccgccgcuuacuaugugggcuaccugcagccuagaaccuuccugcugaaguacaacgagaacggcaccaucaccgacgccguggauugugcucuggauccucugagcgagacaaagugcacccugaaguccuucaccguggaaaagggcaucuaccagaccagcaacuuccgggugcagcccaccgaauccaucgugcgguuccccaauaucaccaaucugugccccuucggcgagguguucaaugccaccagauucgccucuguguacgccuggaaccggaagcggaucagcaauugcguggccgacuacuccgugcuguacaacuccgccagcuucagcaccuucaagugcuacggcguguccccuaccaagcugaacgaccugugcuucacaaacguguacgccgacagcuucgugauccggggagaugaagugcggcagauugccccuggacagacaggcaagaucgccgacuacaacuacaagcugcccgacgacuucaccggcugugugauugccuggaacagcaacaaccuggacuccaaagucggcggcaacuacaauuaccgcuaccggcuguuccggaaguccaaucugaagcccuucgagcgggacaucagcaccgaaaucuaucaggccggcagcaccccuugcaacggcguggaaggcuucaacugcuacuucccacugcaguccuacggcuuucagcccacaaauggcgugggcuaucagcccuacagagugguggugcugagcuucgaacugcugcaugcuccugccacagugugcggcccuaagaaaagcaccaaucucgugaagaacaaaugcgugaacuucaacuucaacggccugaccggcaccggcgugcugacagagagcaacaagaaguuccugccauuccagcaguuuggccgggauaucgccgauaccacagacgccguuagagauccccagacacuggaaauccuggacaucaccccaugcagcuucggcggagugucugugaucaccccuggcaccaacaccagcaaucagguggcagugcuguaccagggcgugaacuguaccgaagugcccguggccauucacgccgaucagcugacaccuacauggcggguguacuccaccggcagcaauguguuucagaccagagccggcugucugaucggagccgagcacgugaacaauagcuacgagugcgacauccccaucggcgcuggcaucugugccagcuaccagacacagacaaacagccccagacgggcuagaagcguggccagccagagcaucauugccuacacaaugucucugggcgccgagaacagcguggccuacuccaacaacucuaucgcuauccccaccaacuucaccaucagcgugaccaccgagauccugccuguguccaugaccaagaccagcguggacugcaccauguacaucugcggcgauuccaccgagugcuccaaccugcugcugcaguacggcagcuucugcacccagcugaauagagcccugacagggaucgccguggaacaggacaagaacacccaagagguguucgcccaagugaagcaaaucuacaagaccccuccuaucaaggacuucggcggcuucaauuucagccagauucugcccgauccuagcaagcccagcaagcggagcuucaucgaggaccugcuguucaacaaagugacacuggccgacgccggcuucaucaagcaguauggcgauugucugggcgacauugccgccagggaucugauuugcgcccagaaguuuaacggacugacagugcugccuccucugcugaccgaugagaugaucgcccaguacacaucugcccugcuggccggcacaaucacaagcggcuggacauuuggagcuggcgccgcucugcagauccccuuugcuaugcagauggccuaccgguucaacggcaucggagugacccagaaugugcuguacgagaaccagaagcugaucgccaaccaguucaacagcgccaucggcaagauccaggacagccugagcagcacagcaagcgcccugggaaagcugcaggacguggucaaccagaaugcccaggcacugaacacccuggucaagcagcuguccuccaacuucggcgccaucagcucugugcugaacgauauccugagcagacuggacaaggucgaggccgaggugcagaucgacagacugaucacaggcagacugcagagccuccagacauacgugacccagcagcugaucagagccgccgagauuagagccucugccaaucuggccgccaccaagaugucugagugugugcugggccagagcaagagaguggacuuuugcggcaagggcuaccaccugaugagcuucccucagucugccccucacggcgugguguuucugcacgugacauaugugcccgcucaagagaagaauuucaccaccgcuccagccaucugccacgacggcaaagcccacuuuccuagagaaggcguguucguguccaacggcacccauugguucgugacacagcggaacuucuacgagccccagaucaucaccaccgacaacaccuucgugucuggcaacugcgacguugugaucggcauugugaacaauaccguguacgacccucugcagcccgagcuggacagcuucaaagaggaacuggacaaguacuuuaagaaccacacaagccccgacguggaccugggcgauaucagcggaaucaaugccagcgucgugaacauccagaaagagaucgaccggcugaacgagguggccaagaaucugaacgagagccugaucgaccugcaagaacuggggaaguacgagcaguacaucaaguggcccugguacaucuggcugggcuuuaucgccggacugauugccaucgugauggucacaaucaugcuguguugcaugaccagcugcuguagcugccugaagggcuguuguagcuguggcagcugcugcaaguucgacgaggacgauucugagcccgugcugaagggcgugaaacugcacuacaccugaggacuagucccuguucccagagcccacuuuuuuuucuuuuuuugaaauaaaauagccugucuuucagaucucaaaggcucuuuucagagccaccaaaaaaaaaaaaaaaaaaaaaaaaaaaaaaaaaaaaaaaaaaaaaaaaaaaaaaaaaaaaaaaaaaaaaaaaaaaaaaaaaaaaaaaaaaaaaaaaaaaaa

SEQ ID NO: 23499 - RNA, 4094 nt, Artificial Sequence
  SARS-CoV-2/Wuhan/WIV05/2019__EPI_ISL_402128 spike protein mRNA gc mod (1-1273)
aggagagucccgcagucggcguccagcggcucugcuuguucgugugugugucguugcaggccuuauucaagcuuaccauguucguguuccuggugcugcugccucugguguccagccagugugugaaccugaccaccagaacacagcugccuccagccuacaccaacagcuuuaccagaggcguguacuaccccgacaagguguucagauccagcgugcugcacucuacccaggaccuguuccugccuuucuucagcaacgugaccugguuccacgccauccacguguccggcaccaauggcaccaagagauucgacaaccccgugcugcccuucaacgacgggguguacuuugccagcaccgagaaguccaacaucaucagaggcuggaucuucggcaccacacuggacagcaagacccagagccugcugaucgugaacaacgccaccaacguggucaucaaagugugcgaguuccaguucugcaacgaccccuuccugggcgucuacuaccacaagaacaacaagagcuggauggaaagcgaguuccggguguacagcagcgccaacaacugcaccuucgaguacgugucccagccuuuccugauggaccuggaaggcaagcagggcaacuucaagaaccugcgcgaguucguguuuaagaacaucgacggcuacuucaagaucuacagcaagcacaccccuaucaaccucgugcgggaucugccucagggcuucucugcucuggaaccccugguggaucugcccaucggcaucaacaucacccgguuucagacacugcuggcccugcacagaagcuaccugacaccuggcgauagcagcagcggauggacagcuggugccgccgcuuacuaugugggcuaccugcagccuagaaccuuccugcugaaguacaacgagaacggcaccaucaccgacgccguggauugugcucuggauccucugagcgagacaaagugcacccugaaguccuucaccguggaaaagggcaucuaccagaccagcaacuuccgggugcagcccaccgaauccaucgugcgguuccccaauaucaccaaucugugccccuucggcgagguguucaaugccaccagauucgccucuguguacgccuggaaccggaagcggaucagcaauugcguggccgacuacuccgugcuguacaacuccgccagcuucagcaccuucaagugcuacggcguguccccuaccaagcugaacgaccugugcuucacaaacguguacgccgacagcuucgugauccggggagaugaagugcggcagauugccccuggacagacaggcaagaucgccgacuacaacuacaagcugcccgacgacuucaccggcugugugauugccuggaacagcaacaaccuggacuccaaagucggcggcaacuacaauuaccuguaccggcuguuccggaaguccaaucugaagcccuucgagcgggacaucuccaccgagaucuaucaggccggcagcaccccuuguaacggcguggaaggcuucaacugcuacuucccacugcaguccuacggcuuucagcccacaaauggcgugggcuaucagcccuacagagugguggugcugagcuucgaacugcugcaugccccugccacagugugcggcccuaagaaaagcaccaaucucgugaagaacaaaugcgugaacuucaacuucaacggccugaccggcaccggcgugcugacagagagcaacaagaaguuccugccauuccagcaguuuggccgggauaucgccgauaccacagacgccguuagagauccccagacacuggaaauccuggacaucaccccuugcagcuucggcggagugucugugaucaccccuggcaccaacaccagcaaucagguggcagugcuguaccaggacgugaacuguaccgaagugcccguggccauucacgccgaucagcugacaccuacauggcggguguacuccaccggcagcaauguguuucagaccagagccggcugucugaucggagccgagcacgugaacaauagcuacgagugcgacauccccaucggcgcuggaaucugcgccagcuaccagacacagacaaacagcccucggagagccagaagcguggccagccagagcaucauugccuacacaaugucucugggcgccgagaacagcguggccuacuccaacaacucuaucgcuauccccaccaacuucaccaucagcgugaccacagagauccugccuguguccaugaccaagaccagcguggacugcaccauguacaucugcggcgauuccaccgagugcuccaaccugcugcugcaguacggcagcuucugcacccagcugaauagagcccugacagggaucgccguggaacaggacaagaacacccaagagguguucgcccaagugaagcagaucuacaagaccccuccuaucaaggacuucggcggcuucaauuucagccagauucugcccgauccuagcaagcccagcaagcggagcuucaucgaggaccugcuguucaacaaagugacacuggccgacgccggcuucaucaagcaguauggcgauugucugggcgacauugccgccagggaucugauuugcgcccagaaguuuaacggacugacagugcugccuccucugcugaccgaugagaugaucgcccaguacacaucugcccugcuggccggcacaaucacaagcggcuggacauuuggagcaggcgccgcucugcagauccccuuugcuaugcagauggccuaccgguucaacggcaucggagugacccagaaugugcuguacgagaaccagaagcugaucgccaaccaguucaacagcgccaucggcaagauccaggacagccugagcagcacagcaagcgcccugggaaagcugcaggacguggucaaccagaaugcccaggcacugaacacccuggucaagcagcuguccuccaacuucggcgccaucagcucugugcugaacgauauccugagcagacuggacaaggucgaggccgaggugcagaucgacagacugaucacaggcagacugcagagccuccagacauacgugacccagcagcugaucagagccgccgagauuagagccucugccaaucuggccgccaccaagaugucugagugugugcugggccagagcaagagaguggacuuuugcggcaagggcuaccaccugaugagcuucccucagucugccccucacggcgugguguuucugcacgugacauaugugcccgcucaagagaagaauuucaccaccgcuccagccaucugccacgacggcaaagcccacuuuccuagagaaggcguguucguguccaacggcacccauugguucgugacacagcggaacuucuacgagccccagaucaucaccaccgacaacaccuucgugucuggcaacugcgacgucgugaucggcauugugaacaauaccguguacgacccucugcagcccgagcuggacagcuucaaagaggaacuggacaaguacuuuaagaaccacacaagccccgacguggaccugggcgauaucagcggaaucaaugccagcgucgugaacauccagaaagagaucgaccggcugaacgagguggccaagaaucugaacgagagccugaucgaccugcaagaacuggggaaguacgagcaguacaucaaguggcccugguacaucuggcugggcuuuaucgccggacugauugccaucgugauggucacaaucaugcuguguugcaugaccagcugcuguagcugccugaagggcuguuguagcuguggcagcugcugcaaguucgacgaggacgauucugagcccgugcugaagggcgugaaacugcacuacacaugaggacuagucccuguucccagagcccacuuuuuuuucuuuuuuugaaauaaaauagccugucuuucagaucucaaaggcucuuuucagagccaccaaaaaaaaaaaaaaaaaaaaaaaaaaaaaaaaaaaaaaaaaaaaaaaaaaaaaaaaaaaaaaaaaaaaaaaaaaaaaaaaaaaaaaaaaaaaaaaaaaaaa

SEQ ID NO: 23500 - RNA, 4094 nt, Artificial Sequence
  SARS-CoV-2/Wuhan/WIV05/2019__EPI_ISL_402128 spike protein mRNA gc mod (1-1273)(D614G)
aggagagucccgcagucggcguccagcggcucugcuuguucgugugugugucguugcaggccuuauucaagcuuaccauguucguguuccuggugcugcugccucugguguccagccagugugugaaccugaccaccagaacacagcugccuccagccuacaccaacagcuuuaccagaggcguguacuaccccgacaagguguucagauccagcgugcugcacucuacccaggaccuguuccugccuuucuucagcaacgugaccugguuccacgccauccacguguccggcaccaauggcaccaagagauucgacaaccccgugcugcccuucaacgacgggguguacuuugccagcaccgagaaguccaacaucaucagaggcuggaucuucggcaccacacuggacagcaagacccagagccugcugaucgugaacaacgccaccaacguggucaucaaagugugcgaguuccaguucugcaacgaccccuuccugggcgucuacuaccacaagaacaacaagagcuggauggaaagcgaguuccggguguacagcagcgccaacaacugcaccuucgaguacgugucccagccuuuccugauggaccuggaaggcaagcagggcaacuucaagaaccugcgcgaguucguguuuaagaacaucgacggcuacuucaagaucuacagcaagcacaccccuaucaaccucgugcgggaucugccucagggcuucucugcucuggaaccccugguggaucugcccaucggcaucaacaucacccgguuucagacacugcuggcccugcacagaagcuaccugacaccuggcgauagcagcagcggauggacagcuggugccgccgcuuacuaugugggcuaccugcagccuagaaccuuccugcugaaguacaacgagaacggcaccaucaccgacgccguggauugugcucuggauccucugagcgagacaaagugcacccugaaguccuucaccguggaaaagggcaucuaccagaccagcaacuuccgggugcagcccaccgaauccaucgugcgguuccccaauaucaccaaucugugccccuucggcgagguguucaaugccaccagauucgccucuguguacgccuggaaccggaagcggaucagcaauugcguggccgacuacuccgugcuguacaacuccgccagcuucagcaccuucaagugcuacggcguguccccuaccaagcugaacgaccugugcuucacaaacguguacgccgacagcuucgugauccggggagaugaagugcggcagauugccccuggacagacaggcaagaucgccgacuacaacuacaagcugcccgacgacuucaccggcugugugauugccuggaacagcaacaaccuggacuccaaagucggcggcaacuacaauuaccuguaccggcuguuccggaaguccaaucugaagcccuucgagcgggacaucuccaccgagaucuaucaggccggcagcaccccuuguaacggcguggaaggcuucaacugcuacuucccacugcaguccuacggcuuucagcccacaaauggcgugggcuaucagcccuacagagugguggugcugagcuucgaacugcugcaugccccugccacagugugcggcccuaagaaaagcaccaaucucgugaagaacaaaugcgugaacuucaacuucaacggccugaccggcaccggcgugcugacagagagcaacaagaaguuccugccauuccagcaguuuggccgggauaucgccgauaccacagacgccguuagagauccccagacacuggaaauccuggacaucaccccuugcagcuucggcggagugucugugaucaccccuggcaccaacaccagcaaucagguggcagugcuguaccagggcgugaacuguaccgaagugcccguggccauucacgccgaucagcugacaccuacauggcggguguacuccaccggcagcaauguguuucagaccagagccggcugucugaucggagccgagcacgugaacaauagcuacgagugcgacauccccaucggcgcuggaaucugcgccagcuaccagacacagacaaacagcccucggagagccagaagcguggccagccagagcaucauugccuacacaaugucucugggcgccgagaacagcguggccuacuccaacaacucuaucgcuauccccaccaacuucaccaucagcgugaccacagagauccugccuguguccaugaccaagaccagcguggacugcaccauguacaucugcggcgauuccaccgagugcuccaaccugcugcugcaguacggcagcuucugcacccagcugaauagagcccugacagggaucgccguggaacaggacaagaacacccaagagguguucgcccaagugaagcagaucuacaagaccccuccuaucaaggacuucggcggcuucaauuucagccagauucugcccgauccuagcaagcccagcaagcggagcuucaucgaggaccugcuguucaacaaagugacacuggccgacgccggcuucaucaagcaguauggcgauugucugggcgacauugccgccagggaucugauuugcgcccagaaguuuaacggacugacagugcugccuccucugcugaccgaugagaugaucgcccaguacacaucugcccugcuggccggcacaaucacaagcggcuggacauuuggagcaggcgccgcucugcagauccccuuugcuaugcagauggccuaccgguucaacggcaucggagugacccagaaugugcuguacgagaaccagaagcugaucgccaaccaguucaacagcgccaucggcaagauccaggacagccugagcagcacagcaagcgcccugggaaagcugcaggacguggucaaccagaaugcccaggcacugaacacccuggucaagcagcuguccuccaacuucggcgccaucagcucugugcugaacgauauccugagcagacuggacaaggucgaggccgaggugcagaucgacagacugaucacaggcagacugcagagccuccagacauacgugacccagcagcugaucagagccgccgagauuagagccucugccaaucuggccgccaccaagaugucugagugugugcugggccagagcaagagaguggacuuuugcggcaagggcuaccaccugaugagcuucccucagucugccccucacggcgugguguuucugcacgugacauaugugcccgcucaagagaagaauuucaccaccgcuccagccaucugccacgacggcaaagcccacuuuccuagagaaggcguguucguguccaacggcacccauugguucgugacacagcggaacuucuacgagccccagaucaucaccaccgacaacaccuucgugucuggcaacugcgacgucgugaucggcauugugaacaauaccguguacgacccucugcagcccgagcuggacagcuucaaagaggaacuggacaaguacuuuaagaaccacacaagccccgacguggaccugggcgauaucagcggaaucaaugccagcgucgugaacauccagaaagagaucgaccggcugaacgagguggccaagaaucugaacgagagccugaucgaccugcaagaacuggggaaguacgagcaguacaucaaguggcccugguacaucuggcugggcuuuaucgccggacugauugccaucgugauggucacaaucaugcuguguugcaugaccagcugcuguagcugccugaagggcuguuguagcuguggcagcugcugcaaguucgacgaggacgauucugagcccgugcugaagggcgugaaacugcacuacacaugaggacuagucccuguucccagagcccacuuuuuuuucuuuuuuugaaauaaaauagccugucuuucagaucucaaaggcucuuuucagagccaccaaaaaaaaaaaaaaaaaaaaaaaaaaaaaaaaaaaaaaaaaaaaaaaaaaaaaaaaaaaaaaaaaaaaaaaaaaaaaaaaaaaaaaaaaaaaaaaaaaaaa

SEQ ID NO: 23501 - RNA, 4094 nt, Artificial Sequence
  SARS-CoV-2/Wuhan/WIV05/2019__EPI_ISL_402128 spike protein mRNA gc mod (1-1273)(A222V_D614G)
aggagagucccgcagucggcguccagcggcucugcuuguucgugugugugucguugcaggccuuauucaagcuuaccauguucguguuccuggugcugcugccucugguguccagccagugugugaaccugaccaccagaacacagcugccuccagccuacaccaacagcuuuaccagaggcguguacuaccccgacaagguguucagauccagcgugcugcacucuacccaggaccuguuccugccuuucuucagcaacgugaccugguuccacgccauccacguguccggcaccaauggcaccaagagauucgacaaccccgugcugcccuucaacgacgggguguacuuugccagcaccgagaaguccaacaucaucagaggcuggaucuucggcaccacacuggacagcaagacccagagccugcugaucgugaacaacgccaccaacguggucaucaaagugugcgaguuccaguucugcaacgaccccuuccugggcgucuacuaccacaagaacaacaagagcuggauggaaagcgaguuccggguguacagcagcgccaacaacugcaccuucgaguacgugucccagccuuuccugauggaccuggaaggcaagcagggcaacuucaagaaccugcgcgaguucguguuuaagaacaucgacggcuacuucaagaucuacagcaagcacaccccuaucaaccucgugcgggaucugccucagggcuucucugugcuggaaccccugguggaucugcccaucggcaucaacaucacccgguuucagacacugcuggcccugcacagaagcuaccugacaccuggcgauagcagcagcggauggacagcuggugccgccgcuuacuaugugggcuaccugcagccuagaaccuuccugcugaaguacaacgagaacggcaccaucaccgacgccguggauugugcucuggauccucugagcgagacaaagugcacccugaaguccuucaccguggaaaagggcaucuaccagaccagcaacuuccgggugcagcccaccgaauccaucgugcgguuccccaauaucaccaaucugugccccuucggcgagguguucaaugccaccagauucgccucuguguacgccuggaaccggaagcggaucagcaauugcguggccgacuacuccgugcuguacaacuccgccagcuucagcaccuucaagugcuacggcguguccccuaccaagcugaacgaccugugcuucacaaacguguacgccgacagcuucgugauccggggagaugaagugcggcagauugccccuggacagacaggcaagaucgccgacuacaacuacaagcugcccgacgacuucaccggcugugugauugccuggaacagcaacaaccuggacuccaaagucggcggcaacuacaauuaccuguaccggcuguuccggaaguccaaucugaagcccuucgagcgggacaucuccaccgagaucuaucaggccggcagcaccccuuguaacggcguggaaggcuucaacugcuacuucccacugcaguccuacggcuuucagcccacaaauggcgugggcuaucagcccuacagagugguggugcugagcuucgaacugcugcaugccccugccacagugugcggcccuaagaaaagcaccaaucucgugaagaacaaaugcgugaacuucaacuucaacggccugaccggcaccggcgugcugacagagagcaacaagaaguuccugccauuccagcaguuuggccgggauaucgccgauaccacagacgccguuagagauccccagacacuggaaauccuggacaucaccccuugcagcuucggcggagugucugugaucaccccuggcaccaacaccagcaaucagguggcagugcuguaccagggcgugaacuguaccgaagugcccguggccauucacgccgaucagcugacaccuacauggcggguguacuccaccggcagcaauguguuucagaccagagccggcugucugaucggagccgagcacgugaacaauagcuacgagugcgacauccccaucggcgcuggaaucugcgccagcuaccagacacagacaaacagcccucggagagccagaagcguggccagccagagcaucauugccuacacaaugucucugggcgccgagaacagcguggccuacuccaacaacucuaucgcuauccccaccaacuucaccaucagcgugaccacagagauccugccuguguccaugaccaagaccagcguggacugcaccauguacaucugcggcgauuccaccgagugcuccaaccugcugcugcaguacggcagcuucugcacccagcugaauagagcccugacagggaucgccguggaacaggacaagaacacccaagagguguucgcccaagugaagcagaucuacaagaccccuccuaucaaggacuucggcggcuucaauuucagccagauucugcccgauccuagcaagcccagcaagcggagcuucaucgaggaccugcuguucaacaaagugacacuggccgacgccggcuucaucaagcaguauggcgauugucugggcgacauugccgccagggaucugauuugcgcccagaaguuuaacggacugacagugcugccuccucugcugaccgaugagaugaucgcccaguacacaucugcccugcuggccggcacaaucacaagcggcuggacauuuggagcaggcgccgcucugcagauccccuuugcuaugcagauggccuaccgguucaacggcaucggagugacccagaaugugcuguacgagaaccagaagcugaucgccaaccaguucaacagcgccaucggcaagauccaggacagccugagcagcacagcaagcgcccugggaaagcugcaggacguggucaaccagaaugcccaggcacugaacacccuggucaagcagcuguccuccaacuucggcgccaucagcucugugcugaacgauauccugagcagacuggacaaggucgaggccgaggugcagaucgacagacugaucacaggcagacugcagagccuccagacauacgugacccagcagcugaucagagccgccgagauuagagccucugccaaucuggccgccaccaagaugucugagugugugcugggccagagcaagagaguggacuuuugcggcaagggcuaccaccugaugagcuucccucagucugccccucacggcgugguguuucugcacgugacauaugugcccgcucaagagaagaauuucaccaccgcuccagccaucugccacgacggcaaagcccacuuuccuagagaaggcguguucguguccaacggcacccauugguucgugacacagcggaacuucuacgagccccagaucaucaccaccgacaacaccuucgugucuggcaacugcgacgucgugaucggcauugugaacaauaccguguacgacccucugcagcccgagcuggacagcuucaaagaggaacuggacaaguacuuuaagaaccacacaagccccgacguggaccugggcgauaucagcggaaucaaugccagcgucgugaacauccagaaagagaucgaccggcugaacgagguggccaagaaucugaacgagagccugaucgaccugcaagaacuggggaaguacgagcaguacaucaaguggcccugguacaucuggcugggcuuuaucgccggacugauugccaucgugauggucacaaucaugcuguguugcaugaccagcugcuguagcugccugaagggcuguuguagcuguggcagcugcugcaaguucgacgaggacgauucugagcccgugcugaagggcgugaaacugcacuacacaugaggacuagucccuguucccagagcccacuuuuuuuucuuuuuuugaaauaaaauagccugucuuucagaucucaaaggcucuuuucagagccaccaaaaaaaaaaaaaaaaaaaaaaaaaaaaaaaaaaaaaaaaaaaaaaaaaaaaaaaaaaaaaaaaaaaaaaaaaaaaaaaaaaaaaaaaaaaaaaaaaaaaa

SEQ ID NO: 23502 - RNA, 4094 nt, Artificial Sequence
  SARS-CoV-2/Wuhan/WIV05/2019__EPI_ISL_402128 spike protein mRNA gc mod (1-1273)(N439K_D614G)
aggagagucccgcagucggcguccagcggcucugcuuguucgugugugugucguugcaggccuuauucaagcuuaccauguucguguuccuggugcugcugccucugguguccagccagugugugaaccugaccaccagaacacagcugccuccagccuacaccaacagcuuuaccagaggcguguacuaccccgacaagguguucagauccagcgugcugcacucuacccaggaccuguuccugccuuucuucagcaacgugaccugguuccacgccauccacguguccggcaccaauggcaccaagagauucgacaaccccgugcugcccuucaacgacgggguguacuuugccagcaccgagaaguccaacaucaucagaggcuggaucuucggcaccacacuggacagcaagacccagagccugcugaucgugaacaacgccaccaacguggucaucaaagugugcgaguuccaguucugcaacgaccccuuccugggcgucuacuaccacaagaacaacaagagcuggauggaaagcgaguuccggguguacagcagcgccaacaacugcaccuucgaguacgugucccagccuuuccugauggaccuggaaggcaagcagggcaacuucaagaaccugcgcgaguucguguuuaagaacaucgacggcuacuucaagaucuacagcaagcacaccccuaucaaccucgugcgggaucugccucagggcuucucugcucuggaaccccugguggaucugcccaucggcaucaacaucacccgguuucagacacugcuggcccugcacagaagcuaccugacaccuggcgauagcagcagcggauggacagcuggugccgccgcuuacuaugugggcuaccugcagccuagaaccuuccugcugaaguacaacgagaacggcaccaucaccgacgccguggauugugcucuggauccucugagcgagacaaagugcacccugaaguccuucaccguggaaaagggcaucuaccagaccagcaacuuccgggugcagcccaccgaauccaucgugcgguuccccaauaucaccaaucugugccccuucggcgagguguucaaugccaccagauucgccucuguguacgccuggaaccggaagcggaucagcaauugcguggccgacuacuccgugcuguacaacuccgccagcuucagcaccuucaagugcuacggcguguccccuaccaagcugaacgaccugugcuucacaaacguguacgccgacagcuucgugauccggggagaugaagugcggcagauugccccuggacagacaggcaagaucgccgacuacaacuacaagcugcccgacgacuucaccggcugugugauugccuggaacagcaagaaccuggacuccaaagucggcggcaacuacaauuaccuguaccggcuguuccggaaguccaaucugaagcccuucgagcgggacaucuccaccgagaucuaucaggccggcagcaccccuuguaacggcguggaaggcuucaacugcuacuucccacugcaguccuacggcuuucagcccacaaauggcgugggcuaucagcccuacagagugguggugcugagcuucgaacugcugcaugccccugccacagugugcggcccuaagaaaagcaccaaucucgugaagaacaaaugcgugaacuucaacuucaacggccugaccggcaccggcgugcugacagagagcaacaagaaguuccugccauuccagcaguuuggccgggauaucgccgauaccacagacgccguuagagauccccagacacuggaaauccuggacaucaccccuugcagcuucggcggagugucugugaucaccccuggcaccaacaccagcaaucagguggcagugcuguaccagggcgugaacuguaccgaagugcccguggccauucacgccgaucagcugacaccuacauggcggguguacuccaccggcagcaauguguuucagaccagagccggcugucugaucggagccgagcacgugaacaauagcuacgagugcgacauccccaucggcgcuggaaucugcgccagcuaccagacacagacaaacagcccucggagagccagaagcguggccagccagagcaucauugccuacacaaugucucugggcgccgagaacagcguggccuacuccaacaacucuaucgcuauccccaccaacuucaccaucagcgugaccacagagauccugccuguguccaugaccaagaccagcguggacugcaccauguacaucugcggcgauuccaccgagugcuccaaccugcugcugcaguacggcagcuucugcacccagcugaauagagcccugacagggaucgccguggaacaggacaagaacacccaagagguguucgcccaagugaagcagaucuacaagaccccuccuaucaaggacuucggcggcuucaauuucagccagauucugcccgauccuagcaagcccagcaagcggagcuucaucgaggaccugcuguucaacaaagugacacuggccgacgccggcuucaucaagcaguauggcgauugucugggcgacauugccgccagggaucugauuugcgcccagaaguuuaacggacugacagugcugccuccucugcugaccgaugagaugaucgcccaguacacaucugcccugcuggccggcacaaucacaagcggcuggacauuuggagcaggcgccgcucugcagauccccuuugcuaugcagauggccuaccgguucaacggcaucggagugacccagaaugugcuguacgagaaccagaagcugaucgccaaccaguucaacagcgccaucggcaagauccaggacagccugagcagcacagcaagcgcccugggaaagcugcaggacguggucaaccagaaugcccaggcacugaacacccuggucaagcagcuguccuccaacuucggcgccaucagcucugugcugaacgauauccugagcagacuggacaaggucgaggccgaggugcagaucgacagacugaucacaggcagacugcagagccuccagacauacgugacccagcagcugaucagagccgccgagauuagagccucugccaaucuggccgccaccaagaugucugagugugugcugggccagagcaagagaguggacuuuugcggcaagggcuaccaccugaugagcuucccucagucugccccucacggcgugguguuucugcacgugacauaugugcccgcucaagagaagaauuucaccaccgcuccagccaucugccacgacggcaaagcccacuuuccuagagaaggcguguucguguccaacggcacccauugguucgugacacagcggaacuucuacgagccccagaucaucaccaccgacaacaccuucgugucuggcaacugcgacgucgugaucggcauugugaacaauaccguguacgacccucugcagcccgagcuggacagcuucaaagaggaacuggacaaguacuuuaagaaccacacaagccccgacguggaccugggcgauaucagcggaaucaaugccagcgucgugaacauccagaaagagaucgaccggcugaacgagguggccaagaaucugaacgagagccugaucgaccugcaagaacuggggaaguacgagcaguacaucaaguggcccugguacaucuggcugggcuuuaucgccggacugauugccaucgugauggucacaaucaugcuguguugcaugaccagcugcuguagcugccugaagggcuguuguagcuguggcagcugcugcaaguucgacgaggacgauucugagcccgugcugaagggcgugaaacugcacuacacaugaggacuagucccuguucccagagcccacuuuuuuuucuuuuuuugaaauaaaauagccugucuuucagaucucaaaggcucuuuucagagccaccaaaaaaaaaaaaaaaaaaaaaaaaaaaaaaaaaaaaaaaaaaaaaaaaaaaaaaaaaaaaaaaaaaaaaaaaaaaaaaaaaaaaaaaaaaaaaaaaaaaaa

SEQ ID NO: 23503 - RNA, 4094 nt, Artificial Sequence
  SARS-CoV-2/Wuhan/WIV05/2019__EPI_ISL_402128 spike protein mRNA gc mod (1-1273)(S477N_D614G)
aggagagucccgcagucggcguccagcggcucugcuuguucgugugugugucguugcaggccuuauucaagcuuaccauguucguguuccuggugcugcugccucugguguccagccagugugugaaccugaccaccagaacacagcugccuccagccuacaccaacagcuuuaccagaggcguguacuaccccgacaagguguucagauccagcgugcugcacucuacccaggaccuguuccugccuuucuucagcaacgugaccugguuccacgccauccacguguccggcaccaauggcaccaagagauucgacaaccccgugcugcccuucaacgacgggguguacuuugccagcaccgagaaguccaacaucaucagaggcuggaucuucggcaccacacuggacagcaagacccagagccugcugaucgugaacaacgccaccaacguggucaucaaagugugcgaguuccaguucugcaacgaccccuuccugggcgucuacuaccacaagaacaacaagagcuggauggaaagcgaguuccggguguacagcagcgccaacaacugcaccuucgaguacgugucccagccuuuccugauggaccuggaaggcaagcagggcaacuucaagaaccugcgcgaguucguguuuaagaacaucgacggcuacuucaagaucuacagcaagcacaccccuaucaaccucgugcgggaucugccucagggcuucucugcucuggaaccccugguggaucugcccaucggcaucaacaucacccgguuucagacacugcuggcccugcacagaagcuaccugacaccuggcgauagcagcagcggauggacagcuggugccgccgcuuacuaugugggcuaccugcagccuagaaccuuccugcugaaguacaacgagaacggcaccaucaccgacgccguggauugugcucuggauccucugagcgagacaaagugcacccugaaguccuucaccguggaaaagggcaucuaccagaccagcaacuuccgggugcagcccaccgaauccaucgugcgguuccccaauaucaccaaucugugccccuucggcgagguguucaaugccaccagauucgccucuguguacgccuggaaccggaagcggaucagcaauugcguggccgacuacuccgugcuguacaacuccgccagcuucagcaccuucaagugcuacggcguguccccuaccaagcugaacgaccugugcuucacaaacguguacgccgacagcuucgugauccggggagaugaagugcggcagauugccccuggacagacaggcaagaucgccgacuacaacuacaagcugcccgacgacuucaccggcugugugauugccuggaacagcaacaaccuggacuccaaagucggcggcaacuacaauuaccuguaccggcuguuccggaaguccaaucugaagcccuucgagcgggacaucuccaccgagaucuaucaggccggcaacaccccuuguaacggcguggaaggcuucaacugcuacuucccacugcaguccuacggcuuucagcccacaaauggcgugggcuaucagcccuacagagugguggugcugagcuucgaacugcugcaugccccugccacagugugcggcccuaagaaaagcaccaaucucgugaagaacaaaugcgugaacuucaacuucaacggccugaccggcaccggcgugcugacagagagcaacaagaaguuccugccauuccagcaguuuggccgggauaucgccgauaccacagacgccguuagagauccccagacacuggaaauccuggacaucaccccuugcagcuucggcggagugucugugaucaccccuggcaccaacaccagcaaucagguggcagugcuguaccagggcgugaacuguaccgaagugcccguggccauucacgccgaucagcugacaccuacauggcggguguacuccaccggcagcaauguguuucagaccagagccggcugucugaucggagccgagcacgugaacaauagcuacgagugcgacauccccaucggcgcuggaaucugcgccagcuaccagacacagacaaacagcccucggagagccagaagcguggccagccagagcaucauugccuacacaaugucucugggcgccgagaacagcguggccuacuccaacaacucuaucgcuauccccaccaacuucaccaucagcgugaccacagagauccugccuguguccaugaccaagaccagcguggacugcaccauguacaucugcggcgauuccaccgagugcuccaaccugcugcugcaguacggcagcuucugcacccagcugaauagagcccugacagggaucgccguggaacaggacaagaacacccaagagguguucgcccaagugaagcagaucuacaagaccccuccuaucaaggacuucggcggcuucaauuucagccagauucugcccgauccuagcaagcccagcaagcggagcuucaucgaggaccugcuguucaacaaagugacacuggccgacgccggcuucaucaagcaguauggcgauugucugggcgacauugccgccagggaucugauuugcgcccagaaguuuaacggacugacagugcugccuccucugcugaccgaugagaugaucgcccaguacacaucugcccugcuggccggcacaaucacaagcggcuggacauuuggagcaggcgccgcucugcagauccccuuugcuaugcagauggccuaccgguucaacggcaucggagugacccagaaugugcuguacgagaaccagaagcugaucgccaaccaguucaacagcgccaucggcaagauccaggacagccugagcagcacagcaagcgcccugggaaagcugcaggacguggucaaccagaaugcccaggcacugaacacccuggucaagcagcuguccuccaacuucggcgccaucagcucugugcugaacgauauccugagcagacuggacaaggucgaggccgaggugcagaucgacagacugaucacaggcagacugcagagccuccagacauacgugacccagcagcugaucagagccgccgagauuagagccucugccaaucuggccgccaccaagaugucugagugugugcugggccagagcaagagaguggacuuuugcggcaagggcuaccaccugaugagcuucccucagucugccccucacggcgugguguuucugcacgugacauaugugcccgcucaagagaagaauuucaccaccgcuccagccaucugccacgacggcaaagcccacuuuccuagagaaggcguguucguguccaacggcacccauugguucgugacacagcggaacuucuacgagccccagaucaucaccaccgacaacaccuucgugucuggcaacugcgacgucgugaucggcauugugaacaauaccguguacgacccucugcagcccgagcuggacagcuucaaagaggaacuggacaaguacuuuaagaaccacacaagccccgacguggaccugggcgauaucagcggaaucaaugccagcgucgugaacauccagaaagagaucgaccggcugaacgagguggccaagaaucugaacgagagccugaucgaccugcaagaacuggggaaguacgagcaguacaucaaguggcccugguacaucuggcugggcuuuaucgccggacugauugccaucgugauggucacaaucaugcuguguugcaugaccagcugcuguagcugccugaagggcuguuguagcuguggcagcugcugcaaguucgacgaggacgauucugagcccgugcugaagggcgugaaacugcacuacacaugaggacuagucccuguucccagagcccacuuuuuuuucuuuuuuugaaauaaaauagccugucuuucagaucucaaaggcucuuuucagagccaccaaaaaaaaaaaaaaaaaaaaaaaaaaaaaaaaaaaaaaaaaaaaaaaaaaaaaaaaaaaaaaaaaaaaaaaaaaaaaaaaaaaaaaaaaaaaaaaaaaaaa

SEQ ID NO: 23504 - RNA, 4094 nt, Artificial Sequence
  SARS-CoV-2/Wuhan/WIV05/2019__EPI_ISL_402128 spike protein mRNA gc mod (1-1273)(N501Y_D614G)
aggagagucccgcagucggcguccagcggcucugcuuguucgugugugugucguugcaggccuuauucaagcuuaccauguucguguuccuggugcugcugccucugguguccagccagugugugaaccugaccaccagaacacagcugccuccagccuacaccaacagcuuuaccagaggcguguacuaccccgacaagguguucagauccagcgugcugcacucuacccaggaccuguuccugccuuucuucagcaacgugaccugguuccacgccauccacguguccggcaccaauggcaccaagagauucgacaaccccgugcugcccuucaacgacgggguguacuuugccagcaccgagaaguccaacaucaucagaggcuggaucuucggcaccacacuggacagcaagacccagagccugcugaucgugaacaacgccaccaacguggucaucaaagugugcgaguuccaguucugcaacgaccccuuccugggcgucuacuaccacaagaacaacaagagcuggauggaaagcgaguuccggguguacagcagcgccaacaacugcaccuucgaguacgugucccagccuuuccugauggaccuggaaggcaagcagggcaacuucaagaaccugcgcgaguucguguuuaagaacaucgacggcuacuucaagaucuacagcaagcacaccccuaucaaccucgugcgggaucugccucagggcuucucugcucuggaaccccugguggaucugcccaucggcaucaacaucacccgguuucagacacugcuggcccugcacagaagcuaccugacaccuggcgauagcagcagcggauggacagcuggugccgccgcuuacuaugugggcuaccugcagccuagaaccuuccugcugaaguacaacgagaacggcaccaucaccgacgccguggauugugcucuggauccucugagcgagacaaagugcacccugaaguccuucaccguggaaaagggcaucuaccagaccagcaacuuccgggugcagcccaccgaauccaucgugcgguuccccaauaucaccaaucugugccccuucggcgagguguucaaugccaccagauucgccucuguguacgccuggaaccggaagcggaucagcaauugcguggccgacuacuccgugcuguacaacuccgccagcuucagcaccuucaagugcuacggcguguccccuaccaagcugaacgaccugugcuucacaaacguguacgccgacagcuucgugauccggggagaugaagugcggcagauugccccuggacagacaggcaagaucgccgacuacaacuacaagcugcccgacgacuucaccggcugugugauugccuggaacagcaacaaccuggacuccaaagucggcggcaacuacaauuaccuguaccggcuguuccggaaguccaaucugaagcccuucgagcgggacaucuccaccgagaucuaucaggccggcagcaccccuuguaacggcguggaaggcuucaacugcuacuucccacugcaguccuacggcuuucagcccacauacggcgugggcuaucagcccuacagagugguggugcugagcuucgaacugcugcaugccccugccacagugugcggcccuaagaaaagcaccaaucucgugaagaacaaaugcgugaacuucaacuucaacggccugaccggcaccggcgugcugacagagagcaacaagaaguuccugccauuccagcaguuuggccgggauaucgccgauaccacagacgccguuagagauccccagacacuggaaauccuggacaucaccccuugcagcuucggcggagugucugugaucaccccuggcaccaacaccagcaaucagguggcagugcuguaccagggcgugaacuguaccgaagugcccguggccauucacgccgaucagcugacaccuacauggcggguguacuccaccggcagcaauguguuucagaccagagccggcugucugaucggagccgagcacgugaacaauagcuacgagugcgacauccccaucggcgcuggaaucugcgccagcuaccagacacagacaaacagcccucggagagccagaagcguggccagccagagcaucauugccuacacaaugucucugggcgccgagaacagcguggccuacuccaacaacucuaucgcuauccccaccaacuucaccaucagcgugaccacagagauccugccuguguccaugaccaagaccagcguggacugcaccauguacaucugcggcgauuccaccgagugcuccaaccugcugcugcaguacggcagcuucugcacccagcugaauagagcccugacagggaucgccguggaacaggacaagaacacccaagagguguucgcccaagugaagcagaucuacaagaccccuccuaucaaggacuucggcggcuucaauuucagccagauucugcccgauccuagcaagcccagcaagcggagcuucaucgaggaccugcuguucaacaaagugacacuggccgacgccggcuucaucaagcaguauggcgauugucugggcgacauugccgccagggaucugauuugcgcccagaaguuuaacggacugacagugcugccuccucugcugaccgaugagaugaucgcccaguacacaucugcccugcuggccggcacaaucacaagcggcuggacauuuggagcaggcgccgcucugcagauccccuuugcuaugcagauggccuaccgguucaacggcaucggagugacccagaaugugcuguacgagaaccagaagcugaucgccaaccaguucaacagcgccaucggcaagauccaggacagccugagcagcacagcaagcgcccugggaaagcugcaggacguggucaaccagaaugcccaggcacugaacacccuggucaagcagcuguccuccaacuucggcgccaucagcucugugcugaacgauauccugagcagacuggacaaggucgaggccgaggugcagaucgacagacugaucacaggcagacugcagagccuccagacauacgugacccagcagcugaucagagccgccgagauuagagccucugccaaucuggccgccaccaagaugucugagugugugcugggccagagcaagagaguggacuuuugcggcaagggcuaccaccugaugagcuucccucagucugccccucacggcgugguguuucugcacgugacauaugugcccgcucaagagaagaauuucaccaccgcuccagccaucugccacgacggcaaagcccacuuuccuagagaaggcguguucguguccaacggcacccauugguucgugacacagcggaacuucuacgagccccagaucaucaccaccgacaacaccuucgugucuggcaacugcgacgucgugaucggcauugugaacaauaccguguacgacccucugcagcccgagcuggacagcuucaaagaggaacuggacaaguacuuuaagaaccacacaagccccgacguggaccugggcgauaucagcggaaucaaugccagcgucgugaacauccagaaagagaucgaccggcugaacgagguggccaagaaucugaacgagagccugaucgaccugcaagaacuggggaaguacgagcaguacaucaaguggcccugguacaucuggcugggcuuuaucgccggacugauugccaucgugauggucacaaucaugcuguguugcaugaccagcugcuguagcugccugaagggcuguuguagcuguggcagcugcugcaaguucgacgaggacgauucugagcccgugcugaagggcgugaaacugcacuacacaugaggacuagucccuguucccagagcccacuuuuuuuucuuuuuuugaaauaaaauagccugucuuucagaucucaaaggcucuuuucagagccaccaaaaaaaaaaaaaaaaaaaaaaaaaaaaaaaaaaaaaaaaaaaaaaaaaaaaaaaaaaaaaaaaaaaaaaaaaaaaaaaaaaaaaaaaaaaaaaaaaaaaa

SEQ ID NO: 23505 - RNA, 4088 nt, Artificial Sequence
  SARS-CoV-2/Wuhan/WIV05/2019__EPI_ISL_402128 spike protein mRNA gc mod (1-1273)(H69del_V70del_D614G)
aggagagucccgcagucggcguccagcggcucugcuuguucgugugugugucguugcaggccuuauucaagcuuaccauguucguguuccuggugcugcugccucugguguccagccagugugugaaccugaccaccagaacacagcugccuccagccuacaccaacagcuuuaccagaggcguguacuaccccgacaagguguucagauccagcgugcugcacucuacccaggaccuguuccugccuuucuucagcaacgugaccugguuccacgccaucuccggcaccaauggcaccaagagauucgacaaccccgugcugcccuucaacgacgggguguacuuugccagcaccgagaaguccaacaucaucagaggcuggaucuucggcaccacacuggacagcaagacccagagccugcugaucgugaacaacgccaccaacguggucaucaaagugugcgaguuccaguucugcaacgaccccuuccugggcgucuacuaccacaagaacaacaagagcuggauggaaagcgaguuccggguguacagcagcgccaacaacugcaccuucgaguacgugucccagccuuuccugauggaccuggaaggcaagcagggcaacuucaagaaccugcgcgaguucguguuuaagaacaucgacggcuacuucaagaucuacagcaagcacaccccuaucaaccucgugcgggaucugccucagggcuucucugcucuggaaccccugguggaucugcccaucggcaucaacaucacccgguuucagacacugcuggcccugcacagaagcuaccugacaccuggcgauagcagcagcggauggacagcuggugccgccgcuuacuaugugggcuaccugcagccuagaaccuuccugcugaaguacaacgagaacggcaccaucaccgacgccguggauugugcucuggauccucugagcgagacaaagugcacccugaaguccuucaccguggaaaagggcaucuaccagaccagcaacuuccgggugcagcccaccgaauccaucgugcgguuccccaauaucaccaaucugugccccuucggcgagguguucaaugccaccagauucgccucuguguacgccuggaaccggaagcggaucagcaauugcguggccgacuacuccgugcuguacaacuccgccagcuucagcaccuucaagugcuacggcguguccccuaccaagcugaacgaccugugcuucacaaacguguacgccgacagcuucgugauccggggagaugaagugcggcagauugccccuggacagacaggcaagaucgccgacuacaacuacaagcugcccgacgacuucaccggcugugugauugccuggaacagcaacaaccuggacuccaaagucggcggcaacuacaauuaccuguaccggcuguuccggaaguccaaucugaagcccuucgagcgggacaucuccaccgagaucuaucaggccggcagcaccccuuguaacggcguggaaggcuucaacugcuacuucccacugcaguccuacggcuuucagcccacaaauggcgugggcuaucagcccuacagagugguggugcugagcuucgaacugcugcaugccccugccacagugugcggcccuaagaaaagcaccaaucucgugaagaacaaaugcgugaacuucaacuucaacggccugaccggcaccggcgugcugacagagagcaacaagaaguuccugccauuccagcaguuuggccgggauaucgccgauaccacagacgccguuagagauccccagacacuggaaauccuggacaucaccccuugcagcuucggcggagugucugugaucaccccuggcaccaacaccagcaaucagguggcagugcuguaccagggcgugaacuguaccgaagugcccguggccauucacgccgaucagcugacaccuacauggcggguguacuccaccggcagcaauguguuucagaccagagccggcugucugaucggagccgagcacgugaacaauagcuacgagugcgacauccccaucggcgcuggaaucugcgccagcuaccagacacagacaaacagcccucggagagccagaagcguggccagccagagcaucauugccuacacaaugucucugggcgccgagaacagcguggccuacuccaacaacucuaucgcuauccccaccaacuucaccaucagcgugaccacagagauccugccuguguccaugaccaagaccagcguggacugcaccauguacaucugcggcgauuccaccgagugcuccaaccugcugcugcaguacggcagcuucugcacccagcugaauagagcccugacagggaucgccguggaacaggacaagaacacccaagagguguucgcccaagugaagcagaucuacaagaccccuccuaucaaggacuucggcggcuucaauuucagccagauucugcccgauccuagcaagcccagcaagcggagcuucaucgaggaccugcuguucaacaaagugacacuggccgacgccggcuucaucaagcaguauggcgauugucugggcgacauugccgccagggaucugauuugcgcccagaaguuuaacggacugacagugcugccuccucugcugaccgaugagaugaucgcccaguacacaucugcccugcuggccggcacaaucacaagcggcuggacauuuggagcaggcgccgcucugcagauccccuuugcuaugcagauggccuaccgguucaacggcaucggagugacccagaaugugcuguacgagaaccagaagcugaucgccaaccaguucaacagcgccaucggcaagauccaggacagccugagcagcacagcaagcgcccugggaaagcugcaggacguggucaaccagaaugcccaggcacugaacacccuggucaagcagcuguccuccaacuucggcgccaucagcucugugcugaacgauauccugagcagacuggacaaggucgaggccgaggugcagaucgacagacugaucacaggcagacugcagagccuccagacauacgugacccagcagcugaucagagccgccgagauuagagccucugccaaucuggccgccaccaagaugucugagugugugcugggccagagcaagagaguggacuuuugcggcaagggcuaccaccugaugagcuucccucagucugccccucacggcgugguguuucugcacgugacauaugugcccgcucaagagaagaauuucaccaccgcuccagccaucugccacgacggcaaagcccacuuuccuagagaaggcguguucguguccaacggcacccauugguucgugacacagcggaacuucuacgagccccagaucaucaccaccgacaacaccuucgugucuggcaacugcgacgucgugaucggcauugugaacaauaccguguacgacccucugcagcccgagcuggacagcuucaaagaggaacuggacaaguacuuuaagaaccacacaagccccgacguggaccugggcgauaucagcggaaucaaugccagcgucgugaacauccagaaagagaucgaccggcugaacgagguggccaagaaucugaacgagagccugaucgaccugcaagaacuggggaaguacgagcaguacaucaaguggcccugguacaucuggcugggcuuuaucgccggacugauugccaucgugauggucacaaucaugcuguguugcaugaccagcugcuguagcugccugaagggcuguuguagcuguggcagcugcugcaaguucgacgaggacgauucugagcccgugcugaagggcgugaaacugcacuacacaugaggacuagucccuguucccagagcccacuuuuuuuucuuuuuuugaaauaaaauagccugucuuucagaucucaaaggcucuuuucagagccaccaaaaaaaaaaaaaaaaaaaaaaaaaaaaaaaaaaaaaaaaaaaaaaaaaaaaaaaaaaaaaaaaaaaaaaaaaaaaaaaaaaaaaaaaaaaaaaaaaaaaa

SEQ ID NO: 23506 - RNA, 4094 nt, Artificial Sequence
  SARS-CoV-2/Wuhan/WIV05/2019__EPI_ISL_402128 spike protein mRNA gc mod (1-1273)(Y453F_D614G)
aggagagucccgcagucggcguccagcggcucugcuuguucgugugugugucguugcaggccuuauucaagcuuaccauguucguguuccuggugcugcugccucugguguccagccagugugugaaccugaccaccagaacacagcugccuccagccuacaccaacagcuuuaccagaggcguguacuaccccgacaagguguucagauccagcgugcugcacucuacccaggaccuguuccugccuuucuucagcaacgugaccugguuccacgccauccacguguccggcaccaauggcaccaagagauucgacaaccccgugcugcccuucaacgacgggguguacuuugccagcaccgagaaguccaacaucaucagaggcuggaucuucggcaccacacuggacagcaagacccagagccugcugaucgugaacaacgccaccaacguggucaucaaagugugcgaguuccaguucugcaacgaccccuuccugggcgucuacuaccacaagaacaacaagagcuggauggaaagcgaguuccggguguacagcagcgccaacaacugcaccuucgaguacgugucccagccuuuccugauggaccuggaaggcaagcagggcaacuucaagaaccugcgcgaguucguguuuaagaacaucgacggcuacuucaagaucuacagcaagcacaccccuaucaaccucgugcgggaucugccucagggcuucucugcucuggaaccccugguggaucugcccaucggcaucaacaucacccgguuucagacacugcuggcccugcacagaagcuaccugacaccuggcgauagcagcagcggauggacagcuggugccgccgcuuacuaugugggcuaccugcagccuagaaccuuccugcugaaguacaacgagaacggcaccaucaccgacgccguggauugugcucuggauccucugagcgagacaaagugcacccugaaguccuucaccguggaaaagggcaucuaccagaccagcaacuuccgggugcagcccaccgaauccaucgugcgguuccccaauaucaccaaucugugccccuucggcgagguguucaaugccaccagauucgccucuguguacgccuggaaccggaagcggaucagcaauugcguggccgacuacuccgugcuguacaacuccgccagcuucagcaccuucaagugcuacggcguguccccuaccaagcugaacgaccugugcuucacaaacguguacgccgacagcuucgugauccggggagaugaagugcggcagauugccccuggacagacaggcaagaucgccgacuacaacuacaagcugcccgacgacuucaccggcugugugauugccuggaacagcaacaaccuggacuccaaagucggcggcaacuacaauuaccuguuccggcuguuccggaaguccaaucugaagcccuucgagcgggacaucuccaccgagaucuaucaggccggcagcaccccuuguaacggcguggaaggcuucaacugcuacuucccacugcaguccuacggcuuucagcccacaaauggcgugggcuaucagcccuacagagugguggugcugagcuucgaacugcugcaugccccugccacagugugcggcccuaagaaaagcaccaaucucgugaagaacaaaugcgugaacuucaacuucaacggccugaccggcaccggcgugcugacagagagcaacaagaaguuccugccauuccagcaguuuggccgggauaucgccgauaccacagacgccguuagagauccccagacacuggaaauccuggacaucaccccuugcagcuucggcggagugucugugaucaccccuggcaccaacaccagcaaucagguggcagugcuguaccagggcgugaacuguaccgaagugcccguggccauucacgccgaucagcugacaccuacauggcggguguacuccaccggcagcaauguguuucagaccagagccggcugucugaucggagccgagcacgugaacaauagcuacgagugcgacauccccaucggcgcuggaaucugcgccagcuaccagacacagacaaacagcccucggagagccagaagcguggccagccagagcaucauugccuacacaaugucucugggcgccgagaacagcguggccuacuccaacaacucuaucgcuauccccaccaacuucaccaucagcgugaccacagagauccugccuguguccaugaccaagaccagcguggacugcaccauguacaucugcggcgauuccaccgagugcuccaaccugcugcugcaguacggcagcuucugcacccagcugaauagagcccugacagggaucgccguggaacaggacaagaacacccaagagguguucgcccaagugaagcagaucuacaagaccccuccuaucaaggacuucggcggcuucaauuucagccagauucugcccgauccuagcaagcccagcaagcggagcuucaucgaggaccugcuguucaacaaagugacacuggccgacgccggcuucaucaagcaguauggcgauugucugggcgacauugccgccagggaucugauuugcgcccagaaguuuaacggacugacagugcugccuccucugcugaccgaugagaugaucgcccaguacacaucugcccugcuggccggcacaaucacaagcggcuggacauuuggagcaggcgccgcucugcagauccccuuugcuaugcagauggccuaccgguucaacggcaucggagugacccagaaugugcuguacgagaaccagaagcugaucgccaaccaguucaacagcgccaucggcaagauccaggacagccugagcagcacagcaagcgcccugggaaagcugcaggacguggucaaccagaaugcccaggcacugaacacccuggucaagcagcuguccuccaacuucggcgccaucagcucugugcugaacgauauccugagcagacuggacaaggucgaggccgaggugcagaucgacagacugaucacaggcagacugcagagccuccagacauacgugacccagcagcugaucagagccgccgagauuagagccucugccaaucuggccgccaccaagaugucugagugugugcugggccagagcaagagaguggacuuuugcggcaagggcuaccaccugaugagcuucccucagucugccccucacggcgugguguuucugcacgugacauaugugcccgcucaagagaagaauuucaccaccgcuccagccaucugccacgacggcaaagcccacuuuccuagagaaggcguguucguguccaacggcacccauugguucgugacacagcggaacuucuacgagccccagaucaucaccaccgacaacaccuucgugucuggcaacugcgacgucgugaucggcauugugaacaauaccguguacgacccucugcagcccgagcuggacagcuucaaagaggaacuggacaaguacuuuaagaaccacacaagccccgacguggaccugggcgauaucagcggaaucaaugccagcgucgugaacauccagaaagagaucgaccggcugaacgagguggccaagaaucugaacgagagccugaucgaccugcaagaacuggggaaguacgagcaguacaucaaguggcccugguacaucuggcugggcuuuaucgccggacugauugccaucgugauggucacaaucaugcuguguugcaugaccagcugcuguagcugccugaagggcuguuguagcuguggcagcugcugcaaguucgacgaggacgauucugagcccgugcugaagggcgugaaacugcacuacacaugaggacuagucccuguucccagagcccacuuuuuuuucuuuuuuugaaauaaaauagccugucuuucagaucucaaaggcucuuuucagagccaccaaaaaaaaaaaaaaaaaaaaaaaaaaaaaaaaaaaaaaaaaaaaaaaaaaaaaaaaaaaaaaaaaaaaaaaaaaaaaaaaaaaaaaaaaaaaaaaaaaaaa

SEQ ID NO: 23507 - RNA, 4094 nt, Artificial Sequence
  SARS-CoV-2/Wuhan/WIV05/2019__EPI_ISL_402128 spike protein mRNA gc mod (1-1273)(D614G_I692V)
aggagagucccgcagucggcguccagcggcucugcuuguucgugugugugucguugcaggccuuauucaagcuuaccauguucguguuccuggugcugcugccucugguguccagccagugugugaaccugaccaccagaacacagcugccuccagccuacaccaacagcuuuaccagaggcguguacuaccccgacaagguguucagauccagcgugcugcacucuacccaggaccuguuccugccuuucuucagcaacgugaccugguuccacgccauccacguguccggcaccaauggcaccaagagauucgacaaccccgugcugcccuucaacgacgggguguacuuugccagcaccgagaaguccaacaucaucagaggcuggaucuucggcaccacacuggacagcaagacccagagccugcugaucgugaacaacgccaccaacguggucaucaaagugugcgaguuccaguucugcaacgaccccuuccugggcgucuacuaccacaagaacaacaagagcuggauggaaagcgaguuccggguguacagcagcgccaacaacugcaccuucgaguacgugucccagccuuuccugauggaccuggaaggcaagcagggcaacuucaagaaccugcgcgaguucguguuuaagaacaucgacggcuacuucaagaucuacagcaagcacaccccuaucaaccucgugcgggaucugccucagggcuucucugcucuggaaccccugguggaucugcccaucggcaucaacaucacccgguuucagacacugcuggcccugcacagaagcuaccugacaccuggcgauagcagcagcggauggacagcuggugccgccgcuuacuaugugggcuaccugcagccuagaaccuuccugcugaaguacaacgagaacggcaccaucaccgacgccguggauugugcucuggauccucugagcgagacaaagugcacccugaaguccuucaccguggaaaagggcaucuaccagaccagcaacuuccgggugcagcccaccgaauccaucgugcgguuccccaauaucaccaaucugugccccuucggcgagguguucaaugccaccagauucgccucuguguacgccuggaaccggaagcggaucagcaauugcguggccgacuacuccgugcuguacaacuccgccagcuucagcaccuucaagugcuacggcguguccccuaccaagcugaacgaccugugcuucacaaacguguacgccgacagcuucgugauccggggagaugaagugcggcagauugccccuggacagacaggcaagaucgccgacuacaacuacaagcugcccgacgacuucaccggcugugugauugccuggaacagcaacaaccuggacuccaaagucggcggcaacuacaauuaccuguaccggcuguuccggaaguccaaucugaagcccuucgagcgggacaucuccaccgagaucuaucaggccggcagcaccccuuguaacggcguggaaggcuucaacugcuacuucccacugcaguccuacggcuuucagcccacaaauggcgugggcuaucagcccuacagagugguggugcugagcuucgaacugcugcaugccccugccacagugugcggcccuaagaaaagcaccaaucucgugaagaacaaaugcgugaacuucaacuucaacggccugaccggcaccggcgugcugacagagagcaacaagaaguuccugccauuccagcaguuuggccgggauaucgccgauaccacagacgccguuagagauccccagacacuggaaauccuggacaucaccccuugcagcuucggcggagugucugugaucaccccuggcaccaacaccagcaaucagguggcagugcuguaccagggcgugaacuguaccgaagugcccguggccauucacgccgaucagcugacaccuacauggcggguguacuccaccggcagcaauguguuucagaccagagccggcugucugaucggagccgagcacgugaacaauagcuacgagugcgacauccccaucggcgcuggaaucugcgccagcuaccagacacagacaaacagcccucggagagccagaagcguggccagccagagcgugauugccuacacaaugucucugggcgccgagaacagcguggccuacuccaacaacucuaucgcuauccccaccaacuucaccaucagcgugaccacagagauccugccuguguccaugaccaagaccagcguggacugcaccauguacaucugcggcgauuccaccgagugcuccaaccugcugcugcaguacggcagcuucugcacccagcugaauagagcccugacagggaucgccguggaacaggacaagaacacccaagagguguucgcccaagugaagcagaucuacaagaccccuccuaucaaggacuucggcggcuucaauuucagccagauucugcccgauccuagcaagcccagcaagcggagcuucaucgaggaccugcuguucaacaaagugacacuggccgacgccggcuucaucaagcaguauggcgauugucugggcgacauugccgccagggaucugauuugcgcccagaaguuuaacggacugacagugcugccuccucugcugaccgaugagaugaucgcccaguacacaucugcccugcuggccggcacaaucacaagcggcuggacauuuggagcaggcgccgcucugcagauccccuuugcuaugcagauggccuaccgguucaacggcaucggagugacccagaaugugcuguacgagaaccagaagcugaucgccaaccaguucaacagcgccaucggcaagauccaggacagccugagcagcacagcaagcgcccugggaaagcugcaggacguggucaaccagaaugcccaggcacugaacacccuggucaagcagcuguccuccaacuucggcgccaucagcucugugcugaacgauauccugagcagacuggacaaggucgaggccgaggugcagaucgacagacugaucacaggcagacugcagagccuccagacauacgugacccagcagcugaucagagccgccgagauuagagccucugccaaucuggccgccaccaagaugucugagugugugcugggccagagcaagagaguggacuuuugcggcaagggcuaccaccugaugagcuucccucagucugccccucacggcgugguguuucugcacgugacauaugugcccgcucaagagaagaauuucaccaccgcuccagccaucugccacgacggcaaagcccacuuuccuagagaaggcguguucguguccaacggcacccauugguucgugacacagcggaacuucuacgagccccagaucaucaccaccgacaacaccuucgugucuggcaacugcgacgucgugaucggcauugugaacaauaccguguacgacccucugcagcccgagcuggacagcuucaaagaggaacuggacaaguacuuuaagaaccacacaagccccgacguggaccugggcgauaucagcggaaucaaugccagcgucgugaacauccagaaagagaucgaccggcugaacgagguggccaagaaucugaacgagagccugaucgaccugcaagaacuggggaaguacgagcaguacaucaaguggcccugguacaucuggcugggcuuuaucgccggacugauugccaucgugauggucacaaucaugcuguguugcaugaccagcugcuguagcugccugaagggcuguuguagcuguggcagcugcugcaaguucgacgaggacgauucugagcccgugcugaagggcgugaaacugcacuacacaugaggacuagucccuguucccagagcccacuuuuuuuucuuuuuuugaaauaaaauagccugucuuucagaucucaaaggcucuuuucagagccaccaaaaaaaaaaaaaaaaaaaaaaaaaaaaaaaaaaaaaaaaaaaaaaaaaaaaaaaaaaaaaaaaaaaaaaaaaaaaaaaaaaaaaaaaaaaaaaaaaaaaa

SEQ ID NO: 23508 - RNA, 4094 nt, Artificial Sequence
  SARS-CoV-2/Wuhan/WIV05/2019__EPI_ISL_402128 spike protein mRNA gc mod (1-1273)(D614G_M1229I)
aggagagucccgcagucggcguccagcggcucugcuuguucgugugugugucguugcaggccuuauucaagcuuaccauguucguguuccuggugcugcugccucugguguccagccagugugugaaccugaccaccagaacacagcugccuccagccuacaccaacagcuuuaccagaggcguguacuaccccgacaagguguucagauccagcgugcugcacucuacccaggaccuguuccugccuuucuucagcaacgugaccugguuccacgccauccacguguccggcaccaauggcaccaagagauucgacaaccccgugcugcccuucaacgacgggguguacuuugccagcaccgagaaguccaacaucaucagaggcuggaucuucggcaccacacuggacagcaagacccagagccugcugaucgugaacaacgccaccaacguggucaucaaagugugcgaguuccaguucugcaacgaccccuuccugggcgucuacuaccacaagaacaacaagagcuggauggaaagcgaguuccggguguacagcagcgccaacaacugcaccuucgaguacgugucccagccuuuccugauggaccuggaaggcaagcagggcaacuucaagaaccugcgcgaguucguguuuaagaacaucgacggcuacuucaagaucuacagcaagcacaccccuaucaaccucgugcgggaucugccucagggcuucucugcucuggaaccccugguggaucugcccaucggcaucaacaucacccgguuucagacacugcuggcccugcacagaagcuaccugacaccuggcgauagcagcagcggauggacagcuggugccgccgcuuacuaugugggcuaccugcagccuagaaccuuccugcugaaguacaacgagaacggcaccaucaccgacgccguggauugugcucuggauccucugagcgagacaaagugcacccugaaguccuucaccguggaaaagggcaucuaccagaccagcaacuuccgggugcagcccaccgaauccaucgugcgguuccccaauaucaccaaucugugccccuucggcgagguguucaaugccaccagauucgccucuguguacgccuggaaccggaagcggaucagcaauugcguggccgacuacuccgugcuguacaacuccgccagcuucagcaccuucaagugcuacggcguguccccuaccaagcugaacgaccugugcuucacaaacguguacgccgacagcuucgugauccggggagaugaagugcggcagauugccccuggacagacaggcaagaucgccgacuacaacuacaagcugcccgacgacuucaccggcugugugauugccuggaacagcaacaaccuggacuccaaagucggcggcaacuacaauuaccuguaccggcuguuccggaaguccaaucugaagcccuucgagcgggacaucuccaccgagaucuaucaggccggcagcaccccuuguaacggcguggaaggcuucaacugcuacuucccacugcaguccuacggcuuucagcccacaaauggcgugggcuaucagcccuacagagugguggugcugagcuucgaacugcugcaugccccugccacagugugcggcccuaagaaaagcaccaaucucgugaagaacaaaugcgugaacuucaacuucaacggccugaccggcaccggcgugcugacagagagcaacaagaaguuccugccauuccagcaguuuggccgggauaucgccgauaccacagacgccguuagagauccccagacacuggaaauccuggacaucaccccuugcagcuucggcggagugucugugaucaccccuggcaccaacaccagcaaucagguggcagugcuguaccagggcgugaacuguaccgaagugcccguggccauucacgccgaucagcugacaccuacauggcggguguacuccaccggcagcaauguguuucagaccagagccggcugucugaucggagccgagcacgugaacaauagcuacgagugcgacauccccaucggcgcuggaaucugcgccagcuaccagacacagacaaacagcccucggagagccagaagcguggccagccagagcaucauugccuacacaaugucucugggcgccgagaacagcguggccuacuccaacaacucuaucgcuauccccaccaacuucaccaucagcgugaccacagagauccugccuguguccaugaccaagaccagcguggacugcaccauguacaucugcggcgauuccaccgagugcuccaaccugcugcugcaguacggcagcuucugcacccagcugaauagagcccugacagggaucgccguggaacaggacaagaacacccaagagguguucgcccaagugaagcagaucuacaagaccccuccuaucaaggacuucggcggcuucaauuucagccagauucugcccgauccuagcaagcccagcaagcggagcuucaucgaggaccugcuguucaacaaagugacacuggccgacgccggcuucaucaagcaguauggcgauugucugggcgacauugccgccagggaucugauuugcgcccagaaguuuaacggacugacagugcugccuccucugcugaccgaugagaugaucgcccaguacacaucugcccugcuggccggcacaaucacaagcggcuggacauuuggagcaggcgccgcucugcagauccccuuugcuaugcagauggccuaccgguucaacggcaucggagugacccagaaugugcuguacgagaaccagaagcugaucgccaaccaguucaacagcgccaucggcaagauccaggacagccugagcagcacagcaagcgcccugggaaagcugcaggacguggucaaccagaaugcccaggcacugaacacccuggucaagcagcuguccuccaacuucggcgccaucagcucugugcugaacgauauccugagcagacuggacaaggucgaggccgaggugcagaucgacagacugaucacaggcagacugcagagccuccagacauacgugacccagcagcugaucagagccgccgagauuagagccucugccaaucuggccgccaccaagaugucugagugugugcugggccagagcaagagaguggacuuuugcggcaagggcuaccaccugaugagcuucccucagucugccccucacggcgugguguuucugcacgugacauaugugcccgcucaagagaagaauuucaccaccgcuccagccaucugccacgacggcaaagcccacuuuccuagagaaggcguguucguguccaacggcacccauugguucgugacacagcggaacuucuacgagccccagaucaucaccaccgacaacaccuucgugucuggcaacugcgacgucgugaucggcauugugaacaauaccguguacgacccucugcagcccgagcuggacagcuucaaagaggaacuggacaaguacuuuaagaaccacacaagccccgacguggaccugggcgauaucagcggaaucaaugccagcgucgugaacauccagaaagagaucgaccggcugaacgagguggccaagaaucugaacgagagccugaucgaccugcaagaacuggggaaguacgagcaguacaucaaguggcccugguacaucuggcugggcuuuaucgccggacugauugccaucgugaucgucacaaucaugcuguguugcaugaccagcugcuguagcugccugaagggcuguuguagcuguggcagcugcugcaaguucgacgaggacgauucugagcccgugcugaagggcgugaaacugcacuacacaugaggacuagucccuguucccagagcccacuuuuuuuucuuuuuuugaaauaaaauagccugucuuucagaucucaaaggcucuuuucagagccaccaaaaaaaaaaaaaaaaaaaaaaaaaaaaaaaaaaaaaaaaaaaaaaaaaaaaaaaaaaaaaaaaaaaaaaaaaaaaaaaaaaaaaaaaaaaaaaaaaaaaa

SEQ ID NO: 23509 - RNA, 4088 nt, Artificial Sequence
  SARS-CoV-2/Wuhan/WIV05/2019__EPI_ISL_402128 spike protein mRNA gc mod (1-1273)(H69del_V70del_A222V_Y453F_S477N_D614G_I692V)
aggagagucccgcagucggcguccagcggcucugcuuguucgugugugugucguugcaggccuuauucaagcuuaccauguucguguuccuggugcugcugccucugguguccagccagugugugaaccugaccaccagaacacagcugccuccagccuacaccaacagcuuuaccagaggcguguacuaccccgacaagguguucagauccagcgugcugcacucuacccaggaccuguuccugccuuucuucagcaacgugaccugguuccacgccaucuccggcaccaauggcaccaagagauucgacaaccccgugcugcccuucaacgacgggguguacuuugccagcaccgagaaguccaacaucaucagaggcuggaucuucggcaccacacuggacagcaagacccagagccugcugaucgugaacaacgccaccaacguggucaucaaagugugcgaguuccaguucugcaacgaccccuuccugggcgucuacuaccacaagaacaacaagagcuggauggaaagcgaguuccggguguacagcagcgccaacaacugcaccuucgaguacgugucccagccuuuccugauggaccuggaaggcaagcagggcaacuucaagaaccugcgcgaguucguguuuaagaacaucgacggcuacuucaagaucuacagcaagcacaccccuaucaaccucgugcgggaucugccucagggcuucucugugcuggaaccccugguggaucugcccaucggcaucaacaucacccgguuucagacacugcuggcccugcacagaagcuaccugacaccuggcgauagcagcagcggauggacagcuggugccgccgcuuacuaugugggcuaccugcagccuagaaccuuccugcugaaguacaacgagaacggcaccaucaccgacgccguggauugugcucuggauccucugagcgagacaaagugcacccugaaguccuucaccguggaaaagggcaucuaccagaccagcaacuuccgggugcagcccaccgaauccaucgugcgguuccccaauaucaccaaucugugccccuucggcgagguguucaaugccaccagauucgccucuguguacgccuggaaccggaagcggaucagcaauugcguggccgacuacuccgugcuguacaacuccgccagcuucagcaccuucaagugcuacggcguguccccuaccaagcugaacgaccugugcuucacaaacguguacgccgacagcuucgugauccggggagaugaagugcggcagauugccccuggacagacaggcaagaucgccgacuacaacuacaagcugcccgacgacuucaccggcugugugauugccuggaacagcaacaaccuggacuccaaagucggcggcaacuacaauuaccuguuccggcuguuccggaaguccaaucugaagcccuucgagcgggacaucuccaccgagaucuaucaggccggcaacaccccuuguaacggcguggaaggcuucaacugcuacuucccacugcaguccuacggcuuucagcccacaaauggcgugggcuaucagcccuacagagugguggugcugagcuucgaacugcugcaugccccugccacagugugcggcccuaagaaaagcaccaaucucgugaagaacaaaugcgugaacuucaacuucaacggccugaccggcaccggcgugcugacagagagcaacaagaaguuccugccauuccagcaguuuggccgggauaucgccgauaccacagacgccguuagagauccccagacacuggaaauccuggacaucaccccuugcagcuucggcggagugucugugaucaccccuggcaccaacaccagcaaucagguggcagugcuguaccagggcgugaacuguaccgaagugcccguggccauucacgccgaucagcugacaccuacauggcggguguacuccaccggcagcaauguguuucagaccagagccggcugucugaucggagccgagcacgugaacaauagcuacgagugcgacauccccaucggcgcuggaaucugcgccagcuaccagacacagacaaacagcccucggagagccagaagcguggccagccagagcgugauugccuacacaaugucucugggcgccgagaacagcguggccuacuccaacaacucuaucgcuauccccaccaacuucaccaucagcgugaccacagagauccugccuguguccaugaccaagaccagcguggacugcaccauguacaucugcggcgauuccaccgagugcuccaaccugcugcugcaguacggcagcuucugcacccagcugaauagagcccugacagggaucgccguggaacaggacaagaacacccaagagguguucgcccaagugaagcagaucuacaagaccccuccuaucaaggacuucggcggcuucaauuucagccagauucugcccgauccuagcaagcccagcaagcggagcuucaucgaggaccugcuguucaacaaagugacacuggccgacgccggcuucaucaagcaguauggcgauugucugggcgacauugccgccagggaucugauuugcgcccagaaguuuaacggacugacagugcugccuccucugcugaccgaugagaugaucgcccaguacacaucugcccugcuggccggcacaaucacaagcggcuggacauuuggagcaggcgccgcucugcagauccccuuugcuaugcagauggccuaccgguucaacggcaucggagugacccagaaugugcuguacgagaaccagaagcugaucgccaaccaguucaacagcgccaucggcaagauccaggacagccugagcagcacagcaagcgcccugggaaagcugcaggacguggucaaccagaaugcccaggcacugaacacccuggucaagcagcuguccuccaacuucggcgccaucagcucugugcugaacgauauccugagcagacuggacaaggucgaggccgaggugcagaucgacagacugaucacaggcagacugcagagccuccagacauacgugacccagcagcugaucagagccgccgagauuagagccucugccaaucuggccgccaccaagaugucugagugugugcugggccagagcaagagaguggacuuuugcggcaagggcuaccaccugaugagcuucccucagucugccccucacggcgugguguuucugcacgugacauaugugcccgcucaagagaagaauuucaccaccgcuccagccaucugccacgacggcaaagcccacuuuccuagagaaggcguguucguguccaacggcacccauugguucgugacacagcggaacuucuacgagccccagaucaucaccaccgacaacaccuucgugucuggcaacugcgacgucgugaucggcauugugaacaauaccguguacgacccucugcagcccgagcuggacagcuucaaagaggaacuggacaaguacuuuaagaaccacacaagccccgacguggaccugggcgauaucagcggaaucaaugccagcgucgugaacauccagaaagagaucgaccggcugaacgagguggccaagaaucugaacgagagccugaucgaccugcaagaacuggggaaguacgagcaguacaucaaguggcccugguacaucuggcugggcuuuaucgccggacugauugccaucgugauggucacaaucaugcuguguugcaugaccagcugcuguagcugccugaagggcuguuguagcuguggcagcugcugcaaguucgacgaggacgauucugagcccgugcugaagggcgugaaacugcacuacacaugaggacuagucccuguucccagagcccacuuuuuuuucuuuuuuugaaauaaaauagccugucuuucagaucucaaaggcucuuuucagagccaccaaaaaaaaaaaaaaaaaaaaaaaaaaaaaaaaaaaaaaaaaaaaaaaaaaaaaaaaaaaaaaaaaaaaaaaaaaaaaaaaaaaaaaaaaaaaaaaaaaaaa

SEQ ID NO: 23510 - RNA, 4088 nt, Artificial Sequence
  SARS-CoV-2/Wuhan/WIV05/2019__EPI_ISL_402128 spike protein mRNA gc mod (1-1273)(H69del_V70del_Y453F_D614G_I692V_M1229I)
aggagagucccgcagucggcguccagcggcucugcuuguucgugugugugucguugcaggccuuauucaagcuuaccauguucguguuccuggugcugcugccucugguguccagccagugugugaaccugaccaccagaacacagcugccuccagccuacaccaacagcuuuaccagaggcguguacuaccccgacaagguguucagauccagcgugcugcacucuacccaggaccuguuccugccuuucuucagcaacgugaccugguuccacgccaucuccggcaccaauggcaccaagagauucgacaaccccgugcugcccuucaacgacgggguguacuuugccagcaccgagaaguccaacaucaucagaggcuggaucuucggcaccacacuggacagcaagacccagagccugcugaucgugaacaacgccaccaacguggucaucaaagugugcgaguuccaguucugcaacgaccccuuccugggcgucuacuaccacaagaacaacaagagcuggauggaaagcgaguuccggguguacagcagcgccaacaacugcaccuucgaguacgugucccagccuuuccugauggaccuggaaggcaagcagggcaacuucaagaaccugcgcgaguucguguuuaagaacaucgacggcuacuucaagaucuacagcaagcacaccccuaucaaccucgugcgggaucugccucagggcuucucugcucuggaaccccugguggaucugcccaucggcaucaacaucacccgguuucagacacugcuggcccugcacagaagcuaccugacaccuggcgauagcagcagcggauggacagcuggugccgccgcuuacuaugugggcuaccugcagccuagaaccuuccugcugaaguacaacgagaacggcaccaucaccgacgccguggauugugcucuggauccucugagcgagacaaagugcacccugaaguccuucaccguggaaaagggcaucuaccagaccagcaacuuccgggugcagcccaccgaauccaucgugcgguuccccaauaucaccaaucugugccccuucggcgagguguucaaugccaccagauucgccucuguguacgccuggaaccggaagcggaucagcaauugcguggccgacuacuccgugcuguacaacuccgccagcuucagcaccuucaagugcuacggcguguccccuaccaagcugaacgaccugugcuucacaaacguguacgccgacagcuucgugauccggggagaugaagugcggcagauugccccuggacagacaggcaagaucgccgacuacaacuacaagcugcccgacgacuucaccggcugugugauugccuggaacagcaacaaccuggacuccaaagucggcggcaacuacaauuaccuguuccggcuguuccggaaguccaaucugaagcccuucgagcgggacaucuccaccgagaucuaucaggccggcagcaccccuuguaacggcguggaaggcuucaacugcuacuucccacugcaguccuacggcuuucagcccacaaauggcgugggcuaucagcccuacagagugguggugcugagcuucgaacugcugcaugccccugccacagugugcggcccuaagaaaagcaccaaucucgugaagaacaaaugcgugaacuucaacuucaacggccugaccggcaccggcgugcugacagagagcaacaagaaguuccugccauuccagcaguuuggccgggauaucgccgauaccacagacgccguuagagauccccagacacuggaaauccuggacaucaccccuugcagcuucggcggagugucugugaucaccccuggcaccaacaccagcaaucagguggcagugcuguaccagggcgugaacuguaccgaagugcccguggccauucacgccgaucagcugacaccuacauggcggguguacuccaccggcagcaauguguuucagaccagagccggcugucugaucggagccgagcacgugaacaauagcuacgagugcgacauccccaucggcgcuggaaucugcgccagcuaccagacacagacaaacagcccucggagagccagaagcguggccagccagagcgugauugccuacacaaugucucugggcgccgagaacagcguggccuacuccaacaacucuaucgcuauccccaccaacuucaccaucagcgugaccacagagauccugccuguguccaugaccaagaccagcguggacugcaccauguacaucugcggcgauuccaccgagugcuccaaccugcugcugcaguacggcagcuucugcacccagcugaauagagcccugacagggaucgccguggaacaggacaagaacacccaagagguguucgcccaagugaagcagaucuacaagaccccuccuaucaaggacuucggcggcuucaauuucagccagauucugcccgauccuagcaagcccagcaagcggagcuucaucgaggaccugcuguucaacaaagugacacuggccgacgccggcuucaucaagcaguauggcgauugucugggcgacauugccgccagggaucugauuugcgcccagaaguuuaacggacugacagugcugccuccucugcugaccgaugagaugaucgcccaguacacaucugcccugcuggccggcacaaucacaagcggcuggacauuuggagcaggcgccgcucugcagauccccuuugcuaugcagauggccuaccgguucaacggcaucggagugacccagaaugugcuguacgagaaccagaagcugaucgccaaccaguucaacagcgccaucggcaagauccaggacagccugagcagcacagcaagcgcccugggaaagcugcaggacguggucaaccagaaugcccaggcacugaacacccuggucaagcagcuguccuccaacuucggcgccaucagcucugugcugaacgauauccugagcagacuggacaaggucgaggccgaggugcagaucgacagacugaucacaggcagacugcagagccuccagacauacgugacccagcagcugaucagagccgccgagauuagagccucugccaaucuggccgccaccaagaugucugagugugugcugggccagagcaagagaguggacuuuugcggcaagggcuaccaccugaugagcuucccucagucugccccucacggcgugguguuucugcacgugacauaugugcccgcucaagagaagaauuucaccaccgcuccagccaucugccacgacggcaaagcccacuuuccuagagaaggcguguucguguccaacggcacccauugguucgugacacagcggaacuucuacgagccccagaucaucaccaccgacaacaccuucgugucuggcaacugcgacgucgugaucggcauugugaacaauaccguguacgacccucugcagcccgagcuggacagcuucaaagaggaacuggacaaguacuuuaagaaccacacaagccccgacguggaccugggcgauaucagcggaaucaaugccagcgucgugaacauccagaaagagaucgaccggcugaacgagguggccaagaaucugaacgagagccugaucgaccugcaagaacuggggaaguacgagcaguacaucaaguggcccugguacaucuggcugggcuuuaucgccggacugauugccaucgugaucgucacaaucaugcuguguugcaugaccagcugcuguagcugccugaagggcuguuguagcuguggcagcugcugcaaguucgacgaggacgauucugagcccgugcugaagggcgugaaacugcacuacacaugaggacuagucccuguucccagagcccacuuuuuuuucuuuuuuugaaauaaaauagccugucuuucagaucucaaaggcucuuuucagagccaccaaaaaaaaaaaaaaaaaaaaaaaaaaaaaaaaaaaaaaaaaaaaaaaaaaaaaaaaaaaaaaaaaaaaaaaaaaaaaaaaaaaaaaaaaaaaaaaaaaaaa

SEQ ID NO: 23511 - RNA, 4085 nt, Artificial Sequence
  SARS-CoV-2/Wuhan/WIV05/2019__EPI_ISL_402128 spike protein mRNA gc mod (1-1273)(H69del_V70del_Y144del_N501Y_A570D_D614G_P681H_T716I_S982 A_D1118H)
aggagagucccgcagucggcguccagcggcucugcuuguucgugugugugucguugcaggccuuauucaagcuuaccauguucguguuccuggugcugcugccucugguguccagccagugugugaaccugaccaccagaacacagcugccuccagccuacaccaacagcuuuaccagaggcguguacuaccccgacaagguguucagauccagcgugcugcacucuacccaggaccuguuccugccuuucuucagcaacgugaccugguuccacgccaucuccggcaccaauggcaccaagagauucgacaaccccgugcugcccuucaacgacgggguguacuuugccagcaccgagaaguccaacaucaucagaggcuggaucuucggcaccacacuggacagcaagacccagagccugcugaucgugaacaacgccaccaacguggucaucaaagugugcgaguuccaguucugcaacgaccccuuccugggcgucuaccacaagaacaacaagagcuggauggaaagcgaguuccggguguacagcagcgccaacaacugcaccuucgaguacgugucccagccuuuccugauggaccuggaaggcaagcagggcaacuucaagaaccugcgcgaguucguguuuaagaacaucgacggcuacuucaagaucuacagcaagcacaccccuaucaaccucgugcgggaucugccucagggcuucucugcucuggaaccccugguggaucugcccaucggcaucaacaucacccgguuucagacacugcuggcccugcacagaagcuaccugacaccuggcgauagcagcagcggauggacagcuggugccgccgcuuacuaugugggcuaccugcagccuagaaccuuccugcugaaguacaacgagaacggcaccaucaccgacgccguggauugugcucuggauccucugagcgagacaaagugcacccugaaguccuucaccguggaaaagggcaucuaccagaccagcaacuuccgggugcagcccaccgaauccaucgugcgguuccccaauaucaccaaucugugccccuucggcgagguguucaaugccaccagauucgccucuguguacgccuggaaccggaagcggaucagcaauugcguggccgacuacuccgugcuguacaacuccgccagcuucagcaccuucaagugcuacggcguguccccuaccaagcugaacgaccugugcuucacaaacguguacgccgacagcuucgugauccggggagaugaagugcggcagauugccccuggacagacaggcaagaucgccgacuacaacuacaagcugcccgacgacuucaccggcugugugauugccuggaacagcaacaaccuggacuccaaagucggcggcaacuacaauuaccuguaccggcuguuccggaaguccaaucugaagcccuucgagcgggacaucuccaccgagaucuaucaggccggcagcaccccuuguaacggcguggaaggcuucaacugcuacuucccacugcaguccuacggcuuucagcccacauacggcgugggcuaucagcccuacagagugguggugcugagcuucgaacugcugcaugccccugccacagugugcggcccuaagaaaagcaccaaucucgugaagaacaaaugcgugaacuucaacuucaacggccugaccggcaccggcgugcugacagagagcaacaagaaguuccugccauuccagcaguuuggccgggauaucgacgauaccacagacgccguuagagauccccagacacuggaaauccuggacaucaccccuugcagcuucggcggagugucugugaucaccccuggcaccaacaccagcaaucagguggcagugcuguaccagggcgugaacuguaccgaagugcccguggccauucacgccgaucagcugacaccuacauggcggguguacuccaccggcagcaauguguuucagaccagagccggcugucugaucggagccgagcacgugaacaauagcuacgagugcgacauccccaucggcgcuggaaucugcgccagcuaccagacacagacaaacagccaccggagagccagaagcguggccagccagagcaucauugccuacacaaugucucugggcgccgagaacagcguggccuacuccaacaacucuaucgcuauccccaucaacuucaccaucagcgugaccacagagauccugccuguguccaugaccaagaccagcguggacugcaccauguacaucugcggcgauuccaccgagugcuccaaccugcugcugcaguacggcagcuucugcacccagcugaauagagcccugacagggaucgccguggaacaggacaagaacacccaagagguguucgcccaagugaagcagaucuacaagaccccuccuaucaaggacuucggcggcuucaauuucagccagauucugcccgauccuagcaagcccagcaagcggagcuucaucgaggaccugcuguucaacaaagugacacuggccgacgccggcuucaucaagcaguauggcgauugucugggcgacauugccgccagggaucugauuugcgcccagaaguuuaacggacugacagugcugccuccucugcugaccgaugagaugaucgcccaguacacaucugcccugcuggccggcacaaucacaagcggcuggacauuuggagcaggcgccgcucugcagauccccuuugcuaugcagauggccuaccgguucaacggcaucggagugacccagaaugugcuguacgagaaccagaagcugaucgccaaccaguucaacagcgccaucggcaagauccaggacagccugagcagcacagcaagcgcccugggaaagcugcaggacguggucaaccagaaugcccaggcacugaacacccuggucaagcagcuguccuccaacuucggcgccaucagcucugugcugaacgauauccuggccagacuggacaaggucgaggccgaggugcagaucgacagacugaucacaggcagacugcagagccuccagacauacgugacccagcagcugaucagagccgccgagauuagagccucugccaaucuggccgccaccaagaugucugagugugugcugggccagagcaagagaguggacuuuugcggcaagggcuaccaccugaugagcuucccucagucugccccucacggcgugguguuucugcacgugacauaugugcccgcucaagagaagaauuucaccaccgcuccagccaucugccacgacggcaaagcccacuuuccuagagaaggcguguucguguccaacggcacccauugguucgugacacagcggaacuucuacgagccccagaucaucaccacccacaacaccuucgugucuggcaacugcgacgucgugaucggcauugugaacaauaccguguacgacccucugcagcccgagcuggacagcuucaaagaggaacuggacaaguacuuuaagaaccacacaagccccgacguggaccugggcgauaucagcggaaucaaugccagcgucgugaacauccagaaagagaucgaccggcugaacgagguggccaagaaucugaacgagagccugaucgaccugcaagaacuggggaaguacgagcaguacaucaaguggcccugguacaucuggcugggcuuuaucgccggacugauugccaucgugauggucacaaucaugcuguguugcaugaccagcugcuguagcugccugaagggcuguuguagcuguggcagcugcugcaaguucgacgaggacgauucugagcccgugcugaagggcgugaaacugcacuacacaugaggacuagucccuguucccagagcccacuuuuuuuucuuuuuuugaaauaaaauagccugucuuucagaucucaaaggcucuuuucagagccaccaaaaaaaaaaaaaaaaaaaaaaaaaaaaaaaaaaaaaaaaaaaaaaaaaaaaaaaaaaaaaaaaaaaaaaaaaaaaaaaaaaaaaaaaaaaaaaaaaaaaa

SEQ ID NO: 23512 - RNA, 4094 nt, Artificial Sequence
  SARS-CoV-2/Wuhan/WIV05/2019__EPI_ISL_402128 spike protein mRNA gc mod (1-1273)(K417N_E484K_N501Y_D614G)
aggagagucccgcagucggcguccagcggcucugcuuguucgugugugugucguugcaggccuuauucaagcuuaccauguucguguuccuggugcugcugccucugguguccagccagugugugaaccugaccaccagaacacagcugccuccagccuacaccaacagcuuuaccagaggcguguacuaccccgacaagguguucagauccagcgugcugcacucuacccaggaccuguuccugccuuucuucagcaacgugaccugguuccacgccauccacguguccggcaccaauggcaccaagagauucgacaaccccgugcugcccuucaacgacgggguguacuuugccagcaccgagaaguccaacaucaucagaggcuggaucuucggcaccacacuggacagcaagacccagagccugcugaucgugaacaacgccaccaacguggucaucaaagugugcgaguuccaguucugcaacgaccccuuccugggcgucuacuaccacaagaacaacaagagcuggauggaaagcgaguuccggguguacagcagcgccaacaacugcaccuucgaguacgugucccagccuuuccugauggaccuggaaggcaagcagggcaacuucaagaaccugcgcgaguucguguuuaagaacaucgacggcuacuucaagaucuacagcaagcacaccccuaucaaccucgugcgggaucugccucagggcuucucugcucuggaaccccugguggaucugcccaucggcaucaacaucacccgguuucagacacugcuggcccugcacagaagcuaccugacaccuggcgauagcagcagcggauggacagcuggugccgccgcuuacuaugugggcuaccugcagccuagaaccuuccugcugaaguacaacgagaacggcaccaucaccgacgccguggauugugcucuggauccucugagcgagacaaagugcacccugaaguccuucaccguggaaaagggcaucuaccagaccagcaacuuccgggugcagcccaccgaauccaucgugcgguuccccaauaucaccaaucugugccccuucggcgagguguucaaugccaccagauucgccucuguguacgccuggaaccggaagcggaucagcaauugcguggccgacuacuccgugcuguacaacuccgccagcuucagcaccuucaagugcuacggcguguccccuaccaagcugaacgaccugugcuucacaaacguguacgccgacagcuucgugauccggggagaugaagugcggcagauugccccuggacagacaggcaacaucgccgacuacaacuacaagcugcccgacgacuucaccggcugugugauugccuggaacagcaacaaccuggacuccaaagucggcggcaacuacaauuaccuguaccggcuguuccggaaguccaaucugaagcccuucgagcgggacaucuccaccgagaucuaucaggccggcagcaccccuuguaacggcgugaagggcuucaacugcuacuucccacugcaguccuacggcuuucagcccacauacggcgugggcuaucagcccuacagagugguggugcugagcuucgaacugcugcaugccccugccacagugugcggcccuaagaaaagcaccaaucucgugaagaacaaaugcgugaacuucaacuucaacggccugaccggcaccggcgugcugacagagagcaacaagaaguuccugccauuccagcaguuuggccgggauaucgccgauaccacagacgccguuagagauccccagacacuggaaauccuggacaucaccccuugcagcuucggcggagugucugugaucaccccuggcaccaacaccagcaaucagguggcagugcuguaccagggcgugaacuguaccgaagugcccguggccauucacgccgaucagcugacaccuacauggcggguguacuccaccggcagcaauguguuucagaccagagccggcugucugaucggagccgagcacgugaacaauagcuacgagugcgacauccccaucggcgcuggaaucugcgccagcuaccagacacagacaaacagcccucggagagccagaagcguggccagccagagcaucauugccuacacaaugucucugggcgccgagaacagcguggccuacuccaacaacucuaucgcuauccccaccaacuucaccaucagcgugaccacagagauccugccuguguccaugaccaagaccagcguggacugcaccauguacaucugcggcgauuccaccgagugcuccaaccugcugcugcaguacggcagcuucugcacccagcugaauagagcccugacagggaucgccguggaacaggacaagaacacccaagagguguucgcccaagugaagcagaucuacaagaccccuccuaucaaggacuucggcggcuucaauuucagccagauucugcccgauccuagcaagcccagcaagcggagcuucaucgaggaccugcuguucaacaaagugacacuggccgacgccggcuucaucaagcaguauggcgauugucugggcgacauugccgccagggaucugauuugcgcccagaaguuuaacggacugacagugcugccuccucugcugaccgaugagaugaucgcccaguacacaucugcccugcuggccggcacaaucacaagcggcuggacauuuggagcaggcgccgcucugcagauccccuuugcuaugcagauggccuaccgguucaacggcaucggagugacccagaaugugcuguacgagaaccagaagcugaucgccaaccaguucaacagcgccaucggcaagauccaggacagccugagcagcacagcaagcgcccugggaaagcugcaggacguggucaaccagaaugcccaggcacugaacacccuggucaagcagcuguccuccaacuucggcgccaucagcucugugcugaacgauauccugagcagacuggacaaggucgaggccgaggugcagaucgacagacugaucacaggcagacugcagagccuccagacauacgugacccagcagcugaucagagccgccgagauuagagccucugccaaucuggccgccaccaagaugucugagugugugcugggccagagcaagagaguggacuuuugcggcaagggcuaccaccugaugagcuucccucagucugccccucacggcgugguguuucugcacgugacauaugugcccgcucaagagaagaauuucaccaccgcuccagccaucugccacgacggcaaagcccacuuuccuagagaaggcguguucguguccaacggcacccauugguucgugacacagcggaacuucuacgagccccagaucaucaccaccgacaacaccuucgugucuggcaacugcgacgucgugaucggcauugugaacaauaccguguacgacccucugcagcccgagcuggacagcuucaaagaggaacuggacaaguacuuuaagaaccacacaagccccgacguggaccugggcgauaucagcggaaucaaugccagcgucgugaacauccagaaagagaucgaccggcugaacgagguggccaagaaucugaacgagagccugaucgaccugcaagaacuggggaaguacgagcaguacaucaaguggcccugguacaucuggcugggcuuuaucgccggacugauugccaucgugauggucacaaucaugcuguguugcaugaccagcugcuguagcugccugaagggcuguuguagcuguggcagcugcugcaaguucgacgaggacgauucugagcccgugcugaagggcgugaaacugcacuacacaugaggacuagucccuguucccagagcccacuuuuuuuucuuuuuuugaaauaaaauagccugucuuucagaucucaaaggcucuuuucagagccaccaaaaaaaaaaaaaaaaaaaaaaaaaaaaaaaaaaaaaaaaaaaaaaaaaaaaaaaaaaaaaaaaaaaaaaaaaaaaaaaaaaaaaaaaaaaaaaaaaaaaa

SEQ ID NO: 23513 - RNA, 4085 nt, Artificial Sequence
  SARS-CoV-2/Wuhan/WIV05/2019__EPI_ISL_402128 spike protein mRNA gc mod (1-1273)(L18F_D80A_D215G_L242del_A243del_L244del_R246I_K417N_E484 K_N501Y_D614G_A701V)
aggagagucccgcagucggcguccagcggcucugcuuguucgugugugugucguugcaggccuuauucaagcuuaccauguucguguuccuggugcugcugccucugguguccagccagugugugaacuucaccaccagaacacagcugccuccagccuacaccaacagcuuuaccagaggcguguacuaccccgacaagguguucagauccagcgugcugcacucuacccaggaccuguuccugccuuucuucagcaacgugaccugguuccacgccauccacguguccggcaccaauggcaccaagagauucgccaaccccgugcugcccuucaacgacgggguguacuuugccagcaccgagaaguccaacaucaucagaggcuggaucuucggcaccacacuggacagcaagacccagagccugcugaucgugaacaacgccaccaacguggucaucaaagugugcgaguuccaguucugcaacgaccccuuccugggcgucuacuaccacaagaacaacaagagcuggauggaaagcgaguuccggguguacagcagcgccaacaacugcaccuucgaguacgugucccagccuuuccugauggaccuggaaggcaagcagggcaacuucaagaaccugcgcgaguucguguuuaagaacaucgacggcuacuucaagaucuacagcaagcacaccccuaucaaccucgugcggggccugccucagggcuucucugcucuggaaccccugguggaucugcccaucggcaucaacaucacccgguuucagacacugcacaucagcuaccugacaccuggcgauagcagcagcggauggacagcuggugccgccgcuuacuaugugggcuaccugcagccuagaaccuuccugcugaaguacaacgagaacggcaccaucaccgacgccguggauugugcucuggauccucugagcgagacaaagugcacccugaaguccuucaccguggaaaagggcaucuaccagaccagcaacuuccgggugcagcccaccgaauccaucgugcgguuccccaauaucaccaaucugugccccuucggcgagguguucaaugccaccagauucgccucuguguacgccuggaaccggaagcggaucagcaauugcguggccgacuacuccgugcuguacaacuccgccagcuucagcaccuucaagugcuacggcguguccccuaccaagcugaacgaccugugcuucacaaacguguacgccgacagcuucgugauccggggagaugaagugcggcagauugccccuggacagacaggcaacaucgccgacuacaacuacaagcugcccgacgacuucaccggcugugugauugccuggaacagcaacaaccuggacuccaaagucggcggcaacuacaauuaccuguaccggcuguuccggaaguccaaucugaagcccuucgagcgggacaucuccaccgagaucuaucaggccggcagcaccccuuguaacggcgugaagggcuucaacugcuacuucccacugcaguccuacggcuuucagcccacauacggcgugggcuaucagcccuacagagugguggugcugagcuucgaacugcugcaugccccugccacagugugcggcccuaagaaaagcaccaaucucgugaagaacaaaugcgugaacuucaacuucaacggccugaccggcaccggcgugcugacagagagcaacaagaaguuccugccauuccagcaguuuggccgggauaucgccgauaccacagacgccguuagagauccccagacacuggaaauccuggacaucaccccuugcagcuucggcggagugucugugaucaccccuggcaccaacaccagcaaucagguggcagugcuguaccagggcgugaacuguaccgaagugcccguggccauucacgccgaucagcugacaccuacauggcggguguacuccaccggcagcaauguguuucagaccagagccggcugucugaucggagccgagcacgugaacaauagcuacgagugcgacauccccaucggcgcuggaaucugcgccagcuaccagacacagacaaacagcccucggagagccagaagcguggccagccagagcaucauugccuacacaaugucucugggcguggagaacagcguggccuacuccaacaacucuaucgcuauccccaccaacuucaccaucagcgugaccacagagauccugccuguguccaugaccaagaccagcguggacugcaccauguacaucugcggcgauuccaccgagugcuccaaccugcugcugcaguacggcagcuucugcacccagcugaauagagcccugacagggaucgccguggaacaggacaagaacacccaagagguguucgcccaagugaagcagaucuacaagaccccuccuaucaaggacuucggcggcuucaauuucagccagauucugcccgauccuagcaagcccagcaagcggagcuucaucgaggaccugcuguucaacaaagugacacuggccgacgccggcuucaucaagcaguauggcgauugucugggcgacauugccgccagggaucugauuugcgcccagaaguuuaacggacugacagugcugccuccucugcugaccgaugagaugaucgcccaguacacaucugcccugcuggccggcacaaucacaagcggcuggacauuuggagcaggcgccgcucugcagauccccuuugcuaugcagauggccuaccgguucaacggcaucggagugacccagaaugugcuguacgagaaccagaagcugaucgccaaccaguucaacagcgccaucggcaagauccaggacagccugagcagcacagcaagcgcccugggaaagcugcaggacguggucaaccagaaugcccaggcacugaacacccuggucaagcagcuguccuccaacuucggcgccaucagcucugugcugaacgauauccugagcagacuggacaaggucgaggccgaggugcagaucgacagacugaucacaggcagacugcagagccuccagacauacgugacccagcagcugaucagagccgccgagauuagagccucugccaaucuggccgccaccaagaugucugagugugugcugggccagagcaagagaguggacuuuugcggcaagggcuaccaccugaugagcuucccucagucugccccucacggcgugguguuucugcacgugacauaugugcccgcucaagagaagaauuucaccaccgcuccagccaucugccacgacggcaaagcccacuuuccuagagaaggcguguucguguccaacggcacccauugguucgugacacagcggaacuucuacgagccccagaucaucaccaccgacaacaccuucgugucuggcaacugcgacgucgugaucggcauugugaacaauaccguguacgacccucugcagcccgagcuggacagcuucaaagaggaacuggacaaguacuuuaagaaccacacaagccccgacguggaccugggcgauaucagcggaaucaaugccagcgucgugaacauccagaaagagaucgaccggcugaacgagguggccaagaaucugaacgagagccugaucgaccugcaagaacuggggaaguacgagcaguacaucaaguggcccugguacaucuggcugggcuuuaucgccggacugauugccaucgugauggucacaaucaugcuguguugcaugaccagcugcuguagcugccugaagggcuguuguagcuguggcagcugcugcaaguucgacgaggacgauucugagcccgugcugaagggcgugaaacugcacuacacaugaggacuagucccuguucccagagcccacuuuuuuuucuuuuuuugaaauaaaauagccugucuuucagaucucaaaggcucuuuucagagccaccaaaaaaaaaaaaaaaaaaaaaaaaaaaaaaaaaaaaaaaaaaaaaaaaaaaaaaaaaaaaaaaaaaaaaaaaaaaaaaaaaaaaaaaaaaaaaaaaaaaaa

SEQ ID NO: 23514 - RNA, 4094 nt, Artificial Sequence
  SARS-CoV-2/Wuhan/WIV05/2019__EPI_ISL_402128 spike protein mRNA gc mod (1-1273)(E484K_D614G)
aggagagucccgcagucggcguccagcggcucugcuuguucgugugugugucguugcaggccuuauucaagcuuaccauguucguguuccuggugcugcugccucugguguccagccagugugugaaccugaccaccagaacacagcugccuccagccuacaccaacagcuuuaccagaggcguguacuaccccgacaagguguucagauccagcgugcugcacucuacccaggaccuguuccugccuuucuucagcaacgugaccugguuccacgccauccacguguccggcaccaauggcaccaagagauucgacaaccccgugcugcccuucaacgacgggguguacuuugccagcaccgagaaguccaacaucaucagaggcuggaucuucggcaccacacuggacagcaagacccagagccugcugaucgugaacaacgccaccaacguggucaucaaagugugcgaguuccaguucugcaacgaccccuuccugggcgucuacuaccacaagaacaacaagagcuggauggaaagcgaguuccggguguacagcagcgccaacaacugcaccuucgaguacgugucccagccuuuccugauggaccuggaaggcaagcagggcaacuucaagaaccugcgcgaguucguguuuaagaacaucgacggcuacuucaagaucuacagcaagcacaccccuaucaaccucgugcgggaucugccucagggcuucucugcucuggaaccccugguggaucugcccaucggcaucaacaucacccgguuucagacacugcuggcccugcacagaagcuaccugacaccuggcgauagcagcagcggauggacagcuggugccgccgcuuacuaugugggcuaccugcagccuagaaccuuccugcugaaguacaacgagaacggcaccaucaccgacgccguggauugugcucuggauccucugagcgagacaaagugcacccugaaguccuucaccguggaaaagggcaucuaccagaccagcaacuuccgggugcagcccaccgaauccaucgugcgguuccccaauaucaccaaucugugccccuucggcgagguguucaaugccaccagauucgccucuguguacgccuggaaccggaagcggaucagcaauugcguggccgacuacuccgugcuguacaacuccgccagcuucagcaccuucaagugcuacggcguguccccuaccaagcugaacgaccugugcuucacaaacguguacgccgacagcuucgugauccggggagaugaagugcggcagauugccccuggacagacaggcaagaucgccgacuacaacuacaagcugcccgacgacuucaccggcugugugauugccuggaacagcaacaaccuggacuccaaagucggcggcaacuacaauuaccuguaccggcuguuccggaaguccaaucugaagcccuucgagcgggacaucuccaccgagaucuaucaggccggcagcaccccuuguaacggcgugaagggcuucaacugcuacuucccacugcaguccuacggcuuucagcccacaaauggcgugggcuaucagcccuacagagugguggugcugagcuucgaacugcugcaugccccugccacagugugcggcccuaagaaaagcaccaaucucgugaagaacaaaugcgugaacuucaacuucaacggccugaccggcaccggcgugcugacagagagcaacaagaaguuccugccauuccagcaguuuggccgggauaucgccgauaccacagacgccguuagagauccccagacacuggaaauccuggacaucaccccuugcagcuucggcggagugucugugaucaccccuggcaccaacaccagcaaucagguggcagugcuguaccagggcgugaacuguaccgaagugcccguggccauucacgccgaucagcugacaccuacauggcggguguacuccaccggcagcaauguguuucagaccagagccggcugucugaucggagccgagcacgugaacaauagcuacgagugcgacauccccaucggcgcuggaaucugcgccagcuaccagacacagacaaacagcccucggagagccagaagcguggccagccagagcaucauugccuacacaaugucucugggcgccgagaacagcguggccuacuccaacaacucuaucgcuauccccaccaacuucaccaucagcgugaccacagagauccugccuguguccaugaccaagaccagcguggacugcaccauguacaucugcggcgauuccaccgagugcuccaaccugcugcugcaguacggcagcuucugcacccagcugaauagagcccugacagggaucgccguggaacaggacaagaacacccaagagguguucgcccaagugaagcagaucuacaagaccccuccuaucaaggacuucggcggcuucaauuucagccagauucugcccgauccuagcaagcccagcaagcggagcuucaucgaggaccugcuguucaacaaagugacacuggccgacgccggcuucaucaagcaguauggcgauugucugggcgacauugccgccagggaucugauuugcgcccagaaguuuaacggacugacagugcugccuccucugcugaccgaugagaugaucgcccaguacacaucugcccugcuggccggcacaaucacaagcggcuggacauuuggagcaggcgccgcucugcagauccccuuugcuaugcagauggccuaccgguucaacggcaucggagugacccagaaugugcuguacgagaaccagaagcugaucgccaaccaguucaacagcgccaucggcaagauccaggacagccugagcagcacagcaagcgcccugggaaagcugcaggacguggucaaccagaaugcccaggcacugaacacccuggucaagcagcuguccuccaacuucggcgccaucagcucugugcugaacgauauccugagcagacuggacaaggucgaggccgaggugcagaucgacagacugaucacaggcagacugcagagccuccagacauacgugacccagcagcugaucagagccgccgagauuagagccucugccaaucuggccgccaccaagaugucugagugugugcugggccagagcaagagaguggacuuuugcggcaagggcuaccaccugaugagcuucccucagucugccccucacggcgugguguuucugcacgugacauaugugcccgcucaagagaagaauuucaccaccgcuccagccaucugccacgacggcaaagcccacuuuccuagagaaggcguguucguguccaacggcacccauugguucgugacacagcggaacuucuacgagccccagaucaucaccaccgacaacaccuucgugucuggcaacugcgacgucgugaucggcauugugaacaauaccguguacgacccucugcagcccgagcuggacagcuucaaagaggaacuggacaaguacuuuaagaaccacacaagccccgacguggaccugggcgauaucagcggaaucaaugccagcgucgugaacauccagaaagagaucgaccggcugaacgagguggccaagaaucugaacgagagccugaucgaccugcaagaacuggggaaguacgagcaguacaucaaguggcccugguacaucuggcugggcuuuaucgccggacugauugccaucgugauggucacaaucaugcuguguugcaugaccagcugcuguagcugccugaagggcuguuguagcuguggcagcugcugcaaguucgacgaggacgauucugagcccgugcugaagggcgugaaacugcacuacacaugaggacuagucccuguucccagagcccacuuuuuuuucuuuuuuugaaauaaaauagccugucuuucagaucucaaaggcucuuuucagagccaccaaaaaaaaaaaaaaaaaaaaaaaaaaaaaaaaaaaaaaaaaaaaaaaaaaaaaaaaaaaaaaaaaaaaaaaaaaaaaaaaaaaaaaaaaaaaaaaaaaaaa

SEQ ID NO: 23515 - RNA, 4094 nt, Artificial Sequence
  SARS-CoV-2/Wuhan/WIV05/2019__EPI_ISL_402128 spike protein mRNA gc mod (1-1273)(L18F_T20N_P26S_D138Y_R190S_K417T_E484K_N501Y_D614G_H655Y _T1027I)
aggagagucccgcagucggcguccagcggcucugcuuguucgugugugugucguugcaggccuuauucaagcuuaccauguucguguuccuggugcugcugccucugguguccagccagugugugaacuucaccaacagaacacagcugccuagcgccuacaccaacagcuuuaccagaggcguguacuaccccgacaagguguucagauccagcgugcugcacucuacccaggaccuguuccugccuuucuucagcaacgugaccugguuccacgccauccacguguccggcaccaauggcaccaagagauucgacaaccccgugcugcccuucaacgacgggguguacuuugccagcaccgagaaguccaacaucaucagaggcuggaucuucggcaccacacuggacagcaagacccagagccugcugaucgugaacaacgccaccaacguggucaucaaagugugcgaguuccaguucugcaacuaccccuuccugggcgucuacuaccacaagaacaacaagagcuggauggaaagcgaguuccggguguacagcagcgccaacaacugcaccuucgaguacgugucccagccuuuccugauggaccuggaaggcaagcagggcaacuucaagaaccugagcgaguucguguuuaagaacaucgacggcuacuucaagaucuacagcaagcacaccccuaucaaccucgugcgggaucugccucagggcuucucugcucuggaaccccugguggaucugcccaucggcaucaacaucacccgguuucagacacugcuggcccugcacagaagcuaccugacaccuggcgauagcagcagcggauggacagcuggugccgccgcuuacuaugugggcuaccugcagccuagaaccuuccugcugaaguacaacgagaacggcaccaucaccgacgccguggauugugcucuggauccucugagcgagacaaagugcacccugaaguccuucaccguggaaaagggcaucuaccagaccagcaacuuccgggugcagcccaccgaauccaucgugcgguuccccaauaucaccaaucugugccccuucggcgagguguucaaugccaccagauucgccucuguguacgccuggaaccggaagcggaucagcaauugcguggccgacuacuccgugcuguacaacuccgccagcuucagcaccuucaagugcuacggcguguccccuaccaagcugaacgaccugugcuucacaaacguguacgccgacagcuucgugauccggggagaugaagugcggcagauugccccuggacagacaggcaccaucgccgacuacaacuacaagcugcccgacgacuucaccggcugugugauugccuggaacagcaacaaccuggacuccaaagucggcggcaacuacaauuaccuguaccggcuguuccggaaguccaaucugaagcccuucgagcgggacaucuccaccgagaucuaucaggccggcagcaccccuuguaacggcgugaagggcuucaacugcuacuucccacugcaguccuacggcuuucagcccacauacggcgugggcuaucagcccuacagagugguggugcugagcuucgaacugcugcaugccccugccacagugugcggcccuaagaaaagcaccaaucucgugaagaacaaaugcgugaacuucaacuucaacggccugaccggcaccggcgugcugacagagagcaacaagaaguuccugccauuccagcaguuuggccgggauaucgccgauaccacagacgccguuagagauccccagacacuggaaauccuggacaucaccccuugcagcuucggcggagugucugugaucaccccuggcaccaacaccagcaaucagguggcagugcuguaccagggcgugaacuguaccgaagugcccguggccauucacgccgaucagcugacaccuacauggcggguguacuccaccggcagcaauguguuucagaccagagccggcugucugaucggagccgaguacgugaacaauagcuacgagugcgacauccccaucggcgcuggaaucugcgccagcuaccagacacagacaaacagcccucggagagccagaagcguggccagccagagcaucauugccuacacaaugucucugggcgccgagaacagcguggccuacuccaacaacucuaucgcuauccccaccaacuucaccaucagcgugaccacagagauccugccuguguccaugaccaagaccagcguggacugcaccauguacaucugcggcgauuccaccgagugcuccaaccugcugcugcaguacggcagcuucugcacccagcugaauagagcccugacagggaucgccguggaacaggacaagaacacccaagagguguucgcccaagugaagcagaucuacaagaccccuccuaucaaggacuucggcggcuucaauuucagccagauucugcccgauccuagcaagcccagcaagcggagcuucaucgaggaccugcuguucaacaaagugacacuggccgacgccggcuucaucaagcaguauggcgauugucugggcgacauugccgccagggaucugauuugcgcccagaaguuuaacggacugacagugcugccuccucugcugaccgaugagaugaucgcccaguacacaucugcccugcuggccggcacaaucacaagcggcuggacauuuggagcaggcgccgcucugcagauccccuuugcuaugcagauggccuaccgguucaacggcaucggagugacccagaaugugcuguacgagaaccagaagcugaucgccaaccaguucaacagcgccaucggcaagauccaggacagccugagcagcacagcaagcgcccugggaaagcugcaggacguggucaaccagaaugcccaggcacugaacacccuggucaagcagcuguccuccaacuucggcgccaucagcucugugcugaacgauauccugagcagacuggacaaggucgaggccgaggugcagaucgacagacugaucacaggcagacugcagagccuccagacauacgugacccagcagcugaucagagccgccgagauuagagccucugccaaucuggccgccaucaagaugucugagugugugcugggccagagcaagagaguggacuuuugcggcaagggcuaccaccugaugagcuucccucagucugccccucacggcgugguguuucugcacgugacauaugugcccgcucaagagaagaauuucaccaccgcuccagccaucugccacgacggcaaagcccacuuuccuagagaaggcguguucguguccaacggcacccauugguucgugacacagcggaacuucuacgagccccagaucaucaccaccgacaacaccuucgugucuggcaacugcgacgucgugaucggcauugugaacaauaccguguacgacccucugcagcccgagcuggacagcuucaaagaggaacuggacaaguacuuuaagaaccacacaagccccgacguggaccugggcgauaucagcggaaucaaugccagcgucgugaacauccagaaagagaucgaccggcugaacgagguggccaagaaucugaacgagagccugaucgaccugcaagaacuggggaaguacgagcaguacaucaaguggcccugguacaucuggcugggcuuuaucgccggacugauugccaucgugauggucacaaucaugcuguguugcaugaccagcugcuguagcugccugaagggcuguuguagcuguggcagcugcugcaaguucgacgaggacgauucugagcccgugcugaagggcgugaaacugcacuacacaugaggacuagucccuguucccagagcccacuuuuuuuucuuuuuuugaaauaaaauagccugucuuucagaucucaaaggcucuuuucagagccaccaaaaaaaaaaaaaaaaaaaaaaaaaaaaaaaaaaaaaaaaaaaaaaaaaaaaaaaaaaaaaaaaaaaaaaaaaaaaaaaaaaaaaaaaaaaaaaaaaaaaa

SEQ ID NO: 23516 - RNA, 4094 nt, Artificial Sequence
  SARS-CoV-2/Wuhan/WIV05/2019__EPI_ISL_402128 spike protein mRNA gc mod (1-1273)(S13I_W152C_L452R_D614G)
aggagagucccgcagucggcguccagcggcucugcuuguucgugugugugucguugcaggccuuauucaagcuuaccauguucguguuccuggugcugcugccucugguguccauccagugugugaaccugaccaccagaacacagcugccuccagccuacaccaacagcuuuaccagaggcguguacuaccccgacaagguguucagauccagcgugcugcacucuacccaggaccuguuccugccuuucuucagcaacgugaccugguuccacgccauccacguguccggcaccaauggcaccaagagauucgacaaccccgugcugcccuucaacgacgggguguacuuugccagcaccgagaaguccaacaucaucagaggcuggaucuucggcaccacacuggacagcaagacccagagccugcugaucgugaacaacgccaccaacguggucaucaaagugugcgaguuccaguucugcaacgaccccuuccugggcgucuacuaccacaagaacaacaagagcugcauggaaagcgaguuccggguguacagcagcgccaacaacugcaccuucgaguacgugucccagccuuuccugauggaccuggaaggcaagcagggcaacuucaagaaccugcgcgaguucguguuuaagaacaucgacggcuacuucaagaucuacagcaagcacaccccuaucaaccucgugcgggaucugccucagggcuucucugcucuggaaccccugguggaucugcccaucggcaucaacaucacccgguuucagacacugcuggcccugcacagaagcuaccugacaccuggcgauagcagcagcggauggacagcuggugccgccgcuuacuaugugggcuaccugcagccuagaaccuuccugcugaaguacaacgagaacggcaccaucaccgacgccguggauugugcucuggauccucugagcgagacaaagugcacccugaaguccuucaccguggaaaagggcaucuaccagaccagcaacuuccgggugcagcccaccgaauccaucgugcgguuccccaauaucaccaaucugugccccuucggcgagguguucaaugccaccagauucgccucuguguacgccuggaaccggaagcggaucagcaauugcguggccgacuacuccgugcuguacaacuccgccagcuucagcaccuucaagugcuacggcguguccccuaccaagcugaacgaccugugcuucacaaacguguacgccgacagcuucgugauccggggagaugaagugcggcagauugccccuggacagacaggcaagaucgccgacuacaacuacaagcugcccgacgacuucaccggcugugugauugccuggaacagcaacaaccuggacuccaaagucggcggcaacuacaauuaccgcuaccggcuguuccggaaguccaaucugaagcccuucgagcgggacaucuccaccgagaucuaucaggccggcagcaccccuuguaacggcguggaaggcuucaacugcuacuucccacugcaguccuacggcuuucagcccacaaauggcgugggcuaucagcccuacagagugguggugcugagcuucgaacugcugcaugccccugccacagugugcggcccuaagaaaagcaccaaucucgugaagaacaaaugcgugaacuucaacuucaacggccugaccggcaccggcgugcugacagagagcaacaagaaguuccugccauuccagcaguuuggccgggauaucgccgauaccacagacgccguuagagauccccagacacuggaaauccuggacaucaccccuugcagcuucggcggagugucugugaucaccccuggcaccaacaccagcaaucagguggcagugcuguaccagggcgugaacuguaccgaagugcccguggccauucacgccgaucagcugacaccuacauggcggguguacuccaccggcagcaauguguuucagaccagagccggcugucugaucggagccgagcacgugaacaauagcuacgagugcgacauccccaucggcgcuggaaucugcgccagcuaccagacacagacaaacagcccucggagagccagaagcguggccagccagagcaucauugccuacacaaugucucugggcgccgagaacagcguggccuacuccaacaacucuaucgcuauccccaccaacuucaccaucagcgugaccacagagauccugccuguguccaugaccaagaccagcguggacugcaccauguacaucugcggcgauuccaccgagugcuccaaccugcugcugcaguacggcagcuucugcacccagcugaauagagcccugacagggaucgccguggaacaggacaagaacacccaagagguguucgcccaagugaagcagaucuacaagaccccuccuaucaaggacuucggcggcuucaauuucagccagauucugcccgauccuagcaagcccagcaagcggagcuucaucgaggaccugcuguucaacaaagugacacuggccgacgccggcuucaucaagcaguauggcgauugucugggcgacauugccgccagggaucugauuugcgcccagaaguuuaacggacugacagugcugccuccucugcugaccgaugagaugaucgcccaguacacaucugcccugcuggccggcacaaucacaagcggcuggacauuuggagcaggcgccgcucugcagauccccuuugcuaugcagauggccuaccgguucaacggcaucggagugacccagaaugugcuguacgagaaccagaagcugaucgccaaccaguucaacagcgccaucggcaagauccaggacagccugagcagcacagcaagcgcccugggaaagcugcaggacguggucaaccagaaugcccaggcacugaacacccuggucaagcagcuguccuccaacuucggcgccaucagcucugugcugaacgauauccugagcagacuggacaaggucgaggccgaggugcagaucgacagacugaucacaggcagacugcagagccuccagacauacgugacccagcagcugaucagagccgccgagauuagagccucugccaaucuggccgccaccaagaugucugagugugugcugggccagagcaagagaguggacuuuugcggcaagggcuaccaccugaugagcuucccucagucugccccucacggcgugguguuucugcacgugacauaugugcccgcucaagagaagaauuucaccaccgcuccagccaucugccacgacggcaaagcccacuuuccuagagaaggcguguucguguccaacggcacccauugguucgugacacagcggaacuucuacgagccccagaucaucaccaccgacaacaccuucgugucuggcaacugcgacgucgugaucggcauugugaacaauaccguguacgacccucugcagcccgagcuggacagcuucaaagaggaacuggacaaguacuuuaagaaccacacaagccccgacguggaccugggcgauaucagcggaaucaaugccagcgucgugaacauccagaaagagaucgaccggcugaacgagguggccaagaaucugaacgagagccugaucgaccugcaagaacuggggaaguacgagcaguacaucaaguggcccugguacaucuggcugggcuuuaucgccggacugauugccaucgugauggucacaaucaugcuguguugcaugaccagcugcuguagcugccugaagggcuguuguagcuguggcagcugcugcaaguucgacgaggacgauucugagcccgugcugaagggcgugaaacugcacuacacaugaggacuagucccuguucccagagcccacuuuuuuuucuuuuuuugaaauaaaauagccugucuuucagaucucaaaggcucuuuucagagccaccaaaaaaaaaaaaaaaaaaaaaaaaaaaaaaaaaaaaaaaaaaaaaaaaaaaaaaaaaaaaaaaaaaaaaaaaaaaaaaaaaaaaaaaaaaaaaaaaaaaaa

SEQ ID NO: 23517 - RNA, 4094 nt, Artificial Sequence; identical to SEQ ID NO: 149
  SARS-CoV-2/Wuhan/WIV05/2019__EPI_ISL_402128 spike protein mRNA gc (1-1273)(K986P_V987P) R9487, R9491, R9709, R10159, R10160

SEQ ID NO: 23518 - RNA, 4094 nt, Artificial Sequence; identical to SEQ ID NO: 22792
  SARS-CoV-2/Wuhan/WIV05/2019__EPI_ISL_402128 spike protein mRNA gc (1-1273)(K986P_V987P_ D614G) R10166

SEQ ID NO: 23519 - RNA, 4094 nt, Artificial Sequence; identical to SEQ ID NO: 22794
  SARS-CoV-2/Wuhan/WIV05/2019__EPI_ISL_402128 spike protein mRNA gc (1-1273)(K986P_V987P_A222V_D614G) R10279

SEQ ID NO: 23520 - RNA, 4094 nt, Artificial Sequence; identical to SEQ ID NO: 22796
  SARS-CoV-2/Wuhan/WIV05/2019__EPI_ISL_402128 spike protein mRNA gc (1-1273)(K986P_V987P_N439K_D614G) R10299

SEQ ID NO: 23521 - RNA, 4094 nt, Artificial Sequence; identical to SEQ ID NO: 22798
  SARS-CoV-2/Wuhan/WIV05/2019__EPI_ISL_402128 spike protein mRNA gc (1-1273)(K986P_V987P_S477N_D614G) R10286

SEQ ID NO: 23522 - RNA, 4094 nt, Artificial Sequence; identical to SEQ ID NO: 22800
  SARS-CoV-2/Wuhan/WIV05/2019__EPI_ISL_402128 spike protein mRNA gc (1-1273)(K986P_V987P_N501Y_D614G)

SEQ ID NO: 23523 - RNA, 4088 nt, Artificial Sequence; identical to SEQ ID NO: 22802
  SARS-CoV-2/Wuhan/WIV05/2019__EPI_ISL_402128 spike protein mRNA gc (1-1273)(K986P_V987P_H69del_V70del_D614G) R10275

SEQ ID NO: 23524 - RNA, 4094 nt, Artificial Sequence; identical to SEQ ID NO: 22804
  SARS-CoV-2/Wuhan/WIV05/2019__EPI_ISL_402128 spike protein mRNA gc (1-1273)(K986P_V987P_Y453F_D614G) R10283

SEQ ID NO: 23525 - RNA, 4094 nt, Artificial Sequence; identical to SEQ ID NO: 22806
  SARS-CoV-2/Wuhan/WIV05/2019__EPI_ISL_402128 spike protein mRNA gc (1-1273)(K986P_V987P_D614G_I692V) R10291

SEQ ID NO: 23526 - RNA, 4094 nt, Artificial Sequence; identical to SEQ ID NO: 22808
  SARS-CoV-2/Wuhan/WIV05/2019__EPI_ISL_402128 spike protein mRNA gc (1-1273)(K986P_V987P_D614G_M1229I)

SEQ ID NO: 23527 - RNA, 4088 nt, Artificial Sequence; identical to SEQ ID NO: 22810
  SARS-CoV-2/Wuhan/WIV05/2019__EPI_ISL_402128 spike protein mRNA gc (1-1273)(K986P_V987P_H69del_V70del_A222V_Y453F_S477N_D614G_I692V) R10295

SEQ ID NO: 23528 - RNA, 4088 nt, Artificial Sequence; identical to SEQ ID NO: 22812
  SARS-CoV-2/Wuhan/WIV05/2019__EPI_ISL_402128 spike protein mRNA gc (1-1273)(K986P_V987P_H69del_V70del_Y453F_D614G_I692V_M1229I)

SEQ ID NO: 23529 - RNA, 4085 nt, Artificial Sequence
  SARS-CoV-2/Wuhan/WIV05/2019__EPI_ISL_402128 spike protein mRNA gc (1-1273)(K986P_V987P_K986P_V987P_H69del_V70del_Y144del_N501Y_A570 D_D614G_P681H_T716I_S982A_D1118H) R10357
aggagagucccgcagucggcguccagcggcucugcuuguucgugugugugucguugcaggccuuauucaagcuuaccauguucguguuccugguccuccugccccuggugagcucccagugcgugaaccucaccacccgcacgcagcugccgcccgccuacaccaacagcuucacccggggcgucuacuaccccgacaagguguuccgcuccagcgugcugcacuccacccaggaccucuuccugcccuucuucagcaacgucacgugguuccacgccaucuccgggaccaacggcaccaagcgguucgacaacccggugcugcccuucaacgacggggucuacuucgcgagcaccgagaaguccaacaucauccgcggcuggaucuucgggacgacccucgacagcaagacccagucccugcugaucgugaacaacgccaccaacguggucaucaaggugugcgaguuccaguucugcaacgaccccuuccucggcguguaccacaagaacaacaagagcuggauggaguccgaguuccgggucuacagcuccgccaacaacugcacguucgaguacgugagccagcccuuccugauggaccuggagggcaagcaggggaacuucaagaaccuccgcgaguucguguucaagaacaucgacggcuacuucaagaucuacuccaagcacaccccgaucaaccugguccgggaccugccccagggguucagcgcccucgagccccugguggaccugcccaucggcaucaacaucacccgcuuccagacccuccuggcccugcaccgguccuaccucacgccgggggacagcagcuccggcuggaccgcgggcgccgccgccuacuacgugggguaccugcagccccgcaccuuccugcucaaguacaacgagaacggcaccaucacggacgcggucgacugcgcccuggacccccugagcgagaccaagugcacccucaaguccuucaccguggagaaggggaucuaccagacgagcaacuuccgggugcagcccaccgaguccaucguccgcuucccgaacaucaccaaccugugccccuucggcgagguguucaacgccacccgguucgccagcgucuacgccuggaaccgcaagcggaucuccaacugcguggcggacuacagcgugcuguacaacuccgccagcuucuccacguucaagugcuacggcgucagccccaccaagcucaacgaccugugcuucaccaacguguacgccgacuccuucgugauccgcggggacgagguccggcagaucgcccccggccagaccgggaagaucgccgacuacaacuacaagcugccggacgacuucacgggcugcgugaucgcguggaacagcaacaaccucgacuccaaggucgggggcaacuacaacuaccuguaccgccuguuccgcaagagcaaccucaagcccuucgagcgggacaucuccaccgagaucuaccaggccggcagcacccccugcaacgggguggagggcuucaacugcuacuucccccugcaguccuacggguuccagccgaccuacggcgugggguaccagcccuaccggguggucgugcugagcuucgagcuccugcacgcccccgccacggugugcggccccaagaaguccaccaaccuggucaagaacaagugcgugaacuucaacuucaacggccucaccgggaccggcgugcugaccgagagcaacaagaaguuccugccguuccagcaguucgggcgcgacaucgacgacacgaccgacgcgguccgcgacccccagacccuggagauccucgacaucacccccugcagcuucggcgggguguccgugaucacgccgggcaccaacaccagcaaccaggucgccgugcuguaccagggcgugaacugcaccgagguccccguggccauccacgccgaccagcugacgcccaccuggcggguguacuccaccggcagcaacgucuuccagacccgcgccgggugccucaucggcgcggagcacgugaacaacuccuacgagugcgacauccccaucggggccggcaucugcgccagcuaccagacgcagaccaacucccaccggcgcgcccggagcguggcgucccagagcaucaucgccuacaccaugucccugggcgccgagaacagcgucgccuacuccaacaacagcaucgccauccccaucaacuucacgaucuccgugaccaccgagauccugcccgugagcaugaccaagacgagcgucgacugcaccauguacaucugcggggacuccaccgagugcagcaaccuccugcugcaguacggcuccuucugcacccagcucaaccgcgcgcugacggggaucgccguggagcaggacaagaacacccaggagguguucgcccaggucaagcagaucuacaagacgcccccgaucaaggacuucggcggguucaacuucagccagauccugcccgaccccuccaagcccagcaagcgguccuucaucgaggaccuccuguucaacaaggugacccuggccgacgccggcuucaucaagcaguacggcgacugccucggggacaucgcggcccgcgaccugaucugcgcccagaaguucaacggccugaccgugcucccgccccugcugaccgacgagaugaucgcccaguacaccagcgcccuccuggcggggaccaucacguccggcuggaccuucggggccggcgccgcccugcagauccccuucgcgaugcagauggccuaccgguucaacggcaucggggucacccagaacgugcucuacgagaaccagaagcugaucgccaaccaguucaacagcgccaucggcaagauccaggacucccugagcuccaccgccagcgcgcucgggaagcugcaggacguggucaaccagaacgcccaggcccugaacacgcucgugaagcagcuguccagcaacuucggcgccaucuccagcgugcugaacgacauccucgcccgccuggacccgcccgaggccgaggugcagaucgaccggcugaucaccgggcgccuccagagccugcagaccuacgugacccagcagcugauccgggcggccgagauccgcgccagcgccaaccucgccgcgaccaagauguccgagugcguccugggccagagcaagcggguggacuucugcggcaagggguaccaccugauguccuucccccagagcgccccgcacggcguggucuuccuccacgugacguacguccccgcccaggagaagaacuucaccaccgcccccgcgaucugccacgacgggaaggcccacuucccccgcgagggcguguucguguccaacgggacccacugguucgucacgcagcggaacuucuacgagccgcagaucaucaccacccacaacaccuucgugagcggcaacugcgacguggucaucggcaucgugaacaacacgguguacgacccccugcagcccgagcuggacuccuucaaggaggagcucgacaaguacuucaagaaccacaccagccccgacgucgaccugggggacaucuccggcaucaacgccagcguggugaacauccagaaggagaucgaccgccugaacgaggucgccaagaaccucaacgagucccugaucgaccugcaggagcucgggaaguacgagcaguacaucaaguggccgugguacaucuggcugggcuucaucgccggccugaucgcgaucgugauggugaccaucaugcucugcugcaugaccagcugcugcuccugccugaaggggugcugcagcugcggcuccugcugcaaguucgacgaggacgacagcgagcccguccugaagggggugaagcuccacuacacgugaggacuagucccuguucccagagcccacuuuuuuuucuuuuuuugaaauaaaauagccugucuuucagaucucaaaggcucuuuucagagccaccaaaaaaaaaaaaaaaaaaaaaaaaaaaaaaaaaaaaaaaaaaaaaaaaaaaaaaaaaaaaaaaaaaaaaaaaaaaaaaaaaaaaaaaaaaaaaaaaaaaaa

SEQ ID NO: 23530 - RNA, 4094 nt, Artificial Sequence
  SARS-CoV-2/Wuhan/WIV05/2019__EPI_ISL_402128 spike protein mRNA gc (1-1273)(K986P_V987P_K986P_V987P_K417N_E484K_N501Y_D614G) R10361
aggagagucccgcagucggcguccagcggcucugcuuguucgugugugugucguugcaggccuuauucaagcuuaccauguucguguuccugguccuccugccccuggugagcucccagugcgugaaccucaccacccgcacgcagcugccgcccgccuacaccaacagcuucacccggggcgucuacuaccccgacaagguguuccgcuccagcgugcugcacuccacccaggaccucuuccugcccuucuucagcaacgucacgugguuccacgccauccacguguccgggaccaacggcaccaagcgguucgacaacccggugcugcccuucaacgacggggucuacuucgcgagcaccgagaaguccaacaucauccgcggcuggaucuucgggacgacccucgacagcaagacccagucccugcugaucgugaacaacgccaccaacguggucaucaaggugugcgaguuccaguucugcaacgaccccuuccucggcguguacuaccacaagaacaacaagagcuggauggaguccgaguuccgggucuacagcuccgccaacaacugcacguucgaguacgugagccagcccuuccugauggaccuggagggcaagcaggggaacuucaagaaccuccgcgaguucguguucaagaacaucgacggcuacuucaagaucuacuccaagcacaccccgaucaaccugguccgggaccugccccagggguucagcgcccucgagccccugguggaccugcccaucggcaucaacaucacccgcuuccagacccuccuggcccugcaccgguccuaccucacgccgggggacagcagcuccggcuggaccgcgggcgccgccgccuacuacgugggguaccugcagccccgcaccuuccugcucaaguacaacgagaacggcaccaucacggacgcggucgacugcgcccuggacccccugagcgagaccaagugcacccucaaguccuucaccguggagaaggggaucuaccagacgagcaacuuccgggugcagcccaccgaguccaucguccgcuucccgaacaucaccaaccugugccccuucggcgagguguucaacgccacccgguucgccagcgucuacgccuggaaccgcaagcggaucuccaacugcguggcggacuacagcgugcuguacaacuccgccagcuucuccacguucaagugcuacggcgucagccccaccaagcucaacgaccugugcuucaccaacguguacgccgacuccuucgugauccgcggggacgagguccggcagaucgcccccggccagaccgggaacaucgccgacuacaacuacaagcugccggacgacuucacgggcugcgugaucgcguggaacagcaacaaccucgacuccaaggucgggggcaacuacaacuaccuguaccgccuguuccgcaagagcaaccucaagcccuucgagcgggacaucuccaccgagaucuaccaggccggcagcacccccugcaacggggugaagggcuucaacugcuacuucccccugcaguccuacggguuccagccgaccuacggcgugggguaccagcccuaccggguggucgugcugagcuucgagcuccugcacgcccccgccacggugugcggccccaagaaguccaccaaccuggucaagaacaagugcgugaacuucaacuucaacggccucaccgggaccggcgugcugaccgagagcaacaagaaguuccugccguuccagcaguucgggcgcgacaucgccgacacgaccgacgcgguccgcgacccccagacccuggagauccucgacaucacccccugcagcuucggcgggguguccgugaucacgccgggcaccaacaccagcaaccaggucgccgugcuguaccagggcgugaacugcaccgagguccccguggccauccacgccgaccagcugacgcccaccuggcggguguacuccaccggcagcaacgucuuccagacccgcgccgggugccucaucggcgcggagcacgugaacaacuccuacgagugcgacauccccaucggggccggcaucugcgccagcuaccagacgcagaccaacuccccgcggcgcgcccggagcguggcgucccagagcaucaucgccuacaccaugucccugggcgccgagaacagcgucgccuacuccaacaacagcaucgccauccccaccaacuucacgaucuccgugaccaccgagauccugcccgugagcaugaccaagacgagcgucgacugcaccauguacaucugcggggacuccaccgagugcagcaaccuccugcugcaguacggcuccuucugcacccagcucaaccgcgcgcugacggggaucgccguggagcaggacaagaacacccaggagguguucgcccaggucaagcagaucuacaagacgcccccgaucaaggacuucggcggguucaacuucagccagauccugcccgaccccuccaagcccagcaagcgguccuucaucgaggaccuccuguucaacaaggugacccuggccgacgccggcuucaucaagcaguacggcgacugccucggggacaucgcggcccgcgaccugaucugcgcccagaaguucaacggccugaccgugcucccgccccugcugaccgacgagaugaucgcccaguacaccagcgcccuccuggcggggaccaucacguccggcuggaccuucggggccggcgccgcccugcagauccccuucgcgaugcagauggccuaccgguucaacggcaucggggucacccagaacgugcucuacgagaaccagaagcugaucgccaaccaguucaacagcgccaucggcaagauccaggacucccugagcuccaccgccagcgcgcucgggaagcugcaggacguggucaaccagaacgcccaggcccugaacacgcucgugaagcagcuguccagcaacuucggcgccaucuccagcgugcugaacgacauccucucccgccuggacccgcccgaggccgaggugcagaucgaccggcugaucaccgggcgccuccagagccugcagaccuacgugacccagcagcugauccgggcggccgagauccgcgccagcgccaaccucgccgcgaccaagauguccgagugcguccugggccagagcaagcggguggacuucugcggcaagggguaccaccugauguccuucccccagagcgccccgcacggcguggucuuccuccacgugacguacguccccgcccaggagaagaacuucaccaccgcccccgcgaucugccacgacgggaaggcccacuucccccgcgagggcguguucguguccaacgggacccacugguucgucacgcagcggaacuucuacgagccgcagaucaucaccaccgacaacaccuucgugagcggcaacugcgacguggucaucggcaucgugaacaacacgguguacgacccccugcagcccgagcuggacuccuucaaggaggagcucgacaaguacuucaagaaccacaccagccccgacgucgaccugggggacaucuccggcaucaacgccagcguggugaacauccagaaggagaucgaccgccugaacgaggucgccaagaaccucaacgagucccugaucgaccugcaggagcucgggaaguacgagcaguacaucaaguggccgugguacaucuggcugggcuucaucgccggccugaucgcgaucgugauggugaccaucaugcucugcugcaugaccagcugcugcuccugccugaaggggugcugcagcugcggcuccugcugcaaguucgacgaggacgacagcgagcccguccugaagggggugaagcuccacuacacgugaggacuagucccuguucccagagcccacuuuuuuuucuuuuuuugaaauaaaauagccugucuuucagaucucaaaggcucuuuucagagccaccaaaaaaaaaaaaaaaaaaaaaaaaaaaaaaaaaaaaaaaaaaaaaaaaaaaaaaaaaaaaaaaaaaaaaaaaaaaaaaaaaaaaaaaaaaaaaaaaaaaaa

SEQ ID NO: 23531 - RNA, 4085 nt, Artificial Sequence
  SARS-CoV-2/Wuhan/WIV05/2019__EPI_ISL_402128 spike protein mRNA gc (1-1273)(K986P_V987P_K986P_V987P_L18F_D80A_D215G_L242del_A243del_ L244del_R246I_K417N_E484K_N501Y_D614G_A701V) R10384
aggagagucccgcagucggcguccagcggcucugcuuguucgugugugugucguugcaggccuuauucaagcuuaccauguucguguuccugguccuccugccccuggugagcucccagugcgugaacuucaccacccgcacgcagcugccgcccgccuacaccaacagcuucacccggggcgucuacuaccccgacaagguguuccgcuccagcgugcugcacuccacccaggaccucuuccugcccuucuucagcaacgucacgugguuccacgccauccacguguccgggaccaacggcaccaagcgguucgccaacccggugcugcccuucaacgacggggucuacuucgcgagcaccgagaaguccaacaucauccgcggcuggaucuucgggacgacccucgacagcaagacccagucccugcugaucgugaacaacgccaccaacguggucaucaaggugugcgaguuccaguucugcaacgaccccuuccucggcguguacuaccacaagaacaacaagagcuggauggaguccgaguuccgggucuacagcuccgccaacaacugcacguucgaguacgugagccagcccuuccugauggaccuggagggcaagcaggggaacuucaagaaccuccgcgaguucguguucaagaacaucgacggcuacuucaagaucuacuccaagcacaccccgaucaaccugguccggggccugccccagggguucagcgcccucgagccccugguggaccugcccaucggcaucaacaucacccgcuuccagacccuccacaucuccuaccucacgccgggggacagcagcuccggcuggaccgcgggcgccgccgccuacuacgugggguaccugcagccccgcaccuuccugcucaaguacaacgagaacggcaccaucacggacgcggucgacugcgcccuggacccccugagcgagaccaagugcacccucaaguccuucaccguggagaaggggaucuaccagacgagcaacuuccgggugcagcccaccgaguccaucguccgcuucccgaacaucaccaaccugugccccuucggcgagguguucaacgccacccgguucgccagcgucuacgccuggaaccgcaagcggaucuccaacugcguggcggacuacagcgugcuguacaacuccgccagcuucuccacguucaagugcuacggcgucagccccaccaagcucaacgaccugugcuucaccaacguguacgccgacuccuucgugauccgcggggacgagguccggcagaucgcccccggccagaccgggaacaucgccgacuacaacuacaagcugccggacgacuucacgggcugcgugaucgcguggaacagcaacaaccucgacuccaaggucgggggcaacuacaacuaccuguaccgccuguuccgcaagagcaaccucaagcccuucgagcgggacaucuccaccgagaucuaccaggccggcagcacccccugcaacggggugaagggcuucaacugcuacuucccccugcaguccuacggguuccagccgaccuacggcgugggguaccagcccuaccggguggucgugcugagcuucgagcuccugcacgcccccgccacggugugcggccccaagaaguccaccaaccuggucaagaacaagugcgugaacuucaacuucaacggccucaccgggaccggcgugcugaccgagagcaacaagaaguuccugccguuccagcaguucgggcgcgacaucgccgacacgaccgacgcgguccgcgacccccagacccuggagauccucgacaucacccccugcagcuucggcgggguguccgugaucacgccgggcaccaacaccagcaaccaggucgccgugcuguaccagggcgugaacugcaccgagguccccguggccauccacgccgaccagcugacgcccaccuggcggguguacuccaccggcagcaacgucuuccagacccgcgccgggugccucaucggcgcggagcacgugaacaacuccuacgagugcgacauccccaucggggccggcaucugcgccagcuaccagacgcagaccaacuccccgcggcgcgcccggagcguggcgucccagagcaucaucgccuacaccaugucccugggcguggagaacagcgucgccuacuccaacaacagcaucgccauccccaccaacuucacgaucuccgugaccaccgagauccugcccgugagcaugaccaagacgagcgucgacugcaccauguacaucugcggggacuccaccgagugcagcaaccuccugcugcaguacggcuccuucugcacccagcucaaccgcgcgcugacggggaucgccguggagcaggacaagaacacccaggagguguucgcccaggucaagcagaucuacaagacgcccccgaucaaggacuucggcggguucaacuucagccagauccugcccgaccccuccaagcccagcaagcgguccuucaucgaggaccuccuguucaacaaggugacccuggccgacgccggcuucaucaagcaguacggcgacugccucggggacaucgcggcccgcgaccugaucugcgcccagaaguucaacggccugaccgugcucccgccccugcugaccgacgagaugaucgcccaguacaccagcgcccuccuggcggggaccaucacguccggcuggaccuucggggccggcgccgcccugcagauccccuucgcgaugcagauggccuaccgguucaacggcaucggggucacccagaacgugcucuacgagaaccagaagcugaucgccaaccaguucaacagcgccaucggcaagauccaggacucccugagcuccaccgccagcgcgcucgggaagcugcaggacguggucaaccagaacgcccaggcccugaacacgcucgugaagcagcuguccagcaacuucggcgccaucuccagcgugcugaacgacauccucucccgccuggacccgcccgaggccgaggugcagaucgaccggcugaucaccgggcgccuccagagccugcagaccuacgugacccagcagcugauccgggcggccgagauccgcgccagcgccaaccucgccgcgaccaagauguccgagugcguccugggccagagcaagcggguggacuucugcggcaagggguaccaccugauguccuucccccagagcgccccgcacggcguggucuuccuccacgugacguacguccccgcccaggagaagaacuucaccaccgcccccgcgaucugccacgacgggaaggcccacuucccccgcgagggcguguucguguccaacgggacccacugguucgucacgcagcggaacuucuacgagccgcagaucaucaccaccgacaacaccuucgugagcggcaacugcgacguggucaucggcaucgugaacaacacgguguacgacccccugcagcccgagcuggacuccuucaaggaggagcucgacaaguacuucaagaaccacaccagccccgacgucgaccugggggacaucuccggcaucaacgccagcguggugaacauccagaaggagaucgaccgccugaacgaggucgccaagaaccucaacgagucccugaucgaccugcaggagcucgggaaguacgagcaguacaucaaguggccgugguacaucuggcugggcuucaucgccggccugaucgcgaucgugauggugaccaucaugcucugcugcaugaccagcugcugcuccugccugaaggggugcugcagcugcggcuccugcugcaaguucgacgaggacgacagcgagcccguccugaagggggugaagcuccacuacacgugaggacuagucccuguucccagagcccacuuuuuuuucuuuuuuugaaauaaaauagccugucuuucagaucucaaaggcucuuuucagagccaccaaaaaaaaaaaaaaaaaaaaaaaaaaaaaaaaaaaaaaaaaaaaaaaaaaaaaaaaaaaaaaaaaaaaaaaaaaaaaaaaaaaaaaaaaaaaaaaaaaaaa

SEQ ID NO: 23532 - RNA, 4094 nt, Artificial Sequence
  SARS-CoV-2/Wuhan/WIV05/2019__EPI_ISL_402128 spike protein mRNA gc (1-1273)(K986P_V987P_K986P_V987P_E484K_D614G)
aggagagucccgcagucggcguccagcggcucugcuuguucgugugugugucguugcaggccuuauucaagcuuaccauguucguguuccugguccuccugccccuggugagcucccagugcgugaaccucaccacccgcacgcagcugccgcccgccuacaccaacagcuucacccggggcgucuacuaccccgacaagguguuccgcuccagcgugcugcacuccacccaggaccucuuccugcccuucuucagcaacgucacgugguuccacgccauccacguguccgggaccaacggcaccaagcgguucgacaacccggugcugcccuucaacgacggggucuacuucgcgagcaccgagaaguccaacaucauccgcggcuggaucuucgggacgacccucgacagcaagacccagucccugcugaucgugaacaacgccaccaacguggucaucaaggugugcgaguuccaguucugcaacgaccccuuccucggcguguacuaccacaagaacaacaagagcuggauggaguccgaguuccgggucuacagcuccgccaacaacugcacguucgaguacgugagccagcccuuccugauggaccuggagggcaagcaggggaacuucaagaaccuccgcgaguucguguucaagaacaucgacggcuacuucaagaucuacuccaagcacaccccgaucaaccugguccgggaccugccccagggguucagcgcccucgagccccugguggaccugcccaucggcaucaacaucacccgcuuccagacccuccuggcccugcaccgguccuaccucacgccgggggacagcagcuccggcuggaccgcgggcgccgccgccuacuacgugggguaccugcagccccgcaccuuccugcucaaguacaacgagaacggcaccaucacggacgcggucgacugcgcccuggacccccugagcgagaccaagugcacccucaaguccuucaccguggagaaggggaucuaccagacgagcaacuuccgggugcagcccaccgaguccaucguccgcuucccgaacaucaccaaccugugccccuucggcgagguguucaacgccacccgguucgccagcgucuacgccuggaaccgcaagcggaucuccaacugcguggcggacuacagcgugcuguacaacuccgccagcuucuccacguucaagugcuacggcgucagccccaccaagcucaacgaccugugcuucaccaacguguacgccgacuccuucgugauccgcggggacgagguccggcagaucgcccccggccagaccgggaagaucgccgacuacaacuacaagcugccggacgacuucacgggcugcgugaucgcguggaacagcaacaaccucgacuccaaggucgggggcaacuacaacuaccuguaccgccuguuccgcaagagcaaccucaagcccuucgagcgggacaucuccaccgagaucuaccaggccggcagcacccccugcaacggggugaagggcuucaacugcuacuucccccugcaguccuacggguuccagccgaccaacggcgugggguaccagcccuaccggguggucgugcugagcuucgagcuccugcacgcccccgccacggugugcggccccaagaaguccaccaaccuggucaagaacaagugcgugaacuucaacuucaacggccucaccgggaccggcgugcugaccgagagcaacaagaaguuccugccguuccagcaguucgggcgcgacaucgccgacacgaccgacgcgguccgcgacccccagacccuggagauccucgacaucacccccugcagcuucggcgggguguccgugaucacgccgggcaccaacaccagcaaccaggucgccgugcuguaccagggcgugaacugcaccgagguccccguggccauccacgccgaccagcugacgcccaccuggcggguguacuccaccggcagcaacgucuuccagacccgcgccgggugccucaucggcgcggagcacgugaacaacuccuacgagugcgacauccccaucggggccggcaucugcgccagcuaccagacgcagaccaacuccccgcggcgcgcccggagcguggcgucccagagcaucaucgccuacaccaugucccugggcgccgagaacagcgucgccuacuccaacaacagcaucgccauccccaccaacuucacgaucuccgugaccaccgagauccugcccgugagcaugaccaagacgagcgucgacugcaccauguacaucugcggggacuccaccgagugcagcaaccuccugcugcaguacggcuccuucugcacccagcucaaccgcgcgcugacggggaucgccguggagcaggacaagaacacccaggagguguucgcccaggucaagcagaucuacaagacgcccccgaucaaggacuucggcggguucaacuucagccagauccugcccgaccccuccaagcccagcaagcgguccuucaucgaggaccuccuguucaacaaggugacccuggccgacgccggcuucaucaagcaguacggcgacugccucggggacaucgcggcccgcgaccugaucugcgcccagaaguucaacggccugaccgugcucccgccccugcugaccgacgagaugaucgcccaguacaccagcgcccuccuggcggggaccaucacguccggcuggaccuucggggccggcgccgcccugcagauccccuucgcgaugcagauggccuaccgguucaacggcaucggggucacccagaacgugcucuacgagaaccagaagcugaucgccaaccaguucaacagcgccaucggcaagauccaggacucccugagcuccaccgccagcgcgcucgggaagcugcaggacguggucaaccagaacgcccaggcccugaacacgcucgugaagcagcuguccagcaacuucggcgccaucuccagcgugcugaacgacauccucucccgccuggacccgcccgaggccgaggugcagaucgaccggcugaucaccgggcgccuccagagccugcagaccuacgugacccagcagcugauccgggcggccgagauccgcgccagcgccaaccucgccgcgaccaagauguccgagugcguccugggccagagcaagcggguggacuucugcggcaagggguaccaccugauguccuucccccagagcgccccgcacggcguggucuuccuccacgugacguacguccccgcccaggagaagaacuucaccaccgcccccgcgaucugccacgacgggaaggcccacuucccccgcgagggcguguucguguccaacgggacccacugguucgucacgcagcggaacuucuacgagccgcagaucaucaccaccgacaacaccuucgugagcggcaacugcgacguggucaucggcaucgugaacaacacgguguacgacccccugcagcccgagcuggacuccuucaaggaggagcucgacaaguacuucaagaaccacaccagccccgacgucgaccugggggacaucuccggcaucaacgccagcguggugaacauccagaaggagaucgaccgccugaacgaggucgccaagaaccucaacgagucccugaucgaccugcaggagcucgggaaguacgagcaguacaucaaguggccgugguacaucuggcugggcuucaucgccggccugaucgcgaucgugauggugaccaucaugcucugcugcaugaccagcugcugcuccugccugaaggggugcugcagcugcggcuccugcugcaaguucgacgaggacgacagcgagcccguccugaagggggugaagcuccacuacacgugaggacuagucccuguucccagagcccacuuuuuuuucuuuuuuugaaauaaaauagccugucuuucagaucucaaaggcucuuuucagagccaccaaaaaaaaaaaaaaaaaaaaaaaaaaaaaaaaaaaaaaaaaaaaaaaaaaaaaaaaaaaaaaaaaaaaaaaaaaaaaaaaaaaaaaaaaaaaaaaaaaaaa

SEQ ID NO: 23533 - RNA, 4094 nt, Artificial Sequence
  SARS-CoV-2/Wuhan/WIV05/2019__EPI_ISL_402128 spike protein mRNA gc (1-1273)(K986P_V987P_K986P_V987P_L18F_T20N_P26S_D138Y_R190S_K417T _E484K_N501Y_D614G_H655Y_T1027I) R10385
aggagagucccgcagucggcguccagcggcucugcuuguucgugugugugucguugcaggccuuauucaagcuuaccauguucguguuccugguccuccugccccuggugagcucccagugcgugaacuucaccaaccgcacgcagcugccgagcgccuacaccaacagcuucacccggggcgucuacuaccccgacaagguguuccgcuccagcgugcugcacuccacccaggaccucuuccugcccuucuucagcaacgucacgugguuccacgccauccacguguccgggaccaacggcaccaagcgguucgacaacccggugcugcccuucaacgacggggucuacuucgcgagcaccgagaaguccaacaucauccgcggcuggaucuucgggacgacccucgacagcaagacccagucccugcugaucgugaacaacgccaccaacguggucaucaaggugugcgaguuccaguucugcaacuaccccuuccucggcguguacuaccacaagaacaacaagagcuggauggaguccgaguuccgggucuacagcuccgccaacaacugcacguucgaguacgugagccagcccuuccugauggaccuggagggcaagcaggggaacuucaagaaccucagcgaguucguguucaagaacaucgacggcuacuucaagaucuacuccaagcacaccccgaucaaccugguccgggaccugccccagggguucagcgcccucgagccccugguggaccugcccaucggcaucaacaucacccgcuuccagacccuccuggcccugcaccgguccuaccucacgccgggggacagcagcuccggcuggaccgcgggcgccgccgccuacuacgugggguaccugcagccccgcaccuuccugcucaaguacaacgagaacggcaccaucacggacgcggucgacugcgcccuggacccccugagcgagaccaagugcacccucaaguccuucaccguggagaaggggaucuaccagacgagcaacuuccgggugcagcccaccgaguccaucguccgcuucccgaacaucaccaaccugugccccuucggcgagguguucaacgccacccgguucgccagcgucuacgccuggaaccgcaagcggaucuccaacugcguggcggacuacagcgugcuguacaacuccgccagcuucuccacguucaagugcuacggcgucagccccaccaagcucaacgaccugugcuucaccaacguguacgccgacuccuucgugauccgcggggacgagguccggcagaucgcccccggccagaccgggaccaucgccgacuacaacuacaagcugccggacgacuucacgggcugcgugaucgcguggaacagcaacaaccucgacuccaaggucgggggcaacuacaacuaccuguaccgccuguuccgcaagagcaaccucaagcccuucgagcgggacaucuccaccgagaucuaccaggccggcagcacccccugcaacggggugaagggcuucaacugcuacuucccccugcaguccuacggguuccagccgaccuacggcgugggguaccagcccuaccggguggucgugcugagcuucgagcuccugcacgcccccgccacggugugcggccccaagaaguccaccaaccuggucaagaacaagugcgugaacuucaacuucaacggccucaccgggaccggcgugcugaccgagagcaacaagaaguuccugccguuccagcaguucgggcgcgacaucgccgacacgaccgacgcgguccgcgacccccagacccuggagauccucgacaucacccccugcagcuucggcgggguguccgugaucacgccgggcaccaacaccagcaaccaggucgccgugcuguaccagggcgugaacugcaccgagguccccguggccauccacgccgaccagcugacgcccaccuggcggguguacuccaccggcagcaacgucuuccagacccgcgccgggugccucaucggcgcggaguacgugaacaacuccuacgagugcgacauccccaucggggccggcaucugcgccagcuaccagacgcagaccaacuccccgcggcgcgcccggagcguggcgucccagagcaucaucgccuacaccaugucccugggcgccgagaacagcgucgccuacuccaacaacagcaucgccauccccaccaacuucacgaucuccgugaccaccgagauccugcccgugagcaugaccaagacgagcgucgacugcaccauguacaucugcggggacuccaccgagugcagcaaccuccugcugcaguacggcuccuucugcacccagcucaaccgcgcgcugacggggaucgccguggagcaggacaagaacacccaggagguguucgcccaggucaagcagaucuacaagacgcccccgaucaaggacuucggcggguucaacuucagccagauccugcccgaccccuccaagcccagcaagcgguccuucaucgaggaccuccuguucaacaaggugacccuggccgacgccggcuucaucaagcaguacggcgacugccucggggacaucgcggcccgcgaccugaucugcgcccagaaguucaacggccugaccgugcucccgccccugcugaccgacgagaugaucgcccaguacaccagcgcccuccuggcggggaccaucacguccggcuggaccuucggggccggcgccgcccugcagauccccuucgcgaugcagauggccuaccgguucaacggcaucggggucacccagaacgugcucuacgagaaccagaagcugaucgccaaccaguucaacagcgccaucggcaagauccaggacucccugagcuccaccgccagcgcgcucgggaagcugcaggacguggucaaccagaacgcccaggcccugaacacgcucgugaagcagcuguccagcaacuucggcgccaucuccagcgugcugaacgacauccucucccgccuggacccgcccgaggccgaggugcagaucgaccggcugaucaccgggcgccuccagagccugcagaccuacgugacccagcagcugauccgggcggccgagauccgcgccagcgccaaccucgccgcgaucaagauguccgagugcguccugggccagagcaagcggguggacuucugcggcaagggguaccaccugauguccuucccccagagcgccccgcacggcguggucuuccuccacgugacguacguccccgcccaggagaagaacuucaccaccgcccccgcgaucugccacgacgggaaggcccacuucccccgcgagggcguguucguguccaacgggacccacugguucgucacgcagcggaacuucuacgagccgcagaucaucaccaccgacaacaccuucgugagcggcaacugcgacguggucaucggcaucgugaacaacacgguguacgacccccugcagcccgagcuggacuccuucaaggaggagcucgacaaguacuucaagaaccacaccagccccgacgucgaccugggggacaucuccggcaucaacgccagcguggugaacauccagaaggagaucgaccgccugaacgaggucgccaagaaccucaacgagucccugaucgaccugcaggagcucgggaaguacgagcaguacaucaaguggccgugguacaucuggcugggcuucaucgccggccugaucgcgaucgugauggugaccaucaugcucugcugcaugaccagcugcugcuccugccugaaggggugcugcagcugcggcuccugcugcaaguucgacgaggacgacagcgagcccguccugaagggggugaagcuccacuacacgugaggacuagucccuguucccagagcccacuuuuuuuucuuuuuuugaaauaaaauagccugucuuucagaucucaaaggcucuuuucagagccaccaaaaaaaaaaaaaaaaaaaaaaaaaaaaaaaaaaaaaaaaaaaaaaaaaaaaaaaaaaaaaaaaaaaaaaaaaaaaaaaaaaaaaaaaaaaaaaaaaaaaa

SEQ ID NO: 23534 - RNA, 4094 nt, Artificial Sequence
  SARS-CoV-2/Wuhan/WIV05/2019__EPI_ISL_402128 spike protein mRNA gc (1-1273)(K986P_V987P_K986P_V987P_S13I_W152C_L452R_D614G)
aggagagucccgcagucggcguccagcggcucugcuuguucgugugugugucguugcaggccuuauucaagcuuaccauguucguguuccugguccuccugccccuggugagcauccagugcgugaaccucaccacccgcacgcagcugccgcccgccuacaccaacagcuucacccggggcgucuacuaccccgacaagguguuccgcuccagcgugcugcacuccacccaggaccucuuccugcccuucuucagcaacgucacgugguuccacgccauccacguguccgggaccaacggcaccaagcgguucgacaacccggugcugcccuucaacgacggggucuacuucgcgagcaccgagaaguccaacaucauccgcggcuggaucuucgggacgacccucgacagcaagacccagucccugcugaucgugaacaacgccaccaacguggucaucaaggugugcgaguuccaguucugcaacgaccccuuccucggcguguacuaccacaagaacaacaagagcugcauggaguccgaguuccgggucuacagcuccgccaacaacugcacguucgaguacgugagccagcccuuccugauggaccuggagggcaagcaggggaacuucaagaaccuccgcgaguucguguucaagaacaucgacggcuacuucaagaucuacuccaagcacaccccgaucaaccugguccgggaccugccccagggguucagcgcccucgagccccugguggaccugcccaucggcaucaacaucacccgcuuccagacccuccuggcccugcaccgguccuaccucacgccgggggacagcagcuccggcuggaccgcgggcgccgccgccuacuacgugggguaccugcagccccgcaccuuccugcucaaguacaacgagaacggcaccaucacggacgcggucgacugcgcccuggacccccugagcgagaccaagugcacccucaaguccuucaccguggagaaggggaucuaccagacgagcaacuuccgggugcagcccaccgaguccaucguccgcuucccgaacaucaccaaccugugccccuucggcgagguguucaacgccacccgguucgccagcgucuacgccuggaaccgcaagcggaucuccaacugcguggcggacuacagcgugcuguacaacuccgccagcuucuccacguucaagugcuacggcgucagccccaccaagcucaacgaccugugcuucaccaacguguacgccgacuccuucgugauccgcggggacgagguccggcagaucgcccccggccagaccgggaagaucgccgacuacaacuacaagcugccggacgacuucacgggcugcgugaucgcguggaacagcaacaaccucgacuccaaggucgggggcaacuacaacuaccgcuaccgccuguuccgcaagagcaaccucaagcccuucgagcgggacaucuccaccgagaucuaccaggccggcagcacccccugcaacgggguggagggcuucaacugcuacuucccccugcaguccuacggguuccagccgaccaacggcgugggguaccagcccuaccggguggucgugcugagcuucgagcuccugcacgcccccgccacggugugcggccccaagaaguccaccaaccuggucaagaacaagugcgugaacuucaacuucaacggccucaccgggaccggcgugcugaccgagagcaacaagaaguuccugccguuccagcaguucgggcgcgacaucgccgacacgaccgacgcgguccgcgacccccagacccuggagauccucgacaucacccccugcagcuucggcgggguguccgugaucacgccgggcaccaacaccagcaaccaggucgccgugcuguaccagggcgugaacugcaccgagguccccguggccauccacgccgaccagcugacgcccaccuggcggguguacuccaccggcagcaacgucuuccagacccgcgccgggugccucaucggcgcggagcacgugaacaacuccuacgagugcgacauccccaucggggccggcaucugcgccagcuaccagacgcagaccaacuccccgcggcgcgcccggagcguggcgucccagagcaucaucgccuacaccaugucccugggcgccgagaacagcgucgccuacuccaacaacagcaucgccauccccaccaacuucacgaucuccgugaccaccgagauccugcccgugagcaugaccaagacgagcgucgacugcaccauguacaucugcggggacuccaccgagugcagcaaccuccugcugcaguacggcuccuucugcacccagcucaaccgcgcgcugacggggaucgccguggagcaggacaagaacacccaggagguguucgcccaggucaagcagaucuacaagacgcccccgaucaaggacuucggcggguucaacuucagccagauccugcccgaccccuccaagcccagcaagcgguccuucaucgaggaccuccuguucaacaaggugacccuggccgacgccggcuucaucaagcaguacggcgacugccucggggacaucgcggcccgcgaccugaucugcgcccagaaguucaacggccugaccgugcucccgccccugcugaccgacgagaugaucgcccaguacaccagcgcccuccuggcggggaccaucacguccggcuggaccuucggggccggcgccgcccugcagauccccuucgcgaugcagauggccuaccgguucaacggcaucggggucacccagaacgugcucuacgagaaccagaagcugaucgccaaccaguucaacagcgccaucggcaagauccaggacucccugagcuccaccgccagcgcgcucgggaagcugcaggacguggucaaccagaacgcccaggcccugaacacgcucgugaagcagcuguccagcaacuucggcgccaucuccagcgugcugaacgacauccucucccgccuggacccgcccgaggccgaggugcagaucgaccggcugaucaccgggcgccuccagagccugcagaccuacgugacccagcagcugauccgggcggccgagauccgcgccagcgccaaccucgccgcgaccaagauguccgagugcguccugggccagagcaagcggguggacuucugcggcaagggguaccaccugauguccuucccccagagcgccccgcacggcguggucuuccuccacgugacguacguccccgcccaggagaagaacuucaccaccgcccccgcgaucugccacgacgggaaggcccacuucccccgcgagggcguguucguguccaacgggacccacugguucgucacgcagcggaacuucuacgagccgcagaucaucaccaccgacaacaccuucgugagcggcaacugcgacguggucaucggcaucgugaacaacacgguguacgacccccugcagcccgagcuggacuccuucaaggaggagcucgacaaguacuucaagaaccacaccagccccgacgucgaccugggggacaucuccggcaucaacgccagcguggugaacauccagaaggagaucgaccgccugaacgaggucgccaagaaccucaacgagucccugaucgaccugcaggagcucgggaaguacgagcaguacaucaaguggccgugguacaucuggcugggcuucaucgccggccugaucgcgaucgugauggugaccaucaugcucugcugcaugaccagcugcugcuccugccugaaggggugcugcagcugcggcuccugcugcaaguucgacgaggacgacagcgagcccguccugaagggggugaagcuccacuacacgugaggacuagucccuguucccagagcccacuuuuuuuucuuuuuuugaaauaaaauagccugucuuucagaucucaaaggcucuuuucagagccaccaaaaaaaaaaaaaaaaaaaaaaaaaaaaaaaaaaaaaaaaaaaaaaaaaaaaaaaaaaaaaaaaaaaaaaaaaaaaaaaaaaaaaaaaaaaaaaaaaaaaa

SEQ ID NO: 23535 - RNA, 4094 nt, Artificial Sequence
  SARS-CoV-2/Wuhan/WIV05/2019__EPI_ISL_402128 spike protein mRNA gc (1-1273)(K986P_V987P)
aggagagucccgcagucggcguccagcggcucugcuuguucgugugugugucguugcaggccuuauucaagcuuaccauguucguguuccugguccuccugccccuggugagcucccagugcgugaaccucaccacccgcacgcagcugccgcccgccuacaccaacagcuucacccggggcgucuacuaccccgacaagguguuccgcuccagcgugcugcacuccacccaggaccucuuccugcccuucuucagcaacgucacgugguuccacgccauccacguguccgggaccaacggcaccaagcgguucgacaacccggugcugcccuucaacgacggggucuacuucgcgagcaccgagaaguccaacaucauccgcggcuggaucuucgggacgacccucgacagcaagacccagucccugcugaucgugaacaacgccaccaacguggucaucaaggugugcgaguuccaguucugcaacgaccccuuccucggcguguacuaccacaagaacaacaagagcuggauggaguccgaguuccgggucuacagcuccgccaacaacugcacguucgaguacgugagccagcccuuccugauggaccuggagggcaagcaggggaacuucaagaaccuccgcgaguucguguucaagaacaucgacggcuacuucaagaucuacuccaagcacaccccgaucaaccugguccgggaccugccccagggguucagcgcccucgagccccugguggaccugcccaucggcaucaacaucacccgcuuccagacccuccuggcccugcaccgguccuaccucacgccgggggacagcagcuccggcuggaccgcgggcgccgccgccuacuacgugggguaccugcagccccgcaccuuccugcucaaguacaacgagaacggcaccaucacggacgcggucgacugcgcccuggacccccugagcgagaccaagugcacccucaaguccuucaccguggagaaggggaucuaccagacgagcaacuuccgggugcagcccaccgaguccaucguccgcuucccgaacaucaccaaccugugccccuucggcgagguguucaacgccacccgguucgccagcgucuacgccuggaaccgcaagcggaucuccaacugcguggcggacuacagcgugcuguacaacuccgccagcuucuccacguucaagugcuacggcgucagccccaccaagcucaacgaccugugcuucaccaacguguacgccgacuccuucgugauccgcggggacgagguccggcagaucgcccccggccagaccgggaagaucgccgacuacaacuacaagcugccggacgacuucacgggcugcgugaucgcguggaacagcaacaaccucgacuccaaggucgggggcaacuacaacuaccuguaccgccuguuccgcaagagcaaccucaagcccuucgagcgggacaucuccaccgagaucuaccaggccggcagcacccccugcaacgggguggagggcuucaacugcuacuucccccugcaguccuacggguuccagccgaccaacggcgugggguaccagcccuaccggguggucgugcugagcuucgagcuccugcacgcccccgccacggugugcggccccaagaaguccaccaaccuggucaagaacaagugcgugaacuucaacuucaacggccucaccgggaccggcgugcugaccgagagcaacaagaaguuccugccguuccagcaguucgggcgcgacaucgccgacacgaccgacgcgguccgcgacccccagacccuggagauccucgacaucacccccugcagcuucggcgggguguccgugaucacgccgggcaccaacaccagcaaccaggucgccgugcuguaccaggacgugaacugcaccgagguccccguggccauccacgccgaccagcugacgcccaccuggcggguguacuccaccggcagcaacgucuuccagacccgcgccgggugccucaucggcgcggagcacgugaacaacuccuacgagugcgacauccccaucggggccggcaucugcgccagcuaccagacgcagaccaacuccccgcggcgcgcccggagcguggcgucccagagcaucaucgccuacaccaugucccugggcgccgagaacagcgucgccuacuccaacaacagcaucgccauccccaccaacuucacgaucuccgugaccaccgagauccugcccgugagcaugaccaagacgagcgucgacugcaccauguacaucugcggggacuccaccgagugcagcaaccuccugcugcaguacggcuccuucugcacccagcucaaccgcgcgcugacggggaucgccguggagcaggacaagaacacccaggagguguucgcccaggucaagcagaucuacaagacgcccccgaucaaggacuucggcggguucaacuucagccagauccugcccgaccccuccaagcccagcaagcgguccuucaucgaggaccuccuguucaacaaggugacccuggccgacgccggcuucaucaagcaguacggcgacugccucggggacaucgcggcccgcgaccugaucugcgcccagaaguucaacggccugaccgugcucccgccccugcugaccgacgagaugaucgcccaguacaccagcgcccuccuggcggggaccaucacguccggcuggaccuucggggccggcgccgcccugcagauccccuucgcgaugcagauggccuaccgguucaacggcaucggggucacccagaacgugcucuacgagaaccagaagcugaucgccaaccaguucaacagcgccaucggcaagauccaggacucccugagcuccaccgccagcgcgcucgggaagcugcaggacguggucaaccagaacgcccaggcccugaacacgcucgugaagcagcuguccagcaacuucggcgccaucuccagcgugcugaacgacauccucucccgccuggacccgcccgaggccgagguccagaucgaccggcugaucaccgggcgccuccagagccugcagaccuacgugacccagcagcugauccgggcggccgagauccgcgccagcgccaaccucgccgcgaccaagauguccgagugcgugcugggccagagcaagcgggucgacuucugcggcaagggguaccaccugauguccuucccccagagcgcgccccacggcgugguguuccuccacgucacguacgugcccgcccaggagaagaacuucaccaccgccccggccaucugccacgacgggaaggcccacuucccccgcgagggcgucuucguguccaacgggacccacugguucgugacgcagcggaacuucuacgagccccagaucaucaccaccgacaacaccuucgucagcggcaacugcgacguggugaucggcaucgucaacaacacgguguacgacccccugcagccggagcuggacuccuucaaggaggagcucgacaaguacuucaagaaccacaccagccccgacguggaccugggggacaucuccggcaucaacgccagcgucgugaacauccagaaggagaucgaccgccugaacgagguggccaagaaccucaacgagucccugaucgaccugcaggagcucgggaaguacgagcaguacaucaaguggcccugguacaucuggcugggcuucaucgccggccugaucgcgaucgucauggugaccaucaugcucugcugcaugaccagcugcugcuccugccugaaggggugcugcagcugcggcuccugcugcaaguucgacgaggacgacagcgagccggugcugaagggggucaagcuccacuacacgugaggacuagucccuguucccagagcccacuuuuuuuucuuuuuuugaaauaaaauagccugucuuucagaucucaaaggcucuuuucagagccaccaaaaaaaaaaaaaaaaaaaaaaaaaaaaaaaaaaaaaaaaaaaaaaaaaaaaaaaaaaaaaaaaaaaaaaaaaaaaaaaaaaaaaaaaaaaaaaaaaaaaa

SEQ ID NO: 23536 - RNA, 4094 nt, Artificial Sequence
  SARS-CoV-2/Wuhan/WIV05/2019__EPI_ISL_402128 spike protein mRNA gc (1-1273)(K986P_V987P_ D614G)
aggagagucccgcagucggcguccagcggcucugcuuguucgugugugugucguugcaggccuuauucaagcuuaccauguucguguuccugguccuccugccccuggugagcucccagugcgugaaccucaccacccgcacgcagcugccgcccgccuacaccaacagcuucacccggggcgucuacuaccccgacaagguguuccgcuccagcgugcugcacuccacccaggaccucuuccugcccuucuucagcaacgucacgugguuccacgccauccacguguccgggaccaacggcaccaagcgguucgacaacccggugcugcccuucaacgacggggucuacuucgcgagcaccgagaaguccaacaucauccgcggcuggaucuucgggacgacccucgacagcaagacccagucccugcugaucgugaacaacgccaccaacguggucaucaaggugugcgaguuccaguucugcaacgaccccuuccucggcguguacuaccacaagaacaacaagagcuggauggaguccgaguuccgggucuacagcuccgccaacaacugcacguucgaguacgugagccagcccuuccugauggaccuggagggcaagcaggggaacuucaagaaccuccgcgaguucguguucaagaacaucgacggcuacuucaagaucuacuccaagcacaccccgaucaaccugguccgggaccugccccagggguucagcgcccucgagccccugguggaccugcccaucggcaucaacaucacccgcuuccagacccuccuggcccugcaccgguccuaccucacgccgggggacagcagcuccggcuggaccgcgggcgccgccgccuacuacgugggguaccugcagccccgcaccuuccugcucaaguacaacgagaacggcaccaucacggacgcggucgacugcgcccuggacccccugagcgagaccaagugcacccucaaguccuucaccguggagaaggggaucuaccagacgagcaacuuccgggugcagcccaccgaguccaucguccgcuucccgaacaucaccaaccugugccccuucggcgagguguucaacgccacccgguucgccagcgucuacgccuggaaccgcaagcggaucuccaacugcguggcggacuacagcgugcuguacaacuccgccagcuucuccacguucaagugcuacggcgucagccccaccaagcucaacgaccugugcuucaccaacguguacgccgacuccuucgugauccgcggggacgagguccggcagaucgcccccggccagaccgggaagaucgccgacuacaacuacaagcugccggacgacuucacgggcugcgugaucgcguggaacagcaacaaccucgacuccaaggucgggggcaacuacaacuaccuguaccgccuguuccgcaagagcaaccucaagcccuucgagcgggacaucuccaccgagaucuaccaggccggcagcacccccugcaacgggguggagggcuucaacugcuacuucccccugcaguccuacggguuccagccgaccaacggcgugggguaccagcccuaccggguggucgugcugagcuucgagcuccugcacgcccccgccacggugugcggccccaagaaguccaccaaccuggucaagaacaagugcgugaacuucaacuucaacggccucaccgggaccggcgugcugaccgagagcaacaagaaguuccugccguuccagcaguucgggcgcgacaucgccgacacgaccgacgcgguccgcgacccccagacccuggagauccucgacaucacccccugcagcuucggcgggguguccgugaucacgccgggcaccaacaccagcaaccaggucgccgugcuguaccagggcgugaacugcaccgagguccccguggccauccacgccgaccagcugacgcccaccuggcggguguacuccaccgggagcaacgucuuccagacccgcgccggcugccucaucggggcggagcacgugaacaacuccuacgagugcgacauccccaucggcgccggcaucugcgccagcuaccagacgcagaccaacuccccgcggcgcgcccggagcguggcgucccagagcaucaucgccuacaccaugucccugggggccgagaacagcgucgccuacuccaacaacagcaucgccauccccaccaacuucacgaucuccgugaccaccgagauccugcccgugagcaugaccaagacgagcgucgacugcaccauguacaucugcggcgacuccaccgagugcagcaaccuccugcugcaguacggguccuucugcacccagcucaaccgcgcgcugacgggcaucgccguggagcaggacaagaacacccaggagguguucgcccaggucaagcagaucuacaagacgcccccgaucaaggacuucgggggcuucaacuucagccagauccugcccgaccccuccaagcccagcaagcgguccuucaucgaggaccuccuguucaacaaggugacccuggccgacgccggcuucaucaagcaguacggggacugccucggcgacaucgcggcccgcgaccugaucugcgcccagaaguucaacgggcugaccgugcucccgccccugcugaccgacgagaugaucgcccaguacaccagcgcccuccuggcgggcaccaucacguccggguggaccuucggcgccggcgccgcccugcagauccccuucgcgaugcagauggccuaccgguucaacgggaucggcgucacccagaacgugcucuacgagaaccagaagcugaucgccaaccaguucaacagcgccaucgggaagauccaggacucccugagcuccaccgccagcgcgcucggcaagcugcaggacguggucaaccagaacgcccaggcccugaacacgcucgugaagcagcuguccagcaacuucggggccaucuccagcgugcugaacgacauccucucccgccuggacccgcccgaggccgagguccagaucgaccggcugaucaccggccgccuccagagccugcagaccuacgugacccagcagcugauccgggcggccgagauccgcgccagcgccaaccucgccgcgaccaagauguccgagugcgugcugggccagagcaagcgggucgacuucugcgggaagggcuaccaccugauguccuucccccagagcgcgccccacggggugguguuccuccacgucacguacgugcccgcccaggagaagaacuucaccaccgccccggccaucugccacgacggcaaggcccacuucccccgcgagggggucuucguguccaacggcacccacugguucgugacgcagcggaacuucuacgagccccagaucaucaccaccgacaacaccuucgucagcggcaacugcgacguggugaucgggaucgucaacaacacgguguacgacccccugcagccggagcuggacuccuucaaggaggagcucgacaaguacuucaagaaccacaccagccccgacguggaccugggcgacaucuccgggaucaacgccagcgucgugaacauccagaaggagaucgaccgccugaacgagguggccaagaaccucaacgagucccugaucgaccugcaggagcucggcaaguacgagcaguacaucaaguggcccugguacaucuggcugggcuucaucgccgggcugaucgcgaucgucauggugaccaucaugcucugcugcaugaccagcugcugcuccugccugaagggcugcugcagcugcggguccugcugcaaguucgacgaggacgacagcgagccggugcugaagggcgucaagcuccacuacacgugaggacuagucccuguucccagagcccacuuuuuuuucuuuuuuugaaauaaaauagccugucuuucagaucucaaaggcucuuuucagagccaccaaaaaaaaaaaaaaaaaaaaaaaaaaaaaaaaaaaaaaaaaaaaaaaaaaaaaaaaaaaaaaaaaaaaaaaaaaaaaaaaaaaaaaaaaaaaaaaaaaaaa

SEQ ID NO: 23537 - RNA, 4094 nt, Artificial Sequence
  SARS-CoV-2/Wuhan/WIV05/2019__EPI_ISL_402128 spike protein mRNA gc (1-1273)(K986P_V987P_A222V_D614G)
aggagagucccgcagucggcguccagcggcucugcuuguucgugugugugucguugcaggccuuauucaagcuuaccauguucguguuccugguccuccugccccuggugagcucccagugcgugaaccucaccacccgcacgcagcugccgcccgccuacaccaacagcuucacccggggcgucuacuaccccgacaagguguuccgcuccagcgugcugcacuccacccaggaccucuuccugcccuucuucagcaacgucacgugguuccacgccauccacguguccgggaccaacggcaccaagcgguucgacaacccggugcugcccuucaacgacggggucuacuucgcgagcaccgagaaguccaacaucauccgcggcuggaucuucgggacgacccucgacagcaagacccagucccugcugaucgugaacaacgccaccaacguggucaucaaggugugcgaguuccaguucugcaacgaccccuuccucggcguguacuaccacaagaacaacaagagcuggauggaguccgaguuccgggucuacagcuccgccaacaacugcacguucgaguacgugagccagcccuuccugauggaccuggagggcaagcaggggaacuucaagaaccuccgcgaguucguguucaagaacaucgacggcuacuucaagaucuacuccaagcacaccccgaucaaccugguccgggaccugccccagggguucagcgugcucgagccccugguggaccugcccaucggcaucaacaucacccgcuuccagacccuccuggcccugcaccgguccuaccucacgccgggggacagcagcuccggcuggaccgccggcgcggccgccuacuacgucggguaccugcagccccgcaccuuccugcucaaguacaacgagaacggcaccaucacggacgccguggacugcgcgcuggacccccugagcgagaccaagugcacccucaaguccuucaccguggagaaggggaucuaccagacgagcaacuuccggguccagcccaccgaguccaucgugcgcuucccgaacaucaccaaccugugccccuucggcgaggucuucaacgccacccgguucgccagcguguacgccuggaaccgcaagcggaucuccaacugcguggccgacuacagcguccuguacaacuccgcgagcuucuccacguucaagugcuacggcgugagccccaccaagcucaacgaccugugcuucaccaacguguacgccgacuccuucgucauccgcggggacgaggugcggcagaucgcccccggccagaccgggaagaucgccgacuacaacuacaagcugccggacgacuucacgggcugcgugaucgccuggaacagcaacaaccucgacuccaaggucgggggcaacuacaacuaccuguaccgccuguuccgcaagagcaaccucaagcccuucgagcgggacaucuccaccgagaucuaccaggcgggcagcacccccugcaacgggguggagggcuucaacugcuacuucccccugcaguccuacggguuccagccgaccaacggcgugggguaccagcccuaccgggucguggugcugagcuucgagcuccugcacgcccccgccacggucugcggccccaagaaguccaccaaccuggugaagaacaagugcgugaacuucaacuucaacggccucaccgggaccggcguccugaccgagagcaacaagaaguuccugccguuccagcaguucgggcgcgacaucgccgacacgaccgacgccgugcgcgacccccagacccuggagauccucgacaucacccccugcagcuucggcgggguguccgucaucacgccgggcaccaacaccagcaaccagguggcggugcuguaccagggcgucaacugcaccgaggugcccguggccauccacgccgaccagcugacgcccaccuggcgggucuacuccaccgggagcaacguguuccagacccgcgccggcugccucaucggggccgagcacgugaacaacuccuacgagugcgacauccccaucggcgcgggcaucugcgccagcuaccagacgcagaccaacuccccgcggcgcgcccggagcgucgccucccagagcaucaucgcguacaccaugucccugggggccgagaacagcguggccuacuccaacaacagcaucgccauccccaccaacuucacgaucuccgugaccaccgagauccugcccgucagcaugaccaagacgagcguggacugcaccauguacaucugcggcgacuccaccgagugcagcaaccuccugcugcaguacggguccuucugcacccagcucaaccgcgcccugacgggcaucgcgguggagcaggacaagaacacccaggaggucuucgcccaggugaagcagaucuacaagacgcccccgaucaaggacuucgggggcuucaacuucagccagauccugcccgaccccuccaagcccagcaagcgguccuucaucgaggaccuccuguucaacaaggugacccuggccgacgccggcuucaucaagcaguacggggacugccucggcgacaucgccgcgcgcgaccugaucugcgcccagaaguucaacgggcugaccguccucccgccccugcugaccgacgagaugaucgcccaguacaccagcgcccuccuggccggcaccaucacguccggguggaccuucggcgcgggcgccgcccugcagauccccuucgccaugcagauggcguaccgguucaacgggaucggcgugacccagaacgugcucuacgagaaccagaagcugaucgccaaccaguucaacagcgccaucgggaagauccaggacucccugagcuccaccgccagcgcccucggcaagcugcaggacgucgugaaccagaacgcgcaggcccugaacacgcucgugaagcagcuguccagcaacuucggggccaucuccagcguccugaacgacauccucucccgccuggacccgcccgaggccgaggugcagaucgaccggcugaucaccggccgccuccagagccugcagaccuacgugacccagcagcugauccgggccgcggagauccgcgccagcgccaaccucgccgccaccaagauguccgagugcguccugggccagagcaagcggguggacuucugcgggaagggcuaccaccugauguccuucccccagagcgcgccccacgggguggucuuccuccacgugacguacguccccgcccaggagaagaacuucaccaccgccccggccaucugccacgacggcaaggcgcacuucccccgcgaggggguguucguguccaacggcacccacugguucgucacgcagcggaacuucuacgagccccagaucaucaccaccgacaacaccuucgugagcggcaacugcgacguggucaucgggaucgugaacaacacgguguacgacccccugcagccggagcuggacuccuucaaggaggagcucgacaaguacuucaagaaccacaccagccccgacgucgaccugggcgacaucuccgggaucaacgccagcguggugaacauccagaaggagaucgaccgccugaacgaggucgccaagaaccucaacgagucccugaucgaccugcaggagcucggcaaguacgagcaguacaucaaguggcccugguacaucuggcugggcuucaucgccgggcugaucgccaucgugauggugaccaucaugcucugcugcaugaccagcugcugcuccugccugaagggcugcugcagcugcggguccugcugcaaguucgacgaggacgacagcgagccgguccugaagggcgugaagcuccacuacacgugaggacuagucccuguucccagagcccacuuuuuuuucuuuuuuugaaauaaaauagccugucuuucagaucucaaaggcucuuuucagagccaccaaaaaaaaaaaaaaaaaaaaaaaaaaaaaaaaaaaaaaaaaaaaaaaaaaaaaaaaaaaaaaaaaaaaaaaaaaaaaaaaaaaaaaaaaaaaaaaaaaaaa

SEQ ID NO: 23538 - RNA, 4094 nt, Artificial Sequence
  SARS-CoV-2/Wuhan/WIV05/2019__EPI_ISL_402128 spike protein mRNA gc (1-1273)(K986P_V987P_N439K_D614G)
aggagagucccgcagucggcguccagcggcucugcuuguucgugugugugucguugcaggccuuauucaagcuuaccauguucguguuccugguccuccugccccuggugagcucccagugcgugaaccucaccacccgcacgcagcugccgcccgccuacaccaacagcuucacccggggcgucuacuaccccgacaagguguuccgcuccagcgugcugcacuccacccaggaccucuuccugcccuucuucagcaacgucacgugguuccacgccauccacguguccgggaccaacggcaccaagcgguucgacaacccggugcugcccuucaacgacggggucuacuucgcgagcaccgagaaguccaacaucauccgcggcuggaucuucgggacgacccucgacagcaagacccagucccugcugaucgugaacaacgccaccaacguggucaucaaggugugcgaguuccaguucugcaacgaccccuuccucggcguguacuaccacaagaacaacaagagcuggauggaguccgaguuccgggucuacagcuccgccaacaacugcacguucgaguacgugagccagcccuuccugauggaccuggagggcaagcaggggaacuucaagaaccuccgcgaguucguguucaagaacaucgacggcuacuucaagaucuacuccaagcacaccccgaucaaccugguccgggaccugccccagggguucagcgcccucgagccccugguggaccugcccaucggcaucaacaucacccgcuuccagacccuccuggcccugcaccgguccuaccucacgccgggggacagcagcuccggcuggaccgcgggcgccgccgccuacuacgugggguaccugcagccccgcaccuuccugcucaaguacaacgagaacggcaccaucacggacgcggucgacugcgcccuggacccccugagcgagaccaagugcacccucaaguccuucaccguggagaaggggaucuaccagacgagcaacuuccgggugcagcccaccgaguccaucguccgcuucccgaacaucaccaaccugugccccuucggcgagguguucaacgccacccgguucgccagcgucuacgccuggaaccgcaagcggaucuccaacugcguggcggacuacagcgugcuguacaacuccgccagcuucuccacguucaagugcuacggcgucagccccaccaagcucaacgaccugugcuucaccaacguguacgccgacuccuucgugauccgcggggacgagguccggcagaucgcccccggccagaccgggaagaucgccgacuacaacuacaagcugccggacgacuucacgggcugcgugaucgcguggaacagcaagaaccucgacuccaaggucgggggcaacuacaacuaccuguaccgccuguuccgcaagagcaaccucaagcccuucgagcgggacaucuccaccgagaucuaccaggccggcagcacccccugcaacgggguggagggcuucaacugcuacuucccccugcaguccuacggguuccagccgaccaacggcgugggguaccagcccuaccggguggucgugcugagcuucgagcuccugcacgcccccgccacggugugcggccccaagaaguccaccaaccuggucaagaacaagugcgugaacuucaacuucaacggccucaccgggaccggcgugcugaccgagagcaacaagaaguuccugccguuccagcaguucgggcgcgacaucgccgacacgaccgacgcgguccgcgacccccagacccuggagauccucgacaucacccccugcagcuucggcgggguguccgugaucacgccgggcaccaacaccagcaaccaggucgccgugcuguaccagggcgugaacugcaccgagguccccguggccauccacgccgaccagcugacgcccaccuggcggguguacuccaccgggagcaacgucuuccagacccgcgccggcugccucaucggggcggagcacgugaacaacuccuacgagugcgacauccccaucggcgccggcaucugcgccagcuaccagacgcagaccaacuccccgcggcgcgcccggagcguggcgucccagagcaucaucgccuacaccaugucccugggggccgagaacagcgucgccuacuccaacaacagcaucgccauccccaccaacuucacgaucuccgugaccaccgagauccugcccgugagcaugaccaagacgagcgucgacugcaccauguacaucugcggcgacuccaccgagugcagcaaccuccugcugcaguacggguccuucugcacccagcucaaccgcgcgcugacgggcaucgccguggagcaggacaagaacacccaggagguguucgcccaggucaagcagaucuacaagacgcccccgaucaaggacuucgggggcuucaacuucagccagauccugcccgaccccuccaagcccagcaagcgguccuucaucgaggaccuccuguucaacaaggugacccuggccgacgccggcuucaucaagcaguacggggacugccucggcgacaucgcggcccgcgaccugaucugcgcccagaaguucaacgggcugaccgugcucccgccccugcugaccgacgagaugaucgcccaguacaccagcgcccuccuggcgggcaccaucacguccggguggaccuucggcgccggcgccgcccugcagauccccuucgcgaugcagauggccuaccgguucaacgggaucggcgucacccagaacgugcucuacgagaaccagaagcugaucgccaaccaguucaacagcgccaucgggaagauccaggacucccugagcuccaccgccagcgcgcucggcaagcugcaggacguggucaaccagaacgcccaggcccugaacacgcucgugaagcagcuguccagcaacuucggggccaucuccagcgugcugaacgacauccucucccgccuggacccgcccgaggccgagguccagaucgaccggcugaucaccggccgccuccagagccugcagaccuacgugacccagcagcugauccgggcggccgagauccgcgccagcgccaaccucgccgcgaccaagauguccgagugcgugcugggccagagcaagcgggucgacuucugcgggaagggcuaccaccugauguccuucccccagagcgcgccccacggggugguguuccuccacgucacguacgugcccgcccaggagaagaacuucaccaccgccccggccaucugccacgacggcaaggcccacuucccccgcgagggggucuucguguccaacggcacccacugguucgugacgcagcggaacuucuacgagccccagaucaucaccaccgacaacaccuucgucagcggcaacugcgacguggugaucgggaucgucaacaacacgguguacgacccccugcagccggagcuggacuccuucaaggaggagcucgacaaguacuucaagaaccacaccagccccgacguggaccugggcgacaucuccgggaucaacgccagcgucgugaacauccagaaggagaucgaccgccugaacgagguggccaagaaccucaacgagucccugaucgaccugcaggagcucggcaaguacgagcaguacaucaaguggcccugguacaucuggcugggcuucaucgccgggcugaucgcgaucgucauggugaccaucaugcucugcugcaugaccagcugcugcuccugccugaagggcugcugcagcugcggguccugcugcaaguucgacgaggacgacagcgagccggugcugaagggcgucaagcuccacuacacgugaggacuagucccuguucccagagcccacuuuuuuuucuuuuuuugaaauaaaauagccugucuuucagaucucaaaggcucuuuucagagccaccaaaaaaaaaaaaaaaaaaaaaaaaaaaaaaaaaaaaaaaaaaaaaaaaaaaaaaaaaaaaaaaaaaaaaaaaaaaaaaaaaaaaaaaaaaaaaaaaaaaaa

SEQ ID NO: 23539 - RNA, 4094 nt, Artificial Sequence
  SARS-CoV-2/Wuhan/WIV05/2019__EPI_ISL_402128 spike protein mRNA gc (1-1273)(K986P_V987P_S477N_D614G)
aggagagucccgcagucggcguccagcggcucugcuuguucgugugugugucguugcaggccuuauucaagcuuaccauguucguguuccugguccuccugccccuggugagcucccagugcgugaaccucaccacccgcacgcagcugccgcccgccuacaccaacagcuucacccggggcgucuacuaccccgacaagguguuccgcuccagcgugcugcacuccacccaggaccucuuccugcccuucuucagcaacgucacgugguuccacgccauccacguguccgggaccaacggcaccaagcgguucgacaacccggugcugcccuucaacgacggggucuacuucgcgagcaccgagaaguccaacaucauccgcggcuggaucuucgggacgacccucgacagcaagacccagucccugcugaucgugaacaacgccaccaacguggucaucaaggugugcgaguuccaguucugcaacgaccccuuccucggcguguacuaccacaagaacaacaagagcuggauggaguccgaguuccgggucuacagcuccgccaacaacugcacguucgaguacgugagccagcccuuccugauggaccuggagggcaagcaggggaacuucaagaaccuccgcgaguucguguucaagaacaucgacggcuacuucaagaucuacuccaagcacaccccgaucaaccugguccgggaccugccccagggguucagcgcccucgagccccugguggaccugcccaucggcaucaacaucacccgcuuccagacccuccuggcccugcaccgguccuaccucacgccgggggacagcagcuccggcuggaccgcgggcgccgccgccuacuacgugggguaccugcagccccgcaccuuccugcucaaguacaacgagaacggcaccaucacggacgcggucgacugcgcccuggacccccugagcgagaccaagugcacccucaaguccuucaccguggagaaggggaucuaccagacgagcaacuuccgggugcagcccaccgaguccaucguccgcuucccgaacaucaccaaccugugccccuucggcgagguguucaacgccacccgguucgccagcgucuacgccuggaaccgcaagcggaucuccaacugcguggcggacuacagcgugcuguacaacuccgccagcuucuccacguucaagugcuacggcgucagccccaccaagcucaacgaccugugcuucaccaacguguacgccgacuccuucgugauccgcggggacgagguccggcagaucgcccccggccagaccgggaagaucgccgacuacaacuacaagcugccggacgacuucacgggcugcgugaucgcguggaacagcaacaaccucgacuccaaggucgggggcaacuacaacuaccuguaccgccuguuccgcaagagcaaccucaagcccuucgagcgggacaucuccaccgagaucuaccaggccggcaacacccccugcaacgggguggagggcuucaacugcuacuucccccugcagagcuacggguuccagccgaccaacggcgugggguaccagcccuaccggguggucgugcuguccuucgagcuccugcacgcccccgccacggugugcggccccaagaaguccaccaaccuggucaagaacaagugcgugaacuucaacuucaacggccucaccgggaccggcgugcugaccgagagcaacaagaaguuccugccguuccagcaguucgggcgcgacaucgccgacacgaccgacgcgguccgcgacccccagacccuggagauccucgacaucacccccugcagcuucggcggggugagcgugaucacgccgggcaccaacaccuccaaccaggucgccgugcuguaccagggcgugaacugcaccgagguccccguggccauccacgccgaccagcugacgcccaccuggcggguguacagcaccggguccaacgucuuccagacccgcgccggcugccucaucggggcggagcacgugaacaacagcuacgagugcgacauccccaucggcgccggcaucugcgccuccuaccagacgcagaccaacagcccgcggcgcgcccgguccguggcgagccaguccaucaucgccuacaccaugagccugggggccgagaacuccgucgccuacagcaacaacuccaucgccauccccaccaacuucacgaucagcgugaccaccgagauccugcccguguccaugaccaagacgagcgucgacugcaccauguacaucugcggcgacagcaccgagugcuccaaccuccugcugcaguacgggagcuucugcacccagcucaaccgcgcgcugacgggcaucgccguggagcaggacaagaacacccaggagguguucgcccaggucaagcagaucuacaagacgcccccgaucaaggacuucgggggcuucaacuucucccagauccugcccgaccccagcaagcccuccaagcggagcuucaucgaggaccuccuguucaacaaggugacccuggccgacgccggcuucaucaagcaguacggggacugccucggcgacaucgcggcccgcgaccugaucugcgcccagaaguucaacgggcugaccgugcucccgccccugcugaccgacgagaugaucgcccaguacaccuccgcccuccuggcgggcaccaucacgagcggguggaccuucggcgccggcgccgcccugcagauccccuucgcgaugcagauggccuaccgguucaacgggaucggcgucacccagaacgugcucuacgagaaccagaagcugaucgccaaccaguucaacuccgccaucgggaagauccaggacagccuguccagcaccgccuccgcgcucggcaagcugcaggacguggucaaccagaacgcccaggcccugaacacgcucgugaagcagcugagcuccaacuucggggccaucagcuccgugcugaacgacauccucagccgccuggacccgcccgaggccgagguccagaucgaccggcugaucaccggccgccuccagucccugcagaccuacgugacccagcagcugauccgggcggccgagauccgcgccagcgccaaccucgccgcgaccaagaugagcgagugcgugcugggccaguccaagcgggucgacuucugcgggaagggcuaccaccugaugagcuucccccaguccgcgccccacggggugguguuccuccacgucacguacgugcccgcccaggagaagaacuucaccaccgccccggccaucugccacgacggcaaggcccacuucccccgcgagggggucuucgugagcaacggcacccacugguucgugacgcagcggaacuucuacgagccccagaucaucaccaccgacaacaccuucgucuccggcaacugcgacguggugaucgggaucgucaacaacacgguguacgacccccugcagccggagcuggacagcuucaaggaggagcucgacaaguacuucaagaaccacaccucccccgacguggaccugggcgacaucagcgggaucaacgccuccgucgugaacauccagaaggagaucgaccgccugaacgagguggccaagaaccucaacgagagccugaucgaccugcaggagcucggcaaguacgagcaguacaucaaguggcccugguacaucuggcugggcuucaucgccgggcugaucgcgaucgucauggugaccaucaugcucugcugcaugaccuccugcugcagcugccugaagggcugcugcuccugcgggagcugcugcaaguucgacgaggacgacuccgagccggugcugaagggcgucaagcuccacuacacgugaggacuagucccuguucccagagcccacuuuuuuuucuuuuuuugaaauaaaauagccugucuuucagaucucaaaggcucuuuucagagccaccaaaaaaaaaaaaaaaaaaaaaaaaaaaaaaaaaaaaaaaaaaaaaaaaaaaaaaaaaaaaaaaaaaaaaaaaaaaaaaaaaaaaaaaaaaaaaaaaaaaaa

SEQ ID NO: 23540 - RNA, 4094 nt, Artificial Sequence
  SARS-CoV-2/Wuhan/WIV05/2019__EPI_ISL_402128 spike protein mRNA gc (1-1273)(K986P_V987P_N501Y_D614G)
aggagagucccgcagucggcguccagcggcucugcuuguucgugugugugucguugcaggccuuauucaagcuuaccauguucguguuccugguccuccugccccuggugagcucccagugcgugaaccucaccacccgcacgcagcugccgcccgccuacaccaacagcuucacccggggcgucuacuaccccgacaagguguuccgcuccagcgugcugcacuccacccaggaccucuuccugcccuucuucagcaacgucacgugguuccacgccauccacguguccgggaccaacggcaccaagcgguucgacaacccggugcugcccuucaacgacggggucuacuucgcgagcaccgagaaguccaacaucauccgcggcuggaucuucgggacgacccucgacagcaagacccagucccugcugaucgugaacaacgccaccaacguggucaucaaggugugcgaguuccaguucugcaacgaccccuuccucggcguguacuaccacaagaacaacaagagcuggauggaguccgaguuccgggucuacagcuccgccaacaacugcacguucgaguacgugagccagcccuuccugauggaccuggagggcaagcaggggaacuucaagaaccuccgcgaguucguguucaagaacaucgacggcuacuucaagaucuacuccaagcacaccccgaucaaccugguccgggaccugccccagggguucagcgcccucgagccccugguggaccugcccaucggcaucaacaucacccgcuuccagacccuccuggcccugcaccgguccuaccucacgccgggggacagcagcuccggcuggaccgcgggcgccgccgccuacuacgugggguaccugcagccccgcaccuuccugcucaaguacaacgagaacggcaccaucacggacgcggucgacugcgcccuggacccccugagcgagaccaagugcacccucaaguccuucaccguggagaaggggaucuaccagacgagcaacuuccgggugcagcccaccgaguccaucguccgcuucccgaacaucaccaaccugugccccuucggcgagguguucaacgccacccgguucgccagcgucuacgccuggaaccgcaagcggaucuccaacugcguggcggacuacagcgugcuguacaacuccgccagcuucuccacguucaagugcuacggcgucagccccaccaagcucaacgaccugugcuucaccaacguguacgccgacuccuucgugauccgcggggacgagguccggcagaucgcccccggccagaccgggaagaucgccgacuacaacuacaagcugccggacgacuucacgggcugcgugaucgcguggaacagcaacaaccucgacuccaaggucgggggcaacuacaacuaccuguaccgccuguuccgcaagagcaaccucaagcccuucgagcgggacaucuccaccgagaucuaccaggccggcagcacccccugcaacgggguggagggcuucaacugcuacuucccccugcaguccuacggguuccagccgaccuacggcgugggguaccagcccuaccggguggucgugcugagcuucgagcuccugcacgcccccgccacggugugcggccccaagaaguccaccaaccuggucaagaacaagugcgugaacuucaacuucaacggccucaccgggaccggcgugcugaccgagagcaacaagaaguuccugccguuccagcaguucgggcgcgacaucgccgacacgaccgacgcgguccgcgacccccagacccuggagauccucgacaucacccccugcagcuucggcgggguguccgugaucacgccgggcaccaacaccagcaaccaggucgccgugcuguaccagggcgugaacugcaccgagguccccguggccauccacgccgaccagcugacgcccaccuggcggguguacuccaccgggagcaacgucuuccagacccgcgccggcugccucaucggggcggagcacgugaacaacuccuacgagugcgacauccccaucggcgccggcaucugcgccagcuaccagacgcagaccaacuccccgcggcgcgcccggagcguggcgucccagagcaucaucgccuacaccaugucccugggggccgagaacagcgucgccuacuccaacaacagcaucgccauccccaccaacuucacgaucuccgugaccaccgagauccugcccgugagcaugaccaagacgagcgucgacugcaccauguacaucugcggcgacuccaccgagugcagcaaccuccugcugcaguacggguccuucugcacccagcucaaccgcgcgcugacgggcaucgccguggagcaggacaagaacacccaggagguguucgcccaggucaagcagaucuacaagacgcccccgaucaaggacuucgggggcuucaacuucagccagauccugcccgaccccuccaagcccagcaagcgguccuucaucgaggaccuccuguucaacaaggugacccuggccgacgccggcuucaucaagcaguacggggacugccucggcgacaucgcggcccgcgaccugaucugcgcccagaaguucaacgggcugaccgugcucccgccccugcugaccgacgagaugaucgcccaguacaccagcgcccuccuggcgggcaccaucacguccggguggaccuucggcgccggcgccgcccugcagauccccuucgcgaugcagauggccuaccgguucaacgggaucggcgucacccagaacgugcucuacgagaaccagaagcugaucgccaaccaguucaacagcgccaucgggaagauccaggacucccugagcuccaccgccagcgcgcucggcaagcugcaggacguggucaaccagaacgcccaggcccugaacacgcucgugaagcagcuguccagcaacuucggggccaucuccagcgugcugaacgacauccucucccgccuggacccgcccgaggccgagguccagaucgaccggcugaucaccggccgccuccagagccugcagaccuacgugacccagcagcugauccgggcggccgagauccgcgccagcgccaaccucgccgcgaccaagauguccgagugcgugcugggccagagcaagcgggucgacuucugcgggaagggcuaccaccugauguccuucccccagagcgcgccccacggggugguguuccuccacgucacguacgugcccgcccaggagaagaacuucaccaccgccccggccaucugccacgacggcaaggcccacuucccccgcgagggggucuucguguccaacggcacccacugguucgugacgcagcggaacuucuacgagccccagaucaucaccaccgacaacaccuucgucagcggcaacugcgacguggugaucgggaucgucaacaacacgguguacgacccccugcagccggagcuggacuccuucaaggaggagcucgacaaguacuucaagaaccacaccagccccgacguggaccugggcgacaucuccgggaucaacgccagcgucgugaacauccagaaggagaucgaccgccugaacgagguggccaagaaccucaacgagucccugaucgaccugcaggagcucggcaaguacgagcaguacaucaaguggcccugguacaucuggcugggcuucaucgccgggcugaucgcgaucgucauggugaccaucaugcucugcugcaugaccagcugcugcuccugccugaagggcugcugcagcugcggguccugcugcaaguucgacgaggacgacagcgagccggugcugaagggcgucaagcuccacuacacgugaggacuagucccuguucccagagcccacuuuuuuuucuuuuuuugaaauaaaauagccugucuuucagaucucaaaggcucuuuucagagccaccaaaaaaaaaaaaaaaaaaaaaaaaaaaaaaaaaaaaaaaaaaaaaaaaaaaaaaaaaaaaaaaaaaaaaaaaaaaaaaaaaaaaaaaaaaaaaaaaaaaaa

SEQ ID NO: 23541 - RNA, 4088 nt, Artificial Sequence
  SARS-CoV-2/Wuhan/WIV05/2019__EPI_ISL_402128 spike protein mRNA gc (1-1273)(K986P_V987P_H69del_V70del_D614G)
aggagagucccgcagucggcguccagcggcucugcuuguucgugugugugucguugcaggccuuauucaagcuuaccauguucguguuccugguccuccugccccuggugagcucccagugcgugaaccucaccacccgcacgcagcugccgcccgccuacaccaacagcuucacccggggcgucuacuaccccgacaagguguuccgcuccagcgugcugcacuccacccaggaccucuuccugcccuucuucagcaacgucacgugguuccacgccaucuccgggaccaacggcaccaagcgguucgacaacccggugcugcccuucaacgacgggguguacuucgcgagcaccgagaaguccaacaucauccgcggcuggaucuucgggacgacccucgacagcaagacccagucccugcugaucgucaacaacgccaccaacguggugaucaaggucugcgaguuccaguucugcaacgaccccuuccucggcguguacuaccacaagaacaacaagagcuggauggaguccgaguuccggguguacagcuccgccaacaacugcacguucgaguacgucagccagcccuuccugauggaccuggagggcaagcaggggaacuucaagaaccuccgcgaguucguguucaagaacaucgacggcuacuucaagaucuacuccaagcacaccccgaucaaccuggugcgggaccugccccagggguucagcgcccucgagccccuggucgaccugcccaucggcaucaacaucacccgcuuccagacccuccuggcccugcaccgguccuaccucacgccgggggacagcagcuccggcuggaccgcgggcgccgccgccuacuacgugggguaccugcagccccgcaccuuccugcucaaguacaacgagaacggcaccaucacggacgcgguggacugcgcccuggacccccugagcgagaccaagugcacccucaaguccuucaccgucgagaaggggaucuaccagacgagcaacuuccgggugcagcccaccgaguccaucgugcgcuucccgaacaucaccaaccugugccccuucggcgaggucuucaacgccacccgguucgccagcguguacgccuggaaccgcaagcggaucuccaacugcgucgcggacuacagcgugcuguacaacuccgccagcuucuccacguucaagugcuacggcgugagccccaccaagcucaacgaccugugcuucaccaacgucuacgccgacuccuucgugauccgcggggacgaggugcggcagaucgcccccggccagaccgggaagaucgccgacuacaacuacaagcugccggacgacuucacgggcugcgucaucgcguggaacagcaacaaccucgacuccaaggucgggggcaacuacaacuaccuguaccgccuguuccgcaagagcaaccucaagcccuucgagcgggacaucuccaccgagaucuaccaggccggcagcacccccugcaacgggguggagggcuucaacugcuacuucccccugcaguccuacggguuccagccgaccaacggcgugggguaccagcccuaccggguggugguccugagcuucgagcuccugcacgcccccgccacggugugcggccccaagaaguccaccaaccuggugaagaacaagugcgucaacuucaacuucaacggccucaccgggaccggcgugcugaccgagagcaacaagaaguuccugccguuccagcaguucgggcgcgacaucgccgacacgaccgacgcggugcgcgacccccagacccuggagauccucgacaucacccccugcagcuucggcggggucuccgugaucacgccgggcaccaacaccagcaaccagguggccguccuguaccagggcgugaacugcaccgaggugcccgucgccauccacgccgaccagcugacgcccaccuggcggguguacuccaccgggagcaacguguuccagacccgcgccggcugccucaucggggcggagcacgucaacaacuccuacgagugcgacauccccaucggcgccggcaucugcgccagcuaccagacgcagaccaacuccccgcggcgcgcccggagcguggcgucccagagcaucaucgccuacaccaugucccugggggccgagaacagcguggccuacuccaacaacagcaucgccauccccaccaacuucacgaucuccgucaccaccgagauccugcccgugagcaugaccaagacgagcguggacugcaccauguacaucugcggcgacuccaccgagugcagcaaccuccugcugcaguacggguccuucugcacccagcucaaccgcgcgcugacgggcaucgccgucgagcaggacaagaacacccaggagguguucgcccaggugaagcagaucuacaagacgcccccgaucaaggacuucgggggcuucaacuucagccagauccugcccgaccccuccaagcccagcaagcgguccuucaucgaggaccuccuguucaacaaggucacccuggccgacgccggcuucaucaagcaguacggggacugccucggcgacaucgcggcccgcgaccugaucugcgcccagaaguucaacgggcugaccgugcucccgccccugcugaccgacgagaugaucgcccaguacaccagcgcccuccuggcgggcaccaucacguccggguggaccuucggcgccggcgccgcccugcagauccccuucgcgaugcagauggccuaccgguucaacgggaucggcgugacccagaacguccucuacgagaaccagaagcugaucgccaaccaguucaacagcgccaucgggaagauccaggacucccugagcuccaccgccagcgcgcucggcaagcugcaggacguggugaaccagaacgcccaggcccugaacacgcucgucaagcagcuguccagcaacuucggggccaucuccagcgugcugaacgacauccucucccgccuggacccgcccgaggccgaggugcagaucgaccggcugaucaccggccgccuccagagccugcagaccuacgucacccagcagcugauccgggcggccgagauccgcgccagcgccaaccucgccgcgaccaagauguccgagugcgugcugggccagagcaagcggguggacuucugcgggaagggcuaccaccugauguccuucccccagagcgcgccccacggggucguguuccuccacgugacguacguccccgcccaggagaagaacuucaccaccgccccggccaucugccacgacggcaaggcccacuucccccgcgaggggguguucgucuccaacggcacccacugguucgugacgcagcggaacuucuacgagccccagaucaucaccaccgacaacaccuucgugagcggcaacugcgacgucgugaucgggaucgugaacaacacggucuacgacccccugcagccggagcuggacuccuucaaggaggagcucgacaaguacuucaagaaccacaccagccccgacguggaccugggcgacaucuccgggaucaacgccagcguggucaacauccagaaggagaucgaccgccugaacgagguggccaagaaccucaacgagucccugaucgaccugcaggagcucggcaaguacgagcaguacaucaaguggcccugguacaucuggcugggcuucaucgccgggcugaucgcgaucgugauggucaccaucaugcucugcugcaugaccagcugcugcuccugccugaagggcugcugcagcugcggguccugcugcaaguucgacgaggacgacagcgagccggugcugaagggcgugaagcuccacuacacgugaggacuagucccuguucccagagcccacuuuuuuuucuuuuuuugaaauaaaauagccugucuuucagaucucaaaggcucuuuucagagccaccaaaaaaaaaaaaaaaaaaaaaaaaaaaaaaaaaaaaaaaaaaaaaaaaaaaaaaaaaaaaaaaaaaaaaaaaaaaaaaaaaaaaaaaaaaaaaaaaaaaaa

SEQ ID NO: 23542 - RNA, 4094 nt, Artificial Sequence
  SARS-CoV-2/Wuhan/WIV05/2019__EPI_ISL_402128 spike protein mRNA gc (1-1273)(K986P_V987P_Y453F_D614G)
aggagagucccgcagucggcguccagcggcucugcuuguucgugugugugucguugcaggccuuauucaagcuuaccauguucguguuccugguccuccugccccuggugagcucccagugcgugaaccucaccacccgcacgcagcugccgcccgccuacaccaacagcuucacccggggcgucuacuaccccgacaagguguuccgcuccagcgugcugcacuccacccaggaccucuuccugcccuucuucagcaacgucacgugguuccacgccauccacguguccgggaccaacggcaccaagcgguucgacaacccggugcugcccuucaacgacggggucuacuucgcgagcaccgagaaguccaacaucauccgcggcuggaucuucgggacgacccucgacagcaagacccagucccugcugaucgugaacaacgccaccaacguggucaucaaggugugcgaguuccaguucugcaacgaccccuuccucggcguguacuaccacaagaacaacaagagcuggauggaguccgaguuccgggucuacagcuccgccaacaacugcacguucgaguacgugagccagcccuuccugauggaccuggagggcaagcaggggaacuucaagaaccuccgcgaguucguguucaagaacaucgacggcuacuucaagaucuacuccaagcacaccccgaucaaccugguccgggaccugccccagggguucagcgcccucgagccccugguggaccugcccaucggcaucaacaucacccgcuuccagacccuccuggcccugcaccgguccuaccucacgccgggggacagcagcuccggcuggaccgcgggcgccgccgccuacuacgugggguaccugcagccccgcaccuuccugcucaaguacaacgagaacggcaccaucacggacgcggucgacugcgcccuggacccccugagcgagaccaagugcacccucaaguccuucaccguggagaaggggaucuaccagacgagcaacuuccgggugcagcccaccgaguccaucguccgcuucccgaacaucaccaaccugugccccuucggcgagguguucaacgccacccgguucgccagcgucuacgccuggaaccgcaagcggaucuccaacugcguggcggacuacagcgugcuguacaacuccgccagcuucuccacguucaagugcuacggcgucagccccaccaagcucaacgaccugugcuucaccaacguguacgccgacuccuucgugauccgcggggacgagguccggcagaucgcccccggccagaccgggaagaucgccgacuacaacuacaagcugccggacgacuucacgggcugcgugaucgcguggaacagcaacaaccucgacuccaaggucgggggcaacuacaacuaccuguuccgccuguuccgcaagagcaaccucaagcccuucgagcgggacaucuccaccgagaucuaccaggccggcagcacccccugcaacgggguggagggcuucaacugcuacuucccccugcaguccuacggguuccagccgaccaacggcgugggguaccagcccuaccggguggucgugcugagcuucgagcuccugcacgcccccgccacggugugcggccccaagaaguccaccaaccuggucaagaacaagugcgugaacuucaacuucaacggccucaccgggaccggcgugcugaccgagagcaacaagaaguuccugccguuccagcaguucgggcgcgacaucgccgacacgaccgacgcgguccgcgacccccagacccuggagauccucgacaucacccccugcagcuucggcgggguguccgugaucacgccgggcaccaacaccagcaaccaggucgccgugcuguaccagggcgugaacugcaccgagguccccguggccauccacgccgaccagcugacgcccaccuggcggguguacuccaccgggagcaacgucuuccagacccgcgccggcugccucaucggggcggagcacgugaacaacuccuacgagugcgacauccccaucggcgccggcaucugcgccagcuaccagacgcagaccaacuccccgcggcgcgcccggagcguggcgucccagagcaucaucgccuacaccaugucccugggggccgagaacagcgucgccuacuccaacaacagcaucgccauccccaccaacuucacgaucuccgugaccaccgagauccugcccgugagcaugaccaagacgagcgucgacugcaccauguacaucugcggcgacuccaccgagugcagcaaccuccugcugcaguacggguccuucugcacccagcucaaccgcgcgcugacgggcaucgccguggagcaggacaagaacacccaggagguguucgcccaggucaagcagaucuacaagacgcccccgaucaaggacuucgggggcuucaacuucagccagauccugcccgaccccuccaagcccagcaagcgguccuucaucgaggaccuccuguucaacaaggugacccuggccgacgccggcuucaucaagcaguacggggacugccucggcgacaucgcggcccgcgaccugaucugcgcccagaaguucaacgggcugaccgugcucccgccccugcugaccgacgagaugaucgcccaguacaccagcgcccuccuggcgggcaccaucacguccggguggaccuucggcgccggcgccgcccugcagauccccuucgcgaugcagauggccuaccgguucaacgggaucggcgucacccagaacgugcucuacgagaaccagaagcugaucgccaaccaguucaacagcgccaucgggaagauccaggacucccugagcuccaccgccagcgcgcucggcaagcugcaggacguggucaaccagaacgcccaggcccugaacacgcucgugaagcagcuguccagcaacuucggggccaucuccagcgugcugaacgacauccucucccgccuggacccgcccgaggccgagguccagaucgaccggcugaucaccggccgccuccagagccugcagaccuacgugacccagcagcugauccgggcggccgagauccgcgccagcgccaaccucgccgcgaccaagauguccgagugcgugcugggccagagcaagcgggucgacuucugcgggaagggcuaccaccugauguccuucccccagagcgcgccccacggggugguguuccuccacgucacguacgugcccgcccaggagaagaacuucaccaccgccccggccaucugccacgacggcaaggcccacuucccccgcgagggggucuucguguccaacggcacccacugguucgugacgcagcggaacuucuacgagccccagaucaucaccaccgacaacaccuucgucagcggcaacugcgacguggugaucgggaucgucaacaacacgguguacgacccccugcagccggagcuggacuccuucaaggaggagcucgacaaguacuucaagaaccacaccagccccgacguggaccugggcgacaucuccgggaucaacgccagcgucgugaacauccagaaggagaucgaccgccugaacgagguggccaagaaccucaacgagucccugaucgaccugcaggagcucggcaaguacgagcaguacaucaaguggcccugguacaucuggcugggcuucaucgccgggcugaucgcgaucgucauggugaccaucaugcucugcugcaugaccagcugcugcuccugccugaagggcugcugcagcugcggguccugcugcaaguucgacgaggacgacagcgagccggugcugaagggcgucaagcuccacuacacgugaggacuagucccuguucccagagcccacuuuuuuuucuuuuuuugaaauaaaauagccugucuuucagaucucaaaggcucuuuucagagccaccaaaaaaaaaaaaaaaaaaaaaaaaaaaaaaaaaaaaaaaaaaaaaaaaaaaaaaaaaaaaaaaaaaaaaaaaaaaaaaaaaaaaaaaaaaaaaaaaaaaaa

SEQ ID NO: 23543 - RNA, 4094 nt, Artificial Sequence
  SARS-CoV-2/Wuhan/WIV05/2019__EPI_ISL_402128 spike protein mRNA gc (1-1273)(K986P_V987P_D614G_I692V)
aggagagucccgcagucggcguccagcggcucugcuuguucgugugugugucguugcaggccuuauucaagcuuaccauguucguguuccugguccuccugccccuggugagcucccagugcgugaaccucaccacccgcacgcagcugccgcccgccuacaccaacagcuucacccggggcgucuacuaccccgacaagguguuccgcuccagcgugcugcacuccacccaggaccucuuccugcccuucuucagcaacgucacgugguuccacgccauccacguguccgggaccaacggcaccaagcgguucgacaacccggugcugcccuucaacgacggggucuacuucgcgagcaccgagaaguccaacaucauccgcggcuggaucuucgggacgacccucgacagcaagacccagucccugcugaucgugaacaacgccaccaacguggucaucaaggugugcgaguuccaguucugcaacgaccccuuccucggcguguacuaccacaagaacaacaagagcuggauggaguccgaguuccgggucuacagcuccgccaacaacugcacguucgaguacgugagccagcccuuccugauggaccuggagggcaagcaggggaacuucaagaaccuccgcgaguucguguucaagaacaucgacggcuacuucaagaucuacuccaagcacaccccgaucaaccugguccgggaccugccccagggguucagcgcccucgagccccugguggaccugcccaucggcaucaacaucacccgcuuccagacccuccuggcccugcaccgguccuaccucacgccgggggacagcagcuccggcuggaccgcgggcgccgccgccuacuacgugggguaccugcagccccgcaccuuccugcucaaguacaacgagaacggcaccaucacggacgcggucgacugcgcccuggacccccugagcgagaccaagugcacccucaaguccuucaccguggagaaggggaucuaccagacgagcaacuuccgggugcagcccaccgaguccaucguccgcuucccgaacaucaccaaccugugccccuucggcgagguguucaacgccacccgguucgccagcgucuacgccuggaaccgcaagcggaucuccaacugcguggcggacuacagcgugcuguacaacuccgccagcuucuccacguucaagugcuacggcgucagccccaccaagcucaacgaccugugcuucaccaacguguacgccgacuccuucgugauccgcggggacgagguccggcagaucgcccccggccagaccgggaagaucgccgacuacaacuacaagcugccggacgacuucacgggcugcgugaucgcguggaacagcaacaaccucgacuccaaggucgggggcaacuacaacuaccuguaccgccuguuccgcaagagcaaccucaagcccuucgagcgggacaucuccaccgagaucuaccaggccggcagcacccccugcaacgggguggagggcuucaacugcuacuucccccugcaguccuacggguuccagccgaccaacggcgugggguaccagcccuaccggguggucgugcugagcuucgagcuccugcacgcccccgccacggugugcggccccaagaaguccaccaaccuggucaagaacaagugcgugaacuucaacuucaacggccucaccgggaccggcgugcugaccgagagcaacaagaaguuccugccguuccagcaguucgggcgcgacaucgccgacacgaccgacgcgguccgcgacccccagacccuggagauccucgacaucacccccugcagcuucggcgggguguccgugaucacgccgggcaccaacaccagcaaccaggucgccgugcuguaccagggcgugaacugcaccgagguccccguggccauccacgccgaccagcugacgcccaccuggcggguguacuccaccgggagcaacgucuuccagacccgcgccggcugccucaucggggcggagcacgugaacaacuccuacgagugcgacauccccaucggcgccggcaucugcgccagcuaccagacgcagaccaacuccccgcggcgcgcccggagcguggcgucccagagcgucaucgccuacaccaugucccugggggccgagaacagcguggccuacuccaacaacagcaucgccauccccaccaacuucacgaucuccgugaccaccgagauccugcccgucagcaugaccaagacgagcguggacugcaccauguacaucugcggcgacuccaccgagugcagcaaccuccugcugcaguacggguccuucugcacccagcucaaccgcgcgcugacgggcaucgccguggagcaggacaagaacacccaggaggucuucgcccaggugaagcagaucuacaagacgcccccgaucaaggacuucgggggcuucaacuucagccagauccugcccgaccccuccaagcccagcaagcgguccuucaucgaggaccuccuguucaacaaggugacccuggccgacgccggcuucaucaagcaguacggggacugccucggcgacaucgcggcccgcgaccugaucugcgcccagaaguucaacgggcugaccguccucccgccccugcugaccgacgagaugaucgcccaguacaccagcgcccuccuggcgggcaccaucacguccggguggaccuucggcgccggcgccgcccugcagauccccuucgcgaugcagauggccuaccgguucaacgggaucggcgugacccagaacgugcucuacgagaaccagaagcugaucgccaaccaguucaacagcgccaucgggaagauccaggacucccugagcuccaccgccagcgcgcucggcaagcugcaggacgucgugaaccagaacgcccaggcccugaacacgcucgugaagcagcuguccagcaacuucggggccaucuccagcguccugaacgacauccucucccgccuggacccgcccgaggccgaggugcagaucgaccggcugaucaccggccgccuccagagccugcagaccuacgugacccagcagcugauccgggcggccgagauccgcgccagcgccaaccucgccgcgaccaagauguccgagugcguccugggccagagcaagcggguggacuucugcgggaagggcuaccaccugauguccuucccccagagcgcgccccacgggguggucuuccuccacgugacguacguccccgcccaggagaagaacuucaccaccgccccggccaucugccacgacggcaaggcccacuucccccgcgaggggguguucguguccaacggcacccacugguucgucacgcagcggaacuucuacgagccccagaucaucaccaccgacaacaccuucgugagcggcaacugcgacguggucaucgggaucgugaacaacacgguguacgacccccugcagccggagcuggacuccuucaaggaggagcucgacaaguacuucaagaaccacaccagccccgacgucgaccugggcgacaucuccgggaucaacgccagcguggugaacauccagaaggagaucgaccgccugaacgaggucgccaagaaccucaacgagucccugaucgaccugcaggagcucggcaaguacgagcaguacaucaaguggcccugguacaucuggcugggcuucaucgccgggcugaucgcgaucgugauggugaccaucaugcucugcugcaugaccagcugcugcuccugccugaagggcugcugcagcugcggguccugcugcaaguucgacgaggacgacagcgagccgguccugaagggcgugaagcuccacuacacgugaggacuagucccuguucccagagcccacuuuuuuuucuuuuuuugaaauaaaauagccugucuuucagaucucaaaggcucuuuucagagccaccaaaaaaaaaaaaaaaaaaaaaaaaaaaaaaaaaaaaaaaaaaaaaaaaaaaaaaaaaaaaaaaaaaaaaaaaaaaaaaaaaaaaaaaaaaaaaaaaaaaaa

SEQ ID NO: 23544 - RNA, 4094 nt, Artificial Sequence
  SARS-CoV-2/Wuhan/WIV05/2019__EPI_ISL_402128 spike protein mRNA gc (1-1273)(K986P_V987P_D614G_M1229I)
aggagagucccgcagucggcguccagcggcucugcuuguucgugugugugucguugcaggccuuauucaagcuuaccauguucguguuccugguccuccugccccuggugagcucccagugcgugaaccucaccacccgcacgcagcugccgcccgccuacaccaacagcuucacccggggcgucuacuaccccgacaagguguuccgcuccagcgugcugcacuccacccaggaccucuuccugcccuucuucagcaacgucacgugguuccacgccauccacguguccgggaccaacggcaccaagcgguucgacaacccggugcugcccuucaacgacggggucuacuucgcgagcaccgagaaguccaacaucauccgcggcuggaucuucgggacgacccucgacagcaagacccagucccugcugaucgugaacaacgccaccaacguggucaucaaggugugcgaguuccaguucugcaacgaccccuuccucggcguguacuaccacaagaacaacaagagcuggauggaguccgaguuccgggucuacagcuccgccaacaacugcacguucgaguacgugagccagcccuuccugauggaccuggagggcaagcaggggaacuucaagaaccuccgcgaguucguguucaagaacaucgacggcuacuucaagaucuacuccaagcacaccccgaucaaccugguccgggaccugccccagggguucagcgcccucgagccccugguggaccugcccaucggcaucaacaucacccgcuuccagacccuccuggcccugcaccgguccuaccucacgccgggggacagcagcuccggcuggaccgcgggcgccgccgccuacuacgugggguaccugcagccccgcaccuuccugcucaaguacaacgagaacggcaccaucacggacgcggucgacugcgcccuggacccccugagcgagaccaagugcacccucaaguccuucaccguggagaaggggaucuaccagacgagcaacuuccgggugcagcccaccgaguccaucguccgcuucccgaacaucaccaaccugugccccuucggcgagguguucaacgccacccgguucgccagcgucuacgccuggaaccgcaagcggaucuccaacugcguggcggacuacagcgugcuguacaacuccgccagcuucuccacguucaagugcuacggcgucagccccaccaagcucaacgaccugugcuucaccaacguguacgccgacuccuucgugauccgcggggacgagguccggcagaucgcccccggccagaccgggaagaucgccgacuacaacuacaagcugccggacgacuucacgggcugcgugaucgcguggaacagcaacaaccucgacuccaaggucgggggcaacuacaacuaccuguaccgccuguuccgcaagagcaaccucaagcccuucgagcgggacaucuccaccgagaucuaccaggccggcagcacccccugcaacgggguggagggcuucaacugcuacuucccccugcaguccuacggguuccagccgaccaacggcgugggguaccagcccuaccggguggucgugcugagcuucgagcuccugcacgcccccgccacggugugcggccccaagaaguccaccaaccuggucaagaacaagugcgugaacuucaacuucaacggccucaccgggaccggcgugcugaccgagagcaacaagaaguuccugccguuccagcaguucgggcgcgacaucgccgacacgaccgacgcgguccgcgacccccagacccuggagauccucgacaucacccccugcagcuucggcgggguguccgugaucacgccgggcaccaacaccagcaaccaggucgccgugcuguaccagggcgugaacugcaccgagguccccguggccauccacgccgaccagcugacgcccaccuggcggguguacuccaccgggagcaacgucuuccagacccgcgccggcugccucaucggggcggagcacgugaacaacuccuacgagugcgacauccccaucggcgccggcaucugcgccagcuaccagacgcagaccaacuccccgcggcgcgcccggagcguggcgucccagagcaucaucgccuacaccaugucccugggggccgagaacagcgucgccuacuccaacaacagcaucgccauccccaccaacuucacgaucuccgugaccaccgagauccugcccgugagcaugaccaagacgagcgucgacugcaccauguacaucugcggcgacuccaccgagugcagcaaccuccugcugcaguacggguccuucugcacccagcucaaccgcgcgcugacgggcaucgccguggagcaggacaagaacacccaggagguguucgcccaggucaagcagaucuacaagacgcccccgaucaaggacuucgggggcuucaacuucagccagauccugcccgaccccuccaagcccagcaagcgguccuucaucgaggaccuccuguucaacaaggugacccuggccgacgccggcuucaucaagcaguacggggacugccucggcgacaucgcggcccgcgaccugaucugcgcccagaaguucaacgggcugaccgugcucccgccccugcugaccgacgagaugaucgcccaguacaccagcgcccuccuggcgggcaccaucacguccggguggaccuucggcgccggcgccgcccugcagauccccuucgcgaugcagauggccuaccgguucaacgggaucggcgucacccagaacgugcucuacgagaaccagaagcugaucgccaaccaguucaacagcgccaucgggaagauccaggacucccugagcuccaccgccagcgcgcucggcaagcugcaggacguggucaaccagaacgcccaggcccugaacacgcucgugaagcagcuguccagcaacuucggggccaucuccagcgugcugaacgacauccucucccgccuggacccgcccgaggccgagguccagaucgaccggcugaucaccggccgccuccagagccugcagaccuacgugacccagcagcugauccgggcggccgagauccgcgccagcgccaaccucgccgcgaccaagauguccgagugcgugcugggccagagcaagcgggucgacuucugcgggaagggcuaccaccugauguccuucccccagagcgcgccccacggggugguguuccuccacgucacguacgugcccgcccaggagaagaacuucaccaccgccccggccaucugccacgacggcaaggcccacuucccccgcgagggggucuucguguccaacggcacccacugguucgugacgcagcggaacuucuacgagccccagaucaucaccaccgacaacaccuucgucagcggcaacugcgacguggugaucgggaucgucaacaacacgguguacgacccccugcagccggagcuggacuccuucaaggaggagcucgacaaguacuucaagaaccacaccagccccgacguggaccugggcgacaucuccgggaucaacgccagcgucgugaacauccagaaggagaucgaccgccugaacgagguggccaagaaccucaacgagucccugaucgaccugcaggagcucggcaaguacgagcaguacaucaaguggcccugguacaucuggcugggcuucaucgccgggcugaucgcgaucgucaucgugaccaucaugcucugcugcaugaccagcugcugcuccugccugaagggcugcugcagcugcggguccugcugcaaguucgacgaggacgacagcgagccggugcugaagggcgucaagcuccacuacacgugaggacuagucccuguucccagagcccacuuuuuuuucuuuuuuugaaauaaaauagccugucuuucagaucucaaaggcucuuuucagagccaccaaaaaaaaaaaaaaaaaaaaaaaaaaaaaaaaaaaaaaaaaaaaaaaaaaaaaaaaaaaaaaaaaaaaaaaaaaaaaaaaaaaaaaaaaaaaaaaaaaaaa

SEQ ID NO: 23545 - RNA, 4088 nt, Artificial Sequence
  SARS-CoV-2/Wuhan/WIV05/2019__EPI_ISL_402128 spike protein mRNA gc (1-1273)(K986P_V987P_H69del_V70del_A222V_Y453F_S477N_D614G_I692V)
aggagagucccgcagucggcguccagcggcucugcuuguucgugugugugucguugcaggccuuauucaagcuuaccauguucguguuccugguccuccugccccuggugagcucccagugcgugaaccucaccacccgcacgcagcugccgcccgccuacaccaacagcuucacccggggcgucuacuaccccgacaagguguuccgcuccagcgugcugcacuccacccaggaccucuuccugcccuucuucagcaacgucacgugguuccacgccaucuccgggaccaacggcaccaagcgguucgacaacccggugcugcccuucaacgacgggguguacuucgcgagcaccgagaaguccaacaucauccgcggcuggaucuucgggacgacccucgacagcaagacccagucccugcugaucgucaacaacgccaccaacguggugaucaaggucugcgaguuccaguucugcaacgaccccuuccucggcguguacuaccacaagaacaacaagagcuggauggaguccgaguuccggguguacagcuccgccaacaacugcacguucgaguacgucagccagcccuuccugauggaccuggagggcaagcaggggaacuucaagaaccuccgcgaguucguguucaagaacaucgacggcuacuucaagaucuacuccaagcacaccccgaucaaccuggugcgggaccugccccagggguucagcguccucgagccccugguggaccugcccaucggcaucaacaucacccgcuuccagacccuccuggcccugcaccgguccuaccucacgccgggggacagcagcuccggcuggaccgccggcgcggccgccuacuacgugggguaccugcagccccgcaccuuccugcucaaguacaacgagaacggcaccaucacggacgccgucgacugcgcgcuggacccccugagcgagaccaagugcacccucaaguccuucaccguggagaaggggaucuaccagacgagcaacuuccgggugcagcccaccgaguccaucguccgcuucccgaacaucaccaaccugugccccuucggcgagguguucaacgccacccgguucgccagcgucuacgccuggaaccgcaagcggaucuccaacugcguggccgacuacagcgugcuguacaacuccgcgagcuucuccacguucaagugcuacggcgucagccccaccaagcucaacgaccugugcuucaccaacguguacgccgacuccuucgugauccgcggggacgagguccggcagaucgcccccggccagaccgggaagaucgccgacuacaacuacaagcugccggacgacuucacgggcugcgugaucgccuggaacagcaacaaccucgacuccaaggucgggggcaacuacaacuaccuguuccgccuguuccgcaagagcaaccucaagcccuucgagcgggacaucuccaccgagaucuaccaggcgggcaacacccccugcaacgggguggagggcuucaacugcuacuucccccugcagagcuacggguuccagccgaccaacggcgugggguaccagcccuaccggguggucgugcuguccuucgagcuccugcacgcccccgccacggugugcggccccaagaaguccaccaaccuggucaagaacaagugcgugaacuucaacuucaacggccucaccgggaccggcgugcugaccgagagcaacaagaaguuccugccguuccagcaguucgggcgcgacaucgccgacacgaccgacgccguccgcgacccccagacccuggagauccucgacaucacccccugcagcuucggcggggugagcgugaucacgccgggcaccaacaccuccaaccaggucgcggugcuguaccagggcgugaacugcaccgagguccccguggccauccacgccgaccagcugacgcccaccuggcggguguacagcaccggguccaacgucuuccagacccgcgccggcugccucaucggggccgagcacgugaacaacagcuacgagugcgacauccccaucggcgcgggcaucugcgccuccuaccagacgcagaccaacagcccgcggcgcgcccgguccguggccagccaguccgucaucgcguacaccaugagccugggggccgagaacuccguggccuacagcaacaacuccaucgccauccccaccaacuucacgaucagcgugaccaccgagauccugcccgucuccaugaccaagacgagcguggacugcaccauguacaucugcggcgacagcaccgagugcuccaaccuccugcugcaguacgggagcuucugcacccagcucaaccgcgcccugacgggcaucgcgguggagcaggacaagaacacccaggaggucuucgcccaggugaagcagaucuacaagacgcccccgaucaaggacuucgggggcuucaacuucucccagauccugcccgaccccagcaagcccuccaagcggagcuucaucgaggaccuccuguucaacaaggugacccuggccgacgccggcuucaucaagcaguacggggacugccucggcgacaucgccgcgcgcgaccugaucugcgcccagaaguucaacgggcugaccguccucccgccccugcugaccgacgagaugaucgcccaguacaccuccgcccuccuggccggcaccaucacgagcggguggaccuucggcgcgggcgccgcccugcagauccccuucgccaugcagauggcguaccgguucaacgggaucggcgugacccagaacgugcucuacgagaaccagaagcugaucgccaaccaguucaacuccgccaucgggaagauccaggacagccuguccagcaccgccuccgcccucggcaagcugcaggacgucgugaaccagaacgcgcaggcccugaacacgcucgugaagcagcugagcuccaacuucggggccaucagcuccguccugaacgacauccucagccgccuggacccgcccgaggccgaggugcagaucgaccggcugaucaccggccgccuccagucccugcagaccuacgugacccagcagcugauccgggccgcggagauccgcgccagcgccaaccucgccgccaccaagaugagcgagugcguccugggccaguccaagcggguggacuucugcgggaagggcuaccaccugaugagcuucccccaguccgcgccccacgggguggucuuccuccacgugacguacguccccgcccaggagaagaacuucaccaccgccccggccaucugccacgacggcaaggcgcacuucccccgcgaggggguguucgugagcaacggcacccacugguucgucacgcagcggaacuucuacgagccccagaucaucaccaccgacaacaccuucguguccggcaacugcgacguggucaucgggaucgugaacaacacgguguacgacccccugcagccggagcuggacagcuucaaggaggagcucgacaaguacuucaagaaccacaccucccccgacgucgaccugggcgacaucagcgggaucaacgccuccguggugaacauccagaaggagaucgaccgccugaacgaggucgccaagaaccucaacgagagccugaucgaccugcaggagcucggcaaguacgagcaguacaucaaguggcccugguacaucuggcugggcuucaucgccgggcugaucgccaucgugauggugaccaucaugcucugcugcaugaccuccugcugcagcugccugaagggcugcugcuccugcgggagcugcugcaaguucgacgaggacgacuccgagccgguccugaagggcgugaagcuccacuacacgugaggacuagucccuguucccagagcccacuuuuuuuucuuuuuuugaaauaaaauagccugucuuucagaucucaaaggcucuuuucagagccaccaaaaaaaaaaaaaaaaaaaaaaaaaaaaaaaaaaaaaaaaaaaaaaaaaaaaaaaaaaaaaaaaaaaaaaaaaaaaaaaaaaaaaaaaaaaaaaaaaaaaa

SEQ ID NO: 23546 - RNA, 4088 nt, Artificial Sequence
  SARS-CoV-2/Wuhan/WIV05/2019__EPI_ISL_402128 spike protein mRNA gc (1-1273)(K986P_V987P_H69del_V70del_Y453F_D614G_I692V_M1229I)
aggagagucccgcagucggcguccagcggcucugcuuguucgugugugugucguugcaggccuuauucaagcuuaccauguucguguuccugguccuccugccccuggugagcucccagugcgugaaccucaccacccgcacgcagcugccgcccgccuacaccaacagcuucacccggggcgucuacuaccccgacaagguguuccgcuccagcgugcugcacuccacccaggaccucuuccugcccuucuucagcaacgucacgugguuccacgccaucuccgggaccaacggcaccaagcgguucgacaacccggugcugcccuucaacgacgggguguacuucgcgagcaccgagaaguccaacaucauccgcggcuggaucuucgggacgacccucgacagcaagacccagucccugcugaucgucaacaacgccaccaacguggugaucaaggucugcgaguuccaguucugcaacgaccccuuccucggcguguacuaccacaagaacaacaagagcuggauggaguccgaguuccggguguacagcuccgccaacaacugcacguucgaguacgucagccagcccuuccugauggaccuggagggcaagcaggggaacuucaagaaccuccgcgaguucguguucaagaacaucgacggcuacuucaagaucuacuccaagcacaccccgaucaaccuggugcgggaccugccccagggguucagcgcccucgagccccuggucgaccugcccaucggcaucaacaucacccgcuuccagacccuccuggcccugcaccgguccuaccucacgccgggggacagcagcuccggcuggaccgcgggcgccgccgccuacuacgugggguaccugcagccccgcaccuuccugcucaaguacaacgagaacggcaccaucacggacgcgguggacugcgcccuggacccccugagcgagaccaagugcacccucaaguccuucaccgucgagaaggggaucuaccagacgagcaacuuccgggugcagcccaccgaguccaucgugcgcuucccgaacaucaccaaccugugccccuucggcgaggucuucaacgccacccgguucgccagcguguacgccuggaaccgcaagcggaucuccaacugcgucgcggacuacagcgugcuguacaacuccgccagcuucuccacguucaagugcuacggcgugagccccaccaagcucaacgaccugugcuucaccaacgucuacgccgacuccuucgugauccgcggggacgaggugcggcagaucgcccccggccagaccgggaagaucgccgacuacaacuacaagcugccggacgacuucacgggcugcgucaucgcguggaacagcaacaaccucgacuccaaggucgggggcaacuacaacuaccuguuccgccuguuccgcaagagcaaccucaagcccuucgagcgggacaucuccaccgagaucuaccaggccggcagcacccccugcaacgggguggagggcuucaacugcuacuucccccugcaguccuacggguuccagccgaccaacggcgugggguaccagcccuaccggguggugguccugagcuucgagcuccugcacgcccccgccacggugugcggccccaagaaguccaccaaccuggugaagaacaagugcgucaacuucaacuucaacggccucaccgggaccggcgugcugaccgagagcaacaagaaguuccugccguuccagcaguucgggcgcgacaucgccgacacgaccgacgcggugcgcgacccccagacccuggagauccucgacaucacccccugcagcuucggcggggucuccgugaucacgccgggcaccaacaccagcaaccagguggccguccuguaccagggcgugaacugcaccgaggugcccgucgccauccacgccgaccagcugacgcccaccuggcggguguacuccaccgggagcaacguguuccagacccgcgccggcugccucaucggggcggagcacgucaacaacuccuacgagugcgacauccccaucggcgccggcaucugcgccagcuaccagacgcagaccaacuccccgcggcgcgcccggagcguggcgucccagagcgugaucgccuacaccaugucccugggggccgagaacagcgucgccuacuccaacaacagcaucgccauccccaccaacuucacgaucuccgugaccaccgagauccugcccgugagcaugaccaagacgagcgucgacugcaccauguacaucugcggcgacuccaccgagugcagcaaccuccugcugcaguacggguccuucugcacccagcucaaccgcgcgcugacgggcaucgccguggagcaggacaagaacacccaggagguguucgcccaggucaagcagaucuacaagacgcccccgaucaaggacuucgggggcuucaacuucagccagauccugcccgaccccuccaagcccagcaagcgguccuucaucgaggaccuccuguucaacaaggugacccuggccgacgccggcuucaucaagcaguacggggacugccucggcgacaucgcggcccgcgaccugaucugcgcccagaaguucaacgggcugaccgugcucccgccccugcugaccgacgagaugaucgcccaguacaccagcgcccuccuggcgggcaccaucacguccggguggaccuucggcgccggcgccgcccugcagauccccuucgcgaugcagauggccuaccgguucaacgggaucggcgucacccagaacgugcucuacgagaaccagaagcugaucgccaaccaguucaacagcgccaucgggaagauccaggacucccugagcuccaccgccagcgcgcucggcaagcugcaggacguggucaaccagaacgcccaggcccugaacacgcucgugaagcagcuguccagcaacuucggggccaucuccagcgugcugaacgacauccucucccgccuggacccgcccgaggccgagguccagaucgaccggcugaucaccggccgccuccagagccugcagaccuacgugacccagcagcugauccgggcggccgagauccgcgccagcgccaaccucgccgcgaccaagauguccgagugcgugcugggccagagcaagcgggucgacuucugcgggaagggcuaccaccugauguccuucccccagagcgcgccccacggggugguguuccuccacgucacguacgugcccgcccaggagaagaacuucaccaccgccccggccaucugccacgacggcaaggcccacuucccccgcgagggggucuucguguccaacggcacccacugguucgugacgcagcggaacuucuacgagccccagaucaucaccaccgacaacaccuucgucagcggcaacugcgacguggugaucgggaucgucaacaacacgguguacgacccccugcagccggagcuggacuccuucaaggaggagcucgacaaguacuucaagaaccacaccagccccgacguggaccugggcgacaucuccgggaucaacgccagcgucgugaacauccagaaggagaucgaccgccugaacgagguggccaagaaccucaacgagucccugaucgaccugcaggagcucggcaaguacgagcaguacaucaaguggcccugguacaucuggcugggcuucaucgccgggcugaucgcgaucgucaucgugaccaucaugcucugcugcaugaccagcugcugcuccugccugaagggcugcugcagcugcggguccugcugcaaguucgacgaggacgacagcgagccggugcugaagggcgucaagcuccacuacacgugaggacuagucccuguucccagagcccacuuuuuuuucuuuuuuugaaauaaaauagccugucuuucagaucucaaaggcucuuuucagagccaccaaaaaaaaaaaaaaaaaaaaaaaaaaaaaaaaaaaaaaaaaaaaaaaaaaaaaaaaaaaaaaaaaaaaaaaaaaaaaaaaaaaaaaaaaaaaaaaaaaaaa

SEQ ID NO: 23547 - RNA, 4085 nt, Artificial Sequence
  SARS-CoV-2/Wuhan/WIV05/2019__EPI_ISL_402128 spike protein mRNA gc (1-1273)(K986P_V987P_K986P_V987P_H69del_V70del_Y144del_N501Y_A570 D_D614G_P681H_T716I_S982A_D1118H)
aggagagucccgcagucggcguccagcggcucugcuuguucgugugugugucguugcaggccuuauucaagcuuaccauguucguguuccugguccuccugccccuggugagcucccagugcgugaaccucaccacccgcacgcagcugccgcccgccuacaccaacagcuucacccggggcgucuacuaccccgacaagguguuccgcuccagcgugcugcacuccacccaggaccucuuccugcccuucuucagcaacgucacgugguuccacgccaucuccgggaccaacggcaccaagcgguucgacaacccggugcugcccuucaacgacgggguguacuucgcgagcaccgagaaguccaacaucauccgcggcuggaucuucgggacgacccucgacagcaagacccagucccugcugaucgucaacaacgccaccaacguggugaucaaggucugcgaguuccaguucugcaacgaccccuuccucggcguguaccacaagaacaacaagagcuggauggaguccgaguuccggguguacagcuccgccaacaacugcacguucgaguacgucagccagcccuuccugauggaccuggagggcaagcaggggaacuucaagaaccuccgcgaguucguguucaagaacaucgacggcuacuucaagaucuacuccaagcacaccccgaucaaccuggugcgggaccugccccagggguucagcgcccucgagccccuggucgaccugcccaucggcaucaacaucacccgcuuccagacccuccuggcccugcaccgguccuaccucacgccgggggacagcagcuccggcuggaccgcgggcgccgccgccuacuacgugggguaccugcagccccgcaccuuccugcucaaguacaacgagaacggcaccaucacggacgcgguggacugcgcccuggacccccugagcgagaccaagugcacccucaaguccuucaccgucgagaaggggaucuaccagacgagcaacuuccgggugcagcccaccgaguccaucgugcgcuucccgaacaucaccaaccugugccccuucggcgaggucuucaacgccacccgguucgccagcguguacgccuggaaccgcaagcggaucuccaacugcgucgcggacuacagcgugcuguacaacuccgccagcuucuccacguucaagugcuacggcgugagccccaccaagcucaacgaccugugcuucaccaacgucuacgccgacuccuucgugauccgcggggacgaggugcggcagaucgcccccggccagaccgggaagaucgccgacuacaacuacaagcugccggacgacuucacgggcugcgucaucgcguggaacagcaacaaccucgacuccaaggucgggggcaacuacaacuaccuguaccgccuguuccgcaagagcaaccucaagcccuucgagcgggacaucuccaccgagaucuaccaggccggcagcacccccugcaacgggguggagggcuucaacugcuacuucccccugcaguccuacggguuccagccgaccuacggcgugggguaccagcccuaccggguggugguccugagcuucgagcuccugcacgcccccgccacggugugcggccccaagaaguccaccaaccuggugaagaacaagugcgucaacuucaacuucaacggccucaccgggaccggcgugcugaccgagagcaacaagaaguuccugccguuccagcaguucgggcgcgacaucgacgacacgaccgacgccgugcgcgacccccagacccuggagauccucgacaucacccccugcagcuucggcggggucuccgugaucacgccgggcaccaacaccagcaaccagguggcgguccuguaccagggcgugaacugcaccgaggugcccgucgccauccacgccgaccagcugacgcccaccuggcggguguacuccaccgggagcaacguguuccagacccgcgccggcugccucaucggggccgagcacgucaacaacuccuacgagugcgacauccccaucggcgcgggcaucugcgccagcuaccagacgcagaccaacucccaccggcgcgcccggagcguggccucccagagcaucaucgcguacaccaugucccugggggccgagaacagcguggccuacuccaacaacagcaucgccaucccgaucaacuucaccaucuccgucacgaccgagauccugcccgugagcaugaccaagaccagcguggacugcacgauguacaucugcggcgacuccaccgagugcagcaaccuccugcugcaguacggguccuucugcacccagcucaaccgcgcccugaccggcaucgcggucgagcaggacaagaacacgcaggagguguucgcccaggugaagcagaucuacaagaccccgcccaucaaggacuucgggggcuucaacuucagccagauccugcccgaccccuccaagcccagcaagcgguccuucaucgaggaccuccuguucaacaaggucacccuggccgacgccggcuucaucaagcaguacggggacugccucggcgacaucgccgcgcgcgaccugaucugcgcccagaaguucaacgggcugaccgugcugcccccgcuccugacggacgagaugaucgcccaguacaccagcgcccuccuggccggcaccaucaccuccggguggacguucggcgcgggcgccgcccugcagauccccuucgccaugcagauggcguaccgguucaacgggaucggcgugacccagaacguccucuacgagaaccagaagcugaucgccaaccaguucaacagcgccaucgggaagauccaggacucccugagcuccaccgccagcgcccucggcaagcugcaggacguggugaaccagaacgcgcaggcccugaacacccucgucaagcagcuguccagcaacuucggggccaucuccagcgugcugaacgacauccucgcccgccuggacccgcccgaggccgaggugcagaucgaccggcugaucacgggccgccuccagucccugcagaccuacgucacccagcagcugauccgggcggccgagauccgcgccagcgccaaccucgccgcgaccaagaugagcgagugcgugcugggccaguccaagcggguggacuucugcgggaagggcuaccaccugaugagcuucccccaguccgcgccccacggggucguguuccuccacgugaccuacguccccgcccaggagaagaacuucacgaccgcccccgccaucugccacgacggcaaggcccacuucccgcgcgaggggguguucgucagcaacggcacccacugguucgugacccagcggaacuucuacgagccccagaucaucacgacccacaacaccuucguguccggcaacugcgacgucgugaucgggaucgugaacaacaccgucuacgacccccugcagcccgagcuggacagcuucaaggaggagcucgacaaguacuucaagaaccacacguccccggacguggaccugggcgacaucagcgggaucaacgccuccguggucaacauccagaaggagaucgaccgccugaacgagguggccaagaaccucaacgagagccugaucgaccugcaggagcucggcaaguacgagcaguacaucaaguggcccugguacaucuggcugggcuucaucgccgggcugaucgcgaucgugauggucaccaucaugcucugcugcaugaccuccugcugcagcugccugaagggcugcugcuccugcgggagcugcugcaaguucgacgaggacgacuccgagcccgugcugaagggcgugaagcuccacuacaccugaggacuagucccuguucccagagcccacuuuuuuuucuuuuuuugaaauaaaauagccugucuuucagaucucaaaggcucuuuucagagccaccaaaaaaaaaaaaaaaaaaaaaaaaaaaaaaaaaaaaaaaaaaaaaaaaaaaaaaaaaaaaaaaaaaaaaaaaaaaaaaaaaaaaaaaaaaaaaaaaaaaaa

SEQ ID NO: 23548 - RNA, 4094 nt, Artificial Sequence
  SARS-CoV-2/Wuhan/WIV05/2019__EPI_ISL_402128 spike protein mRNA gc (1-1273)(K986P_V987P_K986P_V987P_K417N_E484K_N501Y_D614G)
aggagagucccgcagucggcguccagcggcucugcuuguucgugugugugucguugcaggccuuauucaagcuuaccauguucguguuccugguccuccugccccuggugagcucccagugcgugaaccucaccacccgcacgcagcugccgcccgccuacaccaacagcuucacccggggcgucuacuaccccgacaagguguuccgcuccagcgugcugcacuccacccaggaccucuuccugcccuucuucagcaacgucacgugguuccacgccauccacguguccgggaccaacggcaccaagcgguucgacaacccggugcugcccuucaacgacggggucuacuucgcgagcaccgagaaguccaacaucauccgcggcuggaucuucgggacgacccucgacagcaagacccagucccugcugaucgugaacaacgccaccaacguggucaucaaggugugcgaguuccaguucugcaacgaccccuuccucggcguguacuaccacaagaacaacaagagcuggauggaguccgaguuccgggucuacagcuccgccaacaacugcacguucgaguacgugagccagcccuuccugauggaccuggagggcaagcaggggaacuucaagaaccuccgcgaguucguguucaagaacaucgacggcuacuucaagaucuacuccaagcacaccccgaucaaccugguccgggaccugccccagggguucagcgcccucgagccccugguggaccugcccaucggcaucaacaucacccgcuuccagacccuccuggcccugcaccgguccuaccucacgccgggggacagcagcuccggcuggaccgcgggcgccgccgccuacuacgugggguaccugcagccccgcaccuuccugcucaaguacaacgagaacggcaccaucacggacgcggucgacugcgcccuggacccccugagcgagaccaagugcacccucaaguccuucaccguggagaaggggaucuaccagacgagcaacuuccgggugcagcccaccgaguccaucguccgcuucccgaacaucaccaaccugugccccuucggcgagguguucaacgccacccgguucgccagcgucuacgccuggaaccgcaagcggaucuccaacugcguggcggacuacagcgugcuguacaacuccgccagcuucuccacguucaagugcuacggcgucagccccaccaagcucaacgaccugugcuucaccaacguguacgccgacuccuucgugauccgcggggacgagguccggcagaucgcccccggccagaccgggaacaucgccgacuacaacuacaagcugccggacgacuucacgggcugcgugaucgcguggaacagcaacaaccucgacuccaaggucgggggcaacuacaacuaccuguaccgccuguuccgcaagagcaaccucaagcccuucgagcgggacaucuccaccgagaucuaccaggccggcagcacccccugcaacggggugaagggcuucaacugcuacuucccccugcaguccuacggguuccagccgaccuacggcgugggguaccagcccuaccggguggucgugcugagcuucgagcuccugcacgcccccgccacggugugcggccccaagaaguccaccaaccuggucaagaacaagugcgugaacuucaacuucaacggccucaccgggaccggcgugcugaccgagagcaacaagaaguuccugccguuccagcaguucgggcgcgacaucgccgacacgaccgacgcgguccgcgacccccagacccuggagauccucgacaucacccccugcagcuucggcgggguguccgugaucacgccgggcaccaacaccagcaaccaggucgccgugcuguaccagggcgugaacugcaccgagguccccguggccauccacgccgaccagcugacgcccaccuggcggguguacuccaccgggagcaacgucuuccagacccgcgccggcugccucaucggggcggagcacgugaacaacuccuacgagugcgacauccccaucggcgccggcaucugcgccagcuaccagacgcagaccaacuccccgcggcgcgcccggagcguggcgucccagagcaucaucgccuacaccaugucccugggggccgagaacagcgucgccuacuccaacaacagcaucgccauccccaccaacuucacgaucuccgugaccaccgagauccugcccgugagcaugaccaagacgagcgucgacugcaccauguacaucugcggcgacuccaccgagugcagcaaccuccugcugcaguacggguccuucugcacccagcucaaccgcgcgcugacgggcaucgccguggagcaggacaagaacacccaggagguguucgcccaggucaagcagaucuacaagacgcccccgaucaaggacuucgggggcuucaacuucagccagauccugcccgaccccuccaagcccagcaagcgguccuucaucgaggaccuccuguucaacaaggugacccuggccgacgccggcuucaucaagcaguacggggacugccucggcgacaucgcggcccgcgaccugaucugcgcccagaaguucaacgggcugaccgugcucccgccccugcugaccgacgagaugaucgcccaguacaccagcgcccuccuggcgggcaccaucacguccggguggaccuucggcgccggcgccgcccugcagauccccuucgcgaugcagauggccuaccgguucaacgggaucggcgucacccagaacgugcucuacgagaaccagaagcugaucgccaaccaguucaacagcgccaucgggaagauccaggacucccugagcuccaccgccagcgcgcucggcaagcugcaggacguggucaaccagaacgcccaggcccugaacacgcucgugaagcagcuguccagcaacuucggggccaucuccagcgugcugaacgacauccucucccgccuggacccgcccgaggccgagguccagaucgaccggcugaucaccggccgccuccagagccugcagaccuacgugacccagcagcugauccgggcggccgagauccgcgccagcgccaaccucgccgcgaccaagauguccgagugcgugcugggccagagcaagcgggucgacuucugcgggaagggcuaccaccugauguccuucccccagagcgcgccccacggggugguguuccuccacgucacguacgugcccgcccaggagaagaacuucaccaccgccccggccaucugccacgacggcaaggcccacuucccccgcgagggggucuucguguccaacggcacccacugguucgugacgcagcggaacuucuacgagccccagaucaucaccaccgacaacaccuucgucagcggcaacugcgacguggugaucgggaucgucaacaacacgguguacgacccccugcagccggagcuggacuccuucaaggaggagcucgacaaguacuucaagaaccacaccagccccgacguggaccugggcgacaucuccgggaucaacgccagcgucgugaacauccagaaggagaucgaccgccugaacgagguggccaagaaccucaacgagucccugaucgaccugcaggagcucggcaaguacgagcaguacaucaaguggcccugguacaucuggcugggcuucaucgccgggcugaucgcgaucgucauggugaccaucaugcucugcugcaugaccagcugcugcuccugccugaagggcugcugcagcugcggguccugcugcaaguucgacgaggacgacagcgagccggugcugaagggcgucaagcuccacuacacgugaggacuagucccuguucccagagcccacuuuuuuuucuuuuuuugaaauaaaauagccugucuuucagaucucaaaggcucuuuucagagccaccaaaaaaaaaaaaaaaaaaaaaaaaaaaaaaaaaaaaaaaaaaaaaaaaaaaaaaaaaaaaaaaaaaaaaaaaaaaaaaaaaaaaaaaaaaaaaaaaaaaaa

SEQ ID NO: 23549 - RNA, 4085 nt, Artificial Sequence
  SARS-CoV-2/Wuhan/WIV05/2019__EPI_ISL_402128 spike protein mRNA gc (1-1273)(K986P_V987P_K986P_V987P_L18F_D80A_D215G_L242del_A243del_ L244del_R246I_K417N_E484K_N501Y_D614G_A701V)
aggagagucccgcagucggcguccagcggcucugcuuguucgugugugugucguugcaggccuuauucaagcuuaccauguucguguuccugguccuccugccccuggugagcucccagugcgugaacuucaccacccgcacgcagcucccgcccgccuacaccaacagcuucacccggggcgucuacuaccccgacaagguguuccgcuccagcgugcugcacuccacccaggaccuguuccuccccuucuucagcaacgucacgugguuccacgccauccacguguccgggaccaacggcaccaagcgguucgcgaacccggugcugcccuucaacgacggggucuacuucgccagcaccgagaaguccaacaucauccgcggcuggaucuucgggacgacccuggacagcaagacccagucccuccugaucgugaacaacgccaccaacguggucaucaaggugugcgaguuccaguucugcaacgaccccuuccugggcguguacuaccacaagaacaacaagagcuggauggaguccgaguuccgggucuacagcuccgccaacaacugcacguucgaguacgugagccagcccuuccucauggaccuggagggcaagcaggggaacuucaagaaccugcgcgaguucguguucaagaacaucgacggcuacuucaagaucuacuccaagcacaccccgaucaaccucguccgggggcugccccagggcuucagcgcccuggagccccucguggaccugcccaucgggaucaacaucacccgcuuccagacccugcacaucuccuaccucacgccgggcgacagcagcuccggcuggaccgcgggggccgccgccuacuacgugggcuaccugcagccccggaccuuccugcucaaguacaacgagaacgggaccaucacggacgcggucgacugcgcccuggacccccugagcgagaccaagugcacccucaaguccuucaccguggagaagggcaucuaccagacgagcaacuuccgcgugcagcccaccgaguccaucguccgguucccgaacaucaccaaccugugccccuucggcgagguguucaacgccacccgcuucgccagcgucuacgccuggaaccggaagcgcaucuccaacugcguggcggacuacagcgugcuguacaacuccgccagcuucuccacguucaagugcuacggggucagccccaccaagcucaacgaccugugcuucaccaacguguacgccgacuccuucgugauccggggcgacgagguccgccagaucgcccccgggcagaccggcaacaucgccgacuacaacuacaagcugccggacgacuucacggggugcgugaucgcguggaacagcaacaaccucgacuccaaggugggcggcaacuacaacuaccuguaccggcuguuccgcaagagcaaccucaagcccuucgagcgggacaucuccaccgagaucuaccaggccgggagcacccccugcaacggcgucaagggguucaacugcuacuucccccugcaguccuacggcuuccagccgaccuacggggugggcuaccagcccuaccgcguggucgugcugagcuucgagcuccugcacgcccccgccacggugugcggccccaagaaguccaccaaccuggucaagaacaagugcgugaacuucaacuucaacgggcucaccggcaccggggugcugaccgagagcaacaagaaguuccugccguuccagcaguucggccgggacaucgccgacacgaccgacgcgguccgcgacccccagacccucgagauccuggacaucacccccugcagcuucgggggcguguccgugaucacgccgggcaccaacaccagcaaccaggucgccgugcuguaccagggggugaacugcaccgagguccccguggccauccacgccgaccagcugacgcccaccuggcgcguguacuccaccggcagcaacgucuuccagacccgggccgggugccucaucggcgcggagcacgugaacaacuccuacgagugcgacauccccaucggcgccgggaucugcgccagcuaccagacgcagaccaacuccccgcgccgggcccgcagcguggcgucccagagcaucaucgccuacaccaugucccugggcgucgagaacagcguggccuacuccaacaacagcaucgccauccccaccaacuucacgaucuccgugaccaccgagauccugcccgucagcaugaccaagacgagcguggacugcaccauguacaucugcggggacuccaccgagugcagcaaccuccugcugcaguacggcuccuucugcacccagcucaaccgggcccugacggggaucgcgguggagcaggacaagaacacccaggaggucuucgcccaggugaagcagaucuacaagacgcccccgaucaaggacuucggcggcuucaacuucagccagauccugcccgaccccuccaagcccagcaagcgcuccuucaucgaggaccuccuguucaacaaggugacccuggccgacgccggguucaucaagcaguacggcgacugccucggggacaucgccgcgcgggaccugaucugcgcccagaaguucaacggccugaccguccucccgccccugcugaccgacgagaugaucgcccaguacaccagcgcccuccuggccgggaccaucacguccggcuggaccuucggcgcgggggccgcccugcagauccccuucgccaugcagauggcguaccgcuucaacggcaucggggugacccagaacgugcucuacgagaaccagaagcugaucgccaaccaguucaacagcgccaucggcaagauccaggacucccugagcuccaccgccagcgcccucgggaagcugcaggacgucgugaaccagaacgcgcaggcccugaacacgcucgugaagcagcuguccagcaacuucggcgccaucuccagcguccugaacgacauccucucccggcuggacccgcccgaggccgaggugcagaucgaccgccugaucaccggccggcuccagagccugcagaccuacgugacccagcagcugauccgcgccgcggagauccgggccagcgccaaccucgccgccaccaagauguccgagugcguccuggggcagagcaagcgcguggacuucugcggcaagggguaccaccugauguccuucccccagagcgcgccccacggcguggucuuccuccacgugacguacguccccgcccaggagaagaacuucaccaccgccccggccaucugccacgacgggaaggcgcacuucccccgggagggcguguucguguccaacggcacccacugguucgucacgcagcgcaacuucuacgagccccagaucaucaccaccgacaacaccuucgugagcgggaacugcgacguggucaucggcaucgugaacaacacgguguacgacccccugcagccggagcuggacuccuucaaggaggagcucgacaaguacuucaagaaccacaccagccccgacgucgaccugggggacaucuccggcaucaacgccagcguggugaacauccagaaggagaucgaccggcugaacgaggucgccaagaaccucaacgagucccugaucgaccugcaggagcucggcaaguacgagcaguacaucaaguggcccugguacaucuggcugggguucaucgccggccugaucgccaucgugauggugaccaucaugcucugcugcaugaccagcugcugcuccugccugaaggggugcugcagcugcggcuccugcugcaaguucgacgaggacgacagcgagccgguccugaagggggugaagcuccacuacacgugaggacuagucccuguucccagagcccacuuuuuuuucuuuuuuugaaauaaaauagccugucuuucagaucucaaaggcucuuuucagagccaccaaaaaaaaaaaaaaaaaaaaaaaaaaaaaaaaaaaaaaaaaaaaaaaaaaaaaaaaaaaaaaaaaaaaaaaaaaaaaaaaaaaaaaaaaaaaaaaaaaaaa

SEQ ID NO: 23550 - RNA, 4094 nt, Artificial Sequence
  SARS-CoV-2/Wuhan/WIV05/2019__EPI_ISL_402128 spike protein mRNA gc (1-1273)(K986P_V987P_K986P_V987P_E484K_D614G)
aggagagucccgcagucggcguccagcggcucugcuuguucgugugugugucguugcaggccuuauucaagcuuaccauguucguguuccugguccuccugccccuggugagcucccagugcgugaaccucaccacccgcacgcagcugccgcccgccuacaccaacagcuucacccggggcgucuacuaccccgacaagguguuccgcuccagcgugcugcacuccacccaggaccucuuccugcccuucuucagcaacgucacgugguuccacgccauccacguguccgggaccaacggcaccaagcgguucgacaacccggugcugcccuucaacgacggggucuacuucgcgagcaccgagaaguccaacaucauccgcggcuggaucuucgggacgacccucgacagcaagacccagucccugcugaucgugaacaacgccaccaacguggucaucaaggugugcgaguuccaguucugcaacgaccccuuccucggcguguacuaccacaagaacaacaagagcuggauggaguccgaguuccgggucuacagcuccgccaacaacugcacguucgaguacgugagccagcccuuccugauggaccuggagggcaagcaggggaacuucaagaaccuccgcgaguucguguucaagaacaucgacggcuacuucaagaucuacuccaagcacaccccgaucaaccugguccgggaccugccccagggguucagcgcccucgagccccugguggaccugcccaucggcaucaacaucacccgcuuccagacccuccuggcccugcaccgguccuaccucacgccgggggacagcagcuccggcuggaccgcgggcgccgccgccuacuacgugggguaccugcagccccgcaccuuccugcucaaguacaacgagaacggcaccaucacggacgcggucgacugcgcccuggacccccugagcgagaccaagugcacccucaaguccuucaccguggagaaggggaucuaccagacgagcaacuuccgggugcagcccaccgaguccaucguccgcuucccgaacaucaccaaccugugccccuucggcgagguguucaacgccacccgguucgccagcgucuacgccuggaaccgcaagcggaucuccaacugcguggcggacuacagcgugcuguacaacuccgccagcuucuccacguucaagugcuacggcgucagccccaccaagcucaacgaccugugcuucaccaacguguacgccgacuccuucgugauccgcggggacgagguccggcagaucgcccccggccagaccgggaagaucgccgacuacaacuacaagcugccggacgacuucacgggcugcgugaucgcguggaacagcaacaaccucgacuccaaggucgggggcaacuacaacuaccuguaccgccuguuccgcaagagcaaccucaagcccuucgagcgggacaucuccaccgagaucuaccaggccggcagcacccccugcaacggggugaagggcuucaacugcuacuucccccugcaguccuacggguuccagccgaccaacggcgugggguaccagcccuaccggguggucgugcugagcuucgagcuccugcacgcccccgccacggugugcggccccaagaaguccaccaaccuggucaagaacaagugcgugaacuucaacuucaacggccucaccgggaccggcgugcugaccgagagcaacaagaaguuccugccguuccagcaguucgggcgcgacaucgccgacacgaccgacgcgguccgcgacccccagacccuggagauccucgacaucacccccugcagcuucggcgggguguccgugaucacgccgggcaccaacaccagcaaccaggucgccgugcuguaccagggcgugaacugcaccgagguccccguggccauccacgccgaccagcugacgcccaccuggcggguguacuccaccgggagcaacgucuuccagacccgcgccggcugccucaucggggcggagcacgugaacaacuccuacgagugcgacauccccaucggcgccggcaucugcgccagcuaccagacgcagaccaacuccccgcggcgcgcccggagcguggcgucccagagcaucaucgccuacaccaugucccugggggccgagaacagcgucgccuacuccaacaacagcaucgccauccccaccaacuucacgaucuccgugaccaccgagauccugcccgugagcaugaccaagacgagcgucgacugcaccauguacaucugcggcgacuccaccgagugcagcaaccuccugcugcaguacggguccuucugcacccagcucaaccgcgcgcugacgggcaucgccguggagcaggacaagaacacccaggagguguucgcccaggucaagcagaucuacaagacgcccccgaucaaggacuucgggggcuucaacuucagccagauccugcccgaccccuccaagcccagcaagcgguccuucaucgaggaccuccuguucaacaaggugacccuggccgacgccggcuucaucaagcaguacggggacugccucggcgacaucgcggcccgcgaccugaucugcgcccagaaguucaacgggcugaccgugcucccgccccugcugaccgacgagaugaucgcccaguacaccagcgcccuccuggcgggcaccaucacguccggguggaccuucggcgccggcgccgcccugcagauccccuucgcgaugcagauggccuaccgguucaacgggaucggcgucacccagaacgugcucuacgagaaccagaagcugaucgccaaccaguucaacagcgccaucgggaagauccaggacucccugagcuccaccgccagcgcgcucggcaagcugcaggacguggucaaccagaacgcccaggcccugaacacgcucgugaagcagcuguccagcaacuucggggccaucuccagcgugcugaacgacauccucucccgccuggacccgcccgaggccgagguccagaucgaccggcugaucaccggccgccuccagagccugcagaccuacgugacccagcagcugauccgggcggccgagauccgcgccagcgccaaccucgccgcgaccaagauguccgagugcgugcugggccagagcaagcgggucgacuucugcgggaagggcuaccaccugauguccuucccccagagcgcgccccacggggugguguuccuccacgucacguacgugcccgcccaggagaagaacuucaccaccgccccggccaucugccacgacggcaaggcccacuucccccgcgagggggucuucguguccaacggcacccacugguucgugacgcagcggaacuucuacgagccccagaucaucaccaccgacaacaccuucgucagcggcaacugcgacguggugaucgggaucgucaacaacacgguguacgacccccugcagccggagcuggacuccuucaaggaggagcucgacaaguacuucaagaaccacaccagccccgacguggaccugggcgacaucuccgggaucaacgccagcgucgugaacauccagaaggagaucgaccgccugaacgagguggccaagaaccucaacgagucccugaucgaccugcaggagcucggcaaguacgagcaguacaucaaguggcccugguacaucuggcugggcuucaucgccgggcugaucgcgaucgucauggugaccaucaugcucugcugcaugaccagcugcugcuccugccugaagggcugcugcagcugcggguccugcugcaaguucgacgaggacgacagcgagccggugcugaagggcgucaagcuccacuacacgugaggacuagucccuguucccagagcccacuuuuuuuucuuuuuuugaaauaaaauagccugucuuucagaucucaaaggcucuuuucagagccaccaaaaaaaaaaaaaaaaaaaaaaaaaaaaaaaaaaaaaaaaaaaaaaaaaaaaaaaaaaaaaaaaaaaaaaaaaaaaaaaaaaaaaaaaaaaaaaaaaaaaa

SEQ ID NO: 23551 - RNA, 4094 nt, Artificial Sequence
  SARS-CoV-2/Wuhan/WIV05/2019__EPI_ISL_402128 spike protein mRNA gc (1-1273)(K986P_V987P_K986P_V987P_L18F_T20N_P26S_D138Y_R190S_K417T _E484K_N501Y_D614G_H655Y_T1027I)
aggagagucccgcagucggcguccagcggcucugcuuguucgugugugugucguugcaggccuuauucaagcuuaccauguucguguuccugguccuccugccccuggugagcucccagugcgugaacuucaccaaccgcacccagcucccgagcgccuacacgaacuccuucacccggggcgucuacuaccccgacaagguguuccgcagcuccgugcugcacagcacccaggaccuguuccuccccuucuucuccaacgucaccugguuccacgccauccacgugagcgggacgaacggcaccaagcgguucgacaaccccgugcugccguucaacgacggggucuacuucgcguccaccgagaaguccaacaucauccgcggcuggaucuucgggaccacgcuggacuccaagacccagagccuccugaucgugaacaacgccaccaacguggucaucaaggugugcgaguuccaguucugcaacuaccccuuccugggcguguacuaccacaagaacaacaaguccuggauggagagcgaguuccgggucuacuccagcgccaacaacugcaccuucgaguacgugucccagcccuuccucauggaccuggagggcaagcaggggaacuucaagaaccugagcgaguucguguucaagaacaucgacggcuacuucaagaucuacuccaagcacacgcccaucaaccucguccgcgaccugccgcagggguucagcgcccuggagccccucguggaccugcccaucggcaucaacaucacccgguuccagacccugcucgcccugcaccgcagcuaccugacccccggggacuccagcuccggcuggacggcgggcgccgccgccuacuacgugggguaccuccagccgcggaccuuccugcugaaguacaacgagaacggcaccaucaccgacgcggucgacugcgcccucgacccccugagcgagacgaagugcacccugaaguccuucaccguggagaaggggaucuaccagaccagcaacuuccgcgugcagcccacggaguccaucguccgguuccccaacaucaccaaccucugcccguucggcgagguguucaacgccacccgcuucgccagcgucuacgccuggaaccggaagcgcaucuccaacugcguggcggacuacagcgugcuguacaacuccgccagcuucuccaccuucaagugcuacggcgucagccccacgaagcugaacgaccucugcuucaccaacguguacgccgacuccuucgugauccgcggggacgagguccggcagaucgcccccggccagaccgggaccaucgccgacuacaacuacaagcugcccgacgacuucacgggcugcgugaucgcguggaacagcaacaaccuggacuccaaggucgggggcaacuacaacuaccucuaccggcuguuccgcaagagcaaccugaagccguucgagcgggacaucuccaccgagaucuaccaggccggcagcacccccugcaacggggugaagggcuucaacugcuacuucccccuccagagcuacggguuccagcccaccuacggcgugggguaccagccguaccgcguggucgugcuguccuucgagcugcuccacgcccccgccacggugugcggccccaagaaguccaccaaccuggucaagaacaagugcgugaacuucaacuucaacggccugaccgggaccggcgugcucaccgagagcaacaagaaguuccugcccuuccagcaguucgggcgggacaucgccgacacgaccgacgcgguccgcgacccgcagacccuggagauccuggacaucacccccugcagcuucggcgggguguccgugaucacgcccggcaccaacaccagcaaccaggucgccgugcucuaccagggcgugaacugcaccgaggucccgguggccauccacgccgaccagcugacgcccaccuggcgcguguacuccaccgggagcaacgucuuccagacccgggccggcugccugaucggggcggaguacgugaacaacuccuacgagugcgacauccccaucggcgccggcaucugcgccagcuaccagacgcagaccaacagcccccgccgggcccgcagcguggcgucccagagcaucaucgccuacaccaugucccucggggccgagaacagcgucgccuacuccaacaacagcaucgccaucccgaccaacuucacgaucagcgugaccaccgagauccugcccguguccaugaccaagacgagcgucgacugcaccauguacaucugcggcgacuccaccgagugcagcaaccugcuccugcaguacggguccuucugcacccagcugaaccgggcgcucacgggcaucgccguggagcaggacaagaacacccaggagguguucgcccaggucaagcagaucuacaagaccccgcccaucaaggacuucgggggcuucaacuucagccagauccugcccgaccccuccaagcccagcaagcgcuccuucaucgaggaccuccuguucaacaaggugacccuggccgacgccggcuucaucaagcaguacggggacugccugggcgacaucgcggcccgggaccucaucugcgcccagaaguucaacgggcugacggugcugcccccgcuccugaccgacgagaugaucgcccaguacaccagcgcccugcucgcgggcaccaucacguccggguggaccuucggcgccggcgccgcccugcagauccccuucgcgaugcagauggccuaccgcuucaacgggaucggcgucacccagaacgugcuguacgagaaccagaagcucaucgccaaccaguucaacagcgccaucgggaagauccaggacucccugagcuccaccgccagcgcgcugggcaagcuccaggacguggucaaccagaacgcccaggcccugaacacgcuggugaagcagcucuccagcaacuucggggccaucuccagcgugcugaacgacauccugagccggcucgacccgcccgaggccgagguccagaucgaccgccugaucaccggccggcugcagucccuccagaccuacgugacccagcagcugauccgcgcggccgagauccgggccagcgccaaccuggccgcgaucaagauguccgagugcgugcucggccagagcaagcgcgucgacuucugcgggaagggcuaccaccugauguccuucccccagagcgcgccccacggggugguguuccugcacgucaccuacgugcccgcccaggagaagaacuucacgaccgcccccgccaucugccacgacggcaaggcccacuucccgcgggagggggucuucguguccaacggcacccacugguucgugacccagcgcaacuucuacgagccccagaucaucacgaccgacaacaccuucgucagcggcaacugcgacguggugaucgggaucgucaacaacaccguguacgacccccuccagcccgagcuggacuccuucaaggaggagcuggacaaguacuucaagaaccacacgagcccggacguggaccucggcgacaucuccgggaucaacgccagcgucgugaacauccagaaggagaucgaccggcugaacgagguggccaagaaccugaacgagucccucaucgaccugcaggagcugggcaaguacgagcaguacaucaaguggcccugguacaucuggcucggcuucaucgccgggcugaucgcgaucgucauggugaccaucaugcugugcugcaugaccagcugcugcuccugccucaagggcugcugcagcugcggguccugcugcaaguucgacgaggacgacagcgagcccgugcugaagggcgucaagcugcacuacaccugaggacuagucccuguucccagagcccacuuuuuuuucuuuuuuugaaauaaaauagccugucuuucagaucucaaaggcucuuuucagagccaccaaaaaaaaaaaaaaaaaaaaaaaaaaaaaaaaaaaaaaaaaaaaaaaaaaaaaaaaaaaaaaaaaaaaaaaaaaaaaaaaaaaaaaaaaaaaaaaaaaaaa

SEQ ID NO: 23552 - RNA, 4094 nt, Artificial Sequence
  SARS-CoV-2/Wuhan/WIV05/2019__EPI_ISL_402128 spike protein mRNA gc (1-1273)(K986P_V987P_K986P_V987P_S13I_W152C_L452R_D614G)
aggagagucccgcagucggcguccagcggcucugcuuguucgugugugugucguugcaggccuuauucaagcuuaccauguucguguuccugguccuccugccccuggugagcauccagugcgugaaccucaccacccgcacgcagcugccgcccgccuacaccaacuccuucacccggggcgucuacuaccccgacaagguguuccgcagcuccgugcugcacagcacccaggaccucuuccugcccuucuucuccaacgucacgugguuccacgccauccacgugagcgggaccaacggcaccaagcgguucgacaacccggugcugcccuucaacgacggggucuacuucgcguccaccgagaaguccaacaucauccgcggcuggaucuucgggacgacccucgacagcaagacccagagccugcugaucgugaacaacgccaccaacguggucaucaaggugugcgaguuccaguucugcaacgaccccuuccucggcguguacuaccacaagaacaacaaguccugcauggagagcgaguuccgggucuacuccagcgccaacaacugcacguucgaguacgugucccagcccuuccugauggaccuggagggcaagcaggggaacuucaagaaccuccgcgaguucguguucaagaacaucgacggcuacuucaagaucuacagcaagcacaccccgaucaaccugguccgggaccugccccagggguucuccgcccucgagccccugguggaccugcccaucggcaucaacaucacccgcuuccagacccuccuggcccugcaccggagcuaccucacgccgggggacuccagcagcggcuggaccgcgggcgccgccgccuacuacgugggguaccugcagccccgcaccuuccugcucaaguacaacgagaacggcaccaucacggacgcggucgacugcgcccuggacccccuguccgagaccaagugcacccucaagagcuucaccguggagaaggggaucuaccagacguccaacuuccgggugcagcccaccgagagcaucguccgcuucccgaacaucaccaaccugugccccuucggcgagguguucaacgccacccgguucgccuccgucuacgccuggaaccgcaagcggaucagcaacugcguggcggacuacuccgugcuguacaacagcgccuccuucagcacguucaagugcuacggcgucucccccaccaagcucaacgaccugugcuucaccaacguguacgccgacagcuucgugauccgcggggacgagguccggcagaucgcccccggccagaccgggaagaucgccgacuacaacuacaagcugccggacgacuucacgggcugcgugaucgcguggaacuccaacaaccucgacagcaaggucgggggcaacuacaacuaccgcuaccggcuguuccgcaaguccaaccugaagcccuucgagcgggacaucagcaccgagaucuaccaggccggcuccacccccugcaacgggguggagggcuucaacugcuacuucccccuccagagcuacggguuccagccgaccaacggcgugggguaccagcccuaccgcguggucgugcuguccuucgagcugcuccacgcccccgccacggugugcggccccaagaaguccaccaaccuggucaagaacaagugcgugaacuucaacuucaacggccugaccgggaccggcgugcucaccgagagcaacaagaaguuccugccguuccagcaguucgggcgcgacaucgccgacacgaccgacgcgguccgggacccccagacccuggagauccuggacaucacccccugcagcuucggcggggugagcgugaucacgccgggcaccaacaccuccaaccaggucgccgugcucuaccagggcgugaacugcaccgagguccccguggccauccacgccgaccagcugacgcccaccuggcgcguguacagcaccggguccaacgucuuccagacccgggccggcugccugaucggggcggagcacgugaacaacagcuacgagugcgacauccccaucggcgccggcaucugcgccuccuaccagacgcagaccaacagcccgcgccgggcccgcuccguggcgagccaguccaucaucgccuacaccaugagccucggggccgagaacuccgucgccuacagcaacaacuccaucgccauccccaccaacuucacgaucagcgugaccaccgagauccugcccguguccaugaccaagacgagcgucgacugcaccauguacaucugcggcgacagcaccgagugcuccaaccugcuccugcaguacgggagcuucugcacccagcugaaccgggcgcucacgggcaucgccguggagcaggacaagaacacccaggagguguucgcccaggucaagcagaucuacaagacgcccccgaucaaggacuucgggggcuucaacuucucccagauccugcccgaccccagcaagcccuccaagcgcagcuucaucgaggaccuccuguucaacaaggugacccuggccgacgccggcuucaucaagcaguacggggacugccugggcgacaucgcggcccgggaccucaucugcgcccagaaguucaacgggcugaccgugcugccgccccuccugaccgacgagaugaucgcccaguacaccuccgcccugcucgcgggcaccaucacgagcggguggaccuucggcgccggcgccgcccugcagauccccuucgcgaugcagauggccuaccgcuucaacgggaucggcgucacccagaacgugcuguacgagaaccagaagcucaucgccaaccaguucaacuccgccaucgggaagauccaggacagccuguccagcaccgccuccgcgcugggcaagcuccaggacguggucaaccagaacgcccaggcccugaacacgcuggugaagcagcucagcuccaacuucggggccaucagcuccgugcugaacgacauccugagccggcucgacccgcccgaggccgagguccagaucgaccgccugaucaccggccggcugcagucccuccagaccuacgugacccagcagcugauccgcgcggccgagauccgggccagcgccaaccuggccgcgaccaagaugagcgagugcgugcucggccaguccaagcgcgucgacuucugcgggaagggcuaccaccugaugagcuucccccaguccgcgccccacggggugguguuccugcacgucacguacgugcccgcccaggagaagaacuucaccaccgccccggccaucugccacgacggcaaggcccacuucccccgggagggggucuucgugagcaacggcacccacugguucgugacgcagcgcaacuucuacgagccccagaucaucaccaccgacaacaccuucgucuccggcaacugcgacguggugaucgggaucgucaacaacacgguguacgacccccuccagccggagcuggacagcuucaaggaggagcuggacaaguacuucaagaaccacaccucccccgacguggaccucggcgacaucagcgggaucaacgccuccgucgugaacauccagaaggagaucgaccggcugaacgagguggccaagaaccugaacgagagccucaucgaccugcaggagcugggcaaguacgagcaguacaucaaguggcccugguacaucuggcucggcuucaucgccgggcugaucgcgaucgucauggugaccaucaugcugugcugcaugaccuccugcugcagcugccucaagggcugcugcuccugcgggagcugcugcaaguucgacgaggacgacuccgagccggugcugaagggcgucaagcugcacuacacgugaggacuagucccuguucccagagcccacuuuuuuuucuuuuuuugaaauaaaauagccugucuuucagaucucaaaggcucuuuucagagccaccaaaaaaaaaaaaaaaaaaaaaaaaaaaaaaaaaaaaaaaaaaaaaaaaaaaaaaaaaaaaaaaaaaaaaaaaaaaaaaaaaaaaaaaaaaaaaaaaaaaaa

SEQ ID NO: 23553 - RNA, 4094 nt, Artificial Sequence
  SARS-CoV-2/Wuhan/WIV05/2019__EPI_ISL_402128 spike protein mRNA gc (1-1273)(K986P_V987P)
aggagagucccgcagucggcguccagcggcucugcuuguucgugugugugucguugcaggccuuauucaagcuuaccauguucguguuccuggugcugcugccccuggugagcagccagugcgugaaccugaccacccggacccagcugccaccagccuacaccaacagcuucacccggggcgucuacuaccccgacaagguguuccggagcagcguccugcacagcacccaggaccuguuccugcccuucuucagcaacgugaccugguuccacgccauccacgugagcggcaccaacggcaccaagcgguucgacaaccccgugcugcccuucaacgacggcguguacuucgccagcaccgagaagagcaacaucauccggggcuggaucuucggcaccacccuggacagcaagacccagagccugcugaucgugaauaacgccaccaacguggugaucaaggugugcgaguuccaguucugcaacgaccccuuccugggcguguacuaccacaagaacaacaagagcuggauggagagcgaguuccggguguacagcagcgccaacaacugcaccuucgaguacgugagccagcccuuccugauggaccuggagggcaagcagggcaacuucaagaaccugcgggaguucguguucaagaacaucgacggcuacuucaagaucuacagcaagcacaccccaaucaaccuggugcgggaucugccccagggcuucucagcccuggagccccugguggaccugcccaucggcaucaacaucacccgguuccagacccugcuggcccugcaccggagcuaccugaccccaggcgacagcagcagcggguggacagcaggcgcggcugcuuacuacgugggcuaccugcagccccggaccuuccugcugaaguacaacgagaacggcaccaucaccgacgccguggacugcgcccuggacccucugagcgagaccaagugcacccugaagagcuucaccguggagaagggcaucuaccagaccagcaacuuccgggugcagcccaccgagagcaucgugcgguuccccaacaucaccaaccugugccccuucggcgagguguucaacgccacccgguucgccagcguguacgccuggaaccggaagcggaucagcaacugcguggccgacuacagcgugcuguacaacagcgccagcuucagcaccuucaagugcuacggcgugagccccaccaagcugaacgaccugugcuucaccaacguguacgccgacagcuucgugauccguggcgacgaggugcggcagaucgcacccggccagacaggcaagaucgccgacuacaacuacaagcugcccgacgacuucaccggcugcgugaucgccuggaacagcaacaaccucgacagcaaggugggcggcaacuacaacuaccuguaccggcuguuccggaagagcaaccugaagcccuucgagcgggacaucagcaccgagaucuaccaagccggcuccaccccuugcaacggcguggagggcuucaacugcuacuucccucugcagagcuacggcuuccagcccaccaacggcgugggcuaccagcccuaccgggugguggugcugagcuucgagcugcugcacgccccagccaccguguguggccccaagaagagcaccaaccuggugaagaacaagugcgugaacuucaacuucaacggccuuaccggcaccggcgugcugaccgagagcaacaagaaauuccugcccuuucagcaguucggccgggacaucgccgacaccaccgacgcugugcgggauccccagacccuggagauccuggacaucaccccuugcagcuucggcggcgugagcgugaucaccccaggcaccaacaccagcaaccagguggccgugcuguaccaggacgugaacugcaccgaggugcccguggccauccacgccgaccagcugacacccaccuggcgggucuacagcaccggcagcaacguguuccagacccgggccgguugccugaucggcgccgagcacgugaacaacagcuacgagugcgacauccccaucggcgccggcaucugugccagcuaccagacccagaccaauucaccccggagggcaaggagcguggccagccagagcaucaucgccuacaccaugagccugggcgccgagaacagcguggccuacagcaacaacagcaucgccauccccaccaacuucaccaucagcgugaccaccgagauucugcccgugagcaugaccaagaccagcguggacugcaccauguacaucugcggcgacagcaccgagugcagcaaccugcugcugcaguacggcagcuucugcacccagcugaaccgggcccugaccggcaucgccguggagcaggacaagaacacccaggagguguucgcccaggugaagcagaucuacaagaccccucccaucaaggacuucggcggcuucaacuucagccagauccugcccgaccccagcaagcccagcaagcggagcuucaucgaggaccugcuguucaacaaggugacccuagccgacgccggcuucaucaagcaguacggcgacugccucggcgacauagccgcccgggaccugaucugcgcccagaaguucaacggccugaccgugcugccuccccugcugaccgacgagaugaucgcccaguacaccagcgcccuguuagccggaaccaucaccagcggcuggacuuucggcgcuggagccgcucugcagauccccuucgccaugcagauggccuaccgguucaacggcaucggcgugacccagaacgugcuguacgagaaccagaagcugaucgccaaccaguucaacagcgccaucggcaagauccaggacagccugagcagcaccgcuagcgcccugggcaagcugcaggacguggugaaccagaacgcccaggcccugaacacccuggugaagcagcugagcagcaacuucggcgccaucagcagcgugcugaacgacauccugagccggcuggacccucccgaggccgaggugcagaucgaccggcugaucacuggccggcugcagagccugcagaccuacgugacccagcagcugauccgggccgccgagauucgggccagcgccaaccuggccgccaccaagaugagcgagugcgugcugggccagagcaagcggguggacuucugcggcaagggcuaccaccugaugagcuuuccccagagcgcaccccacggagugguguuccugcacgugaccuacgugcccgcccaggagaagaacuucaccaccgccccagccaucugccacgacggcaaggcccacuuuccccgggagggcguguucgugagcaacggcacccacugguucgugacccagcggaacuucuacgagccccagaucaucaccaccgacaacaccuucgugagcggcaacugcgacguggugaucggcaucgugaacaacaccguguacgauccccugcagcccgagcuggacagcuucaaggaggagcuggacaaguacuucaagaaucacaccagccccgacguggaccugggcgacaucagcggcaucaacgccagcguggugaacauccagaaggagaucgaucggcugaacgagguggccaagaaccugaacgagagccugaucgaccugcaggagcugggcaaguacgagcaguacaucaaguggcccugguacaucuggcugggcuucaucgccggccugaucgccaucgugauggugaccaucaugcugugcugcaugaccagcugcugcagcugccugaagggcuguugcagcugcggcagcugcugcaaguucgacgaggacgacagcgagcccgugcugaagggcgugaagcugcacuacaccugaggacuagucccuguucccagagcccacuuuuuuuucuuuuuuugaaauaaaauagccugucuuucagaucucaaaggcucuuuucagagccaccaaaaaaaaaaaaaaaaaaaaaaaaaaaaaaaaaaaaaaaaaaaaaaaaaaaaaaaaaaaaaaaaaaaaaaaaaaaaaaaaaaaaaaaaaaaaaaaaaaaaa

SEQ ID NO: 23554 - RNA, 4094 nt, Artificial Sequence
  SARS-CoV-2/Wuhan/WIV05/2019__EPI_ISL_402128 spike protein mRNA gc (1-1273)(K986P_V987P_ D614G)
aggagagucccgcagucggcguccagcggcucugcuuguucgugugugugucguugcaggccuuauucaagcuuaccauguucguguuccuggugcugcugccccuggugagcagccagugcgugaaccugaccacccggacccagcugccaccagccuacaccaacagcuucacccggggcgucuacuaccccgacaagguguuccggagcagcguccugcacagcacccaggaccuguuccugcccuucuucagcaacgugaccugguuccacgccauccacgugagcggcaccaacggcaccaagcgguucgacaaccccgugcugcccuucaacgacggcguguacuucgccagcaccgagaagagcaacaucauccggggcuggaucuucggcaccacccuggacagcaagacccagagccugcugaucgugaauaacgccaccaacguggugaucaaggugugcgaguuccaguucugcaacgaccccuuccugggcguguacuaccacaagaacaacaagagcuggauggagagcgaguuccggguguacagcagcgccaacaacugcaccuucgaguacgugagccagcccuuccugauggaccuggagggcaagcagggcaacuucaagaaccugcgggaguucguguucaagaacaucgacggcuacuucaagaucuacagcaagcacaccccaaucaaccuggugcgggaucugccccagggcuucucagcccuggagccccugguggaccugcccaucggcaucaacaucacccgguuccagacccugcuggcccugcaccggagcuaccugaccccaggcgacagcagcagcggguggacagcaggcgcggcugcuuacuacgugggcuaccugcagccccggaccuuccugcugaaguacaacgagaacggcaccaucaccgacgccguggacugcgcccuggacccucugagcgagaccaagugcacccugaagagcuucaccguggagaagggcaucuaccagaccagcaacuuccgggugcagcccaccgagagcaucgugcgguuccccaacaucaccaaccugugccccuucggcgagguguucaacgccacccgguucgccagcguguacgccuggaaccggaagcggaucagcaacugcguggccgacuacagcgugcuguacaacagcgccagcuucagcaccuucaagugcuacggcgugagccccaccaagcugaacgaccugugcuucaccaacguguacgccgacagcuucgugauccguggcgacgaggugcggcagaucgcacccggccagacaggcaagaucgccgacuacaacuacaagcugcccgacgacuucaccggcugcgugaucgccuggaacagcaacaaccucgacagcaaggugggcggcaacuacaacuaccuguaccggcuguuccggaagagcaaccugaagcccuucgagcgggacaucagcaccgagaucuaccaagccggcuccaccccuugcaacggcguggagggcuucaacugcuacuucccucugcagagcuacggcuuccagcccaccaacggcgugggcuaccagcccuaccgggugguggugcugagcuucgagcugcugcacgccccagccaccguguguggccccaagaagagcaccaaccuggugaagaacaagugcgugaacuucaacuucaacggccuuaccggcaccggcgugcugaccgagagcaacaagaaauuccugcccuuucagcaguucggccgggacaucgccgacaccaccgacgcugugcgggauccccagacccuggagauccuggacaucaccccuugcagcuucggcggcgugagcgugaucaccccaggcaccaacaccagcaaccagguggccgugcuguaccagggcgugaacugcaccgaggugcccguggccauccacgccgaccagcugacacccaccuggcgggucuacagcaccggcagcaacguguuccagacccgggccgguugccugaucggcgccgagcacgugaacaacagcuacgagugcgacauccccaucggcgccggcaucugugccagcuaccagacccagaccaauucaccccggagggcaaggagcguggccagccagagcaucaucgccuacaccaugagccugggcgccgagaacagcguggccuacagcaacaacagcaucgccauccccaccaacuucaccaucagcgugaccaccgagauucugcccgugagcaugaccaagaccagcguggacugcaccauguacaucugcggcgacagcaccgagugcagcaaccugcugcugcaguacggcagcuucugcacccagcugaaccgggcccugaccggcaucgccguggagcaggacaagaacacccaggagguguucgcccaggugaagcagaucuacaagaccccucccaucaaggacuucggcggcuucaacuucagccagauccugcccgaccccagcaagcccagcaagcggagcuucaucgaggaccugcuguucaacaaggugacccuagccgacgccggcuucaucaagcaguacggcgacugccucggcgacauagccgcccgggaccugaucugcgcccagaaguucaacggccugaccgugcugccuccccugcugaccgacgagaugaucgcccaguacaccagcgcccuguuagccggaaccaucaccagcggcuggacuuucggcgcuggagccgcucugcagauccccuucgccaugcagauggccuaccgguucaacggcaucggcgugacccagaacgugcuguacgagaaccagaagcugaucgccaaccaguucaacagcgccaucggcaagauccaggacagccugagcagcaccgcuagcgcccugggcaagcugcaggacguggugaaccagaacgcccaggcccugaacacccuggugaagcagcugagcagcaacuucggcgccaucagcagcgugcugaacgacauccugagccggcuggacccucccgaggccgaggugcagaucgaccggcugaucacuggccggcugcagagccugcagaccuacgugacccagcagcugauccgggccgccgagauucgggccagcgccaaccuggccgccaccaagaugagcgagugcgugcugggccagagcaagcggguggacuucugcggcaagggcuaccaccugaugagcuuuccccagagcgcaccccacggagugguguuccugcacgugaccuacgugcccgcccaggagaagaacuucaccaccgccccagccaucugccacgacggcaaggcccacuuuccccgggagggcguguucgugagcaacggcacccacugguucgugacccagcggaacuucuacgagccccagaucaucaccaccgacaacaccuucgugagcggcaacugcgacguggugaucggcaucgugaacaacaccguguacgauccccugcagcccgagcuggacagcuucaaggaggagcuggacaaguacuucaagaaucacaccagccccgacguggaccugggcgacaucagcggcaucaacgccagcguggugaacauccagaaggagaucgaucggcugaacgagguggccaagaaccugaacgagagccugaucgaccugcaggagcugggcaaguacgagcaguacaucaaguggcccugguacaucuggcugggcuucaucgccggccugaucgccaucgugauggugaccaucaugcugugcugcaugaccagcugcugcagcugccugaagggcuguugcagcugcggcagcugcugcaaguucgacgaggacgacagcgagcccgugcugaagggcgugaagcugcacuacaccugaggacuagucccuguucccagagcccacuuuuuuuucuuuuuuugaaauaaaauagccugucuuucagaucucaaaggcucuuuucagagccaccaaaaaaaaaaaaaaaaaaaaaaaaaaaaaaaaaaaaaaaaaaaaaaaaaaaaaaaaaaaaaaaaaaaaaaaaaaaaaaaaaaaaaaaaaaaaaaaaaaaaa

SEQ ID NO: 23555 - RNA, 4094 nt, Artificial Sequence
  SARS-CoV-2/Wuhan/WIV05/2019__EPI_ISL_402128 spike protein mRNA gc (1-1273)(K986P_V987P_A222V_D614G)
aggagagucccgcagucggcguccagcggcucugcuuguucgugugugugucguugcaggccuuauucaagcuuaccauguucguguuccuggugcugcugccccuggugagcagccagugcgugaaccugaccacccggacccagcugccaccagccuacaccaacagcuucacccggggcgucuacuaccccgacaagguguuccggagcagcguccugcacagcacccaggaccuguuccugcccuucuucagcaacgugaccugguuccacgccauccacgugagcggcaccaacggcaccaagcgguucgacaaccccgugcugcccuucaacgacggcguguacuucgccagcaccgagaagagcaacaucauccggggcuggaucuucggcaccacccuggacagcaagacccagagccugcugaucgugaauaacgccaccaacguggugaucaaggugugcgaguuccaguucugcaacgaccccuuccugggcguguacuaccacaagaacaacaagagcuggauggagagcgaguuccggguguacagcagcgccaacaacugcaccuucgaguacgugagccagcccuuccugauggaccuggagggcaagcagggcaacuucaagaaccugcgggaguucguguucaagaacaucgacggcuacuucaagaucuacagcaagcacaccccaaucaaccuggugcgggaucugccccagggcuucucagugcuggagccccugguggaccugcccaucggcaucaacaucacccgguuccagacccugcuggcccugcaccggagcuaccugaccccaggcgacagcagcagcggguggacagcaggcgcggcugcuuacuacgugggcuaccugcagccccggaccuuccugcugaaguacaacgagaacggcaccaucaccgacgccguggacugcgcccuggacccucugagcgagaccaagugcacccugaagagcuucaccguggagaagggcaucuaccagaccagcaacuuccgggugcagcccaccgagagcaucgugcgguuccccaacaucaccaaccugugccccuucggcgagguguucaacgccacccgguucgccagcguguacgccuggaaccggaagcggaucagcaacugcguggccgacuacagcgugcuguacaacagcgccagcuucagcaccuucaagugcuacggcgugagccccaccaagcugaacgaccugugcuucaccaacguguacgccgacagcuucgugauccguggcgacgaggugcggcagaucgcacccggccagacaggcaagaucgccgacuacaacuacaagcugcccgacgacuucaccggcugcgugaucgccuggaacagcaacaaccucgacagcaaggugggcggcaacuacaacuaccuguaccggcuguuccggaagagcaaccugaagcccuucgagcgggacaucagcaccgagaucuaccaagccggcuccaccccuugcaacggcguggagggcuucaacugcuacuucccucugcagagcuacggcuuccagcccaccaacggcgugggcuaccagcccuaccgggugguggugcugagcuucgagcugcugcacgccccagccaccguguguggccccaagaagagcaccaaccuggugaagaacaagugcgugaacuucaacuucaacggccuuaccggcaccggcgugcugaccgagagcaacaagaaauuccugcccuuucagcaguucggccgggacaucgccgacaccaccgacgcugugcgggauccccagacccuggagauccuggacaucaccccuugcagcuucggcggcgugagcgugaucaccccaggcaccaacaccagcaaccagguggccgugcuguaccagggcgugaacugcaccgaggugcccguggccauccacgccgaccagcugacacccaccuggcgggucuacagcaccggcagcaacguguuccagacccgggccgguugccugaucggcgccgagcacgugaacaacagcuacgagugcgacauccccaucggcgccggcaucugugccagcuaccagacccagaccaauucaccccggagggcaaggagcguggccagccagagcaucaucgccuacaccaugagccugggcgccgagaacagcguggccuacagcaacaacagcaucgccauccccaccaacuucaccaucagcgugaccaccgagauucugcccgugagcaugaccaagaccagcguggacugcaccauguacaucugcggcgacagcaccgagugcagcaaccugcugcugcaguacggcagcuucugcacccagcugaaccgggcccugaccggcaucgccguggagcaggacaagaacacccaggagguguucgcccaggugaagcagaucuacaagaccccucccaucaaggacuucggcggcuucaacuucagccagauccugcccgaccccagcaagcccagcaagcggagcuucaucgaggaccugcuguucaacaaggugacccuagccgacgccggcuucaucaagcaguacggcgacugccucggcgacauagccgcccgggaccugaucugcgcccagaaguucaacggccugaccgugcugccuccccugcugaccgacgagaugaucgcccaguacaccagcgcccuguuagccggaaccaucaccagcggcuggacuuucggcgcuggagccgcucugcagauccccuucgccaugcagauggccuaccgguucaacggcaucggcgugacccagaacgugcuguacgagaaccagaagcugaucgccaaccaguucaacagcgccaucggcaagauccaggacagccugagcagcaccgcuagcgcccugggcaagcugcaggacguggugaaccagaacgcccaggcccugaacacccuggugaagcagcugagcagcaacuucggcgccaucagcagcgugcugaacgacauccugagccggcuggacccucccgaggccgaggugcagaucgaccggcugaucacuggccggcugcagagccugcagaccuacgugacccagcagcugauccgggccgccgagauucgggccagcgccaaccuggccgccaccaagaugagcgagugcgugcugggccagagcaagcggguggacuucugcggcaagggcuaccaccugaugagcuuuccccagagcgcaccccacggagugguguuccugcacgugaccuacgugcccgcccaggagaagaacuucaccaccgccccagccaucugccacgacggcaaggcccacuuuccccgggagggcguguucgugagcaacggcacccacugguucgugacccagcggaacuucuacgagccccagaucaucaccaccgacaacaccuucgugagcggcaacugcgacguggugaucggcaucgugaacaacaccguguacgauccccugcagcccgagcuggacagcuucaaggaggagcuggacaaguacuucaagaaucacaccagccccgacguggaccugggcgacaucagcggcaucaacgccagcguggugaacauccagaaggagaucgaucggcugaacgagguggccaagaaccugaacgagagccugaucgaccugcaggagcugggcaaguacgagcaguacaucaaguggcccugguacaucuggcugggcuucaucgccggccugaucgccaucgugauggugaccaucaugcugugcugcaugaccagcugcugcagcugccugaagggcuguugcagcugcggcagcugcugcaaguucgacgaggacgacagcgagcccgugcugaagggcgugaagcugcacuacaccugaggacuagucccuguucccagagcccacuuuuuuuucuuuuuuugaaauaaaauagccugucuuucagaucucaaaggcucuuuucagagccaccaaaaaaaaaaaaaaaaaaaaaaaaaaaaaaaaaaaaaaaaaaaaaaaaaaaaaaaaaaaaaaaaaaaaaaaaaaaaaaaaaaaaaaaaaaaaaaaaaaaaa

SEQ ID NO: 23556 - RNA, 4094 nt, Artificial Sequence
  SARS-CoV-2/Wuhan/WIV05/2019__EPI_ISL_402128 spike protein mRNA gc (1-1273)(K986P_V987P_N439K_D614G)
aggagagucccgcagucggcguccagcggcucugcuuguucgugugugugucguugcaggccuuauucaagcuuaccauguucguguuccuggugcugcugccccuggugagcagccagugcgugaaccugaccacccggacccagcugccaccagccuacaccaacagcuucacccggggcgucuacuaccccgacaagguguuccggagcagcguccugcacagcacccaggaccuguuccugcccuucuucagcaacgugaccugguuccacgccauccacgugagcggcaccaacggcaccaagcgguucgacaaccccgugcugcccuucaacgacggcguguacuucgccagcaccgagaagagcaacaucauccggggcuggaucuucggcaccacccuggacagcaagacccagagccugcugaucgugaauaacgccaccaacguggugaucaaggugugcgaguuccaguucugcaacgaccccuuccugggcguguacuaccacaagaacaacaagagcuggauggagagcgaguuccggguguacagcagcgccaacaacugcaccuucgaguacgugagccagcccuuccugauggaccuggagggcaagcagggcaacuucaagaaccugcgggaguucguguucaagaacaucgacggcuacuucaagaucuacagcaagcacaccccaaucaaccuggugcgggaucugccccagggcuucucagcccuggagccccugguggaccugcccaucggcaucaacaucacccgguuccagacccugcuggcccugcaccggagcuaccugaccccaggcgacagcagcagcggguggacagcaggcgcggcugcuuacuacgugggcuaccugcagccccggaccuuccugcugaaguacaacgagaacggcaccaucaccgacgccguggacugcgcccuggacccucugagcgagaccaagugcacccugaagagcuucaccguggagaagggcaucuaccagaccagcaacuuccgggugcagcccaccgagagcaucgugcgguuccccaacaucaccaaccugugccccuucggcgagguguucaacgccacccgguucgccagcguguacgccuggaaccggaagcggaucagcaacugcguggccgacuacagcgugcuguacaacagcgccagcuucagcaccuucaagugcuacggcgugagccccaccaagcugaacgaccugugcuucaccaacguguacgccgacagcuucgugauccguggcgacgaggugcggcagaucgcacccggccagacaggcaagaucgccgacuacaacuacaagcugcccgacgacuucaccggcugcgugaucgccuggaacagcaagaaccucgacagcaaggugggcggcaacuacaacuaccuguaccggcuguuccggaagagcaaccugaagcccuucgagcgggacaucagcaccgagaucuaccaagccggcuccaccccuugcaacggcguggagggcuucaacugcuacuucccucugcagagcuacggcuuccagcccaccaacggcgugggcuaccagcccuaccgggugguggugcugagcuucgagcugcugcacgccccagccaccguguguggccccaagaagagcaccaaccuggugaagaacaagugcgugaacuucaacuucaacggccuuaccggcaccggcgugcugaccgagagcaacaagaaauuccugcccuuucagcaguucggccgggacaucgccgacaccaccgacgcugugcgggauccccagacccuggagauccuggacaucaccccuugcagcuucggcggcgugagcgugaucaccccaggcaccaacaccagcaaccagguggccgugcuguaccagggcgugaacugcaccgaggugcccguggccauccacgccgaccagcugacacccaccuggcgggucuacagcaccggcagcaacguguuccagacccgggccgguugccugaucggcgccgagcacgugaacaacagcuacgagugcgacauccccaucggcgccggcaucugugccagcuaccagacccagaccaauucaccccggagggcaaggagcguggccagccagagcaucaucgccuacaccaugagccugggcgccgagaacagcguggccuacagcaacaacagcaucgccauccccaccaacuucaccaucagcgugaccaccgagauucugcccgugagcaugaccaagaccagcguggacugcaccauguacaucugcggcgacagcaccgagugcagcaaccugcugcugcaguacggcagcuucugcacccagcugaaccgggcccugaccggcaucgccguggagcaggacaagaacacccaggagguguucgcccaggugaagcagaucuacaagaccccucccaucaaggacuucggcggcuucaacuucagccagauccugcccgaccccagcaagcccagcaagcggagcuucaucgaggaccugcuguucaacaaggugacccuagccgacgccggcuucaucaagcaguacggcgacugccucggcgacauagccgcccgggaccugaucugcgcccagaaguucaacggccugaccgugcugccuccccugcugaccgacgagaugaucgcccaguacaccagcgcccuguuagccggaaccaucaccagcggcuggacuuucggcgcuggagccgcucugcagauccccuucgccaugcagauggccuaccgguucaacggcaucggcgugacccagaacgugcuguacgagaaccagaagcugaucgccaaccaguucaacagcgccaucggcaagauccaggacagccugagcagcaccgcuagcgcccugggcaagcugcaggacguggugaaccagaacgcccaggcccugaacacccuggugaagcagcugagcagcaacuucggcgccaucagcagcgugcugaacgacauccugagccggcuggacccucccgaggccgaggugcagaucgaccggcugaucacuggccggcugcagagccugcagaccuacgugacccagcagcugauccgggccgccgagauucgggccagcgccaaccuggccgccaccaagaugagcgagugcgugcugggccagagcaagcggguggacuucugcggcaagggcuaccaccugaugagcuuuccccagagcgcaccccacggagugguguuccugcacgugaccuacgugcccgcccaggagaagaacuucaccaccgccccagccaucugccacgacggcaaggcccacuuuccccgggagggcguguucgugagcaacggcacccacugguucgugacccagcggaacuucuacgagccccagaucaucaccaccgacaacaccuucgugagcggcaacugcgacguggugaucggcaucgugaacaacaccguguacgauccccugcagcccgagcuggacagcuucaaggaggagcuggacaaguacuucaagaaucacaccagccccgacguggaccugggcgacaucagcggcaucaacgccagcguggugaacauccagaaggagaucgaucggcugaacgagguggccaagaaccugaacgagagccugaucgaccugcaggagcugggcaaguacgagcaguacaucaaguggcccugguacaucuggcugggcuucaucgccggccugaucgccaucgugauggugaccaucaugcugugcugcaugaccagcugcugcagcugccugaagggcuguugcagcugcggcagcugcugcaaguucgacgaggacgacagcgagcccgugcugaagggcgugaagcugcacuacaccugaggacuagucccuguucccagagcccacuuuuuuuucuuuuuuugaaauaaaauagccugucuuucagaucucaaaggcucuuuucagagccaccaaaaaaaaaaaaaaaaaaaaaaaaaaaaaaaaaaaaaaaaaaaaaaaaaaaaaaaaaaaaaaaaaaaaaaaaaaaaaaaaaaaaaaaaaaaaaaaaaaaaa

SEQ ID NO: 23557 - RNA, 4094 nt, Artificial Sequence
  SARS-CoV-2/Wuhan/WIV05/2019__EPI_ISL_402128 spike protein mRNA gc (1-1273)(K986P_V987P_S477N_D614G)
aggagagucccgcagucggcguccagcggcucugcuuguucgugugugugucguugcaggccuuauucaagcuuaccauguucguguuccuggugcugcugccccuggugagcagccagugcgugaaccugaccacccggacccagcugccaccagccuacaccaacagcuucacccggggcgucuacuaccccgacaagguguuccggagcagcguccugcacagcacccaggaccuguuccugcccuucuucagcaacgugaccugguuccacgccauccacgugagcggcaccaacggcaccaagcgguucgacaaccccgugcugcccuucaacgacggcguguacuucgccagcaccgagaagagcaacaucauccggggcuggaucuucggcaccacccuggacagcaagacccagagccugcugaucgugaauaacgccaccaacguggugaucaaggugugcgaguuccaguucugcaacgaccccuuccugggcguguacuaccacaagaacaacaagagcuggauggagagcgaguuccggguguacagcagcgccaacaacugcaccuucgaguacgugagccagcccuuccugauggaccuggagggcaagcagggcaacuucaagaaccugcgggaguucguguucaagaacaucgacggcuacuucaagaucuacagcaagcacaccccaaucaaccuggugcgggaucugccccagggcuucucagcccuggagccccugguggaccugcccaucggcaucaacaucacccgguuccagacccugcuggcccugcaccggagcuaccugaccccaggcgacagcagcagcggguggacagcaggcgcggcugcuuacuacgugggcuaccugcagccccggaccuuccugcugaaguacaacgagaacggcaccaucaccgacgccguggacugcgcccuggacccucugagcgagaccaagugcacccugaagagcuucaccguggagaagggcaucuaccagaccagcaacuuccgggugcagcccaccgagagcaucgugcgguuccccaacaucaccaaccugugccccuucggcgagguguucaacgccacccgguucgccagcguguacgccuggaaccggaagcggaucagcaacugcguggccgacuacagcgugcuguacaacagcgccagcuucagcaccuucaagugcuacggcgugagccccaccaagcugaacgaccugugcuucaccaacguguacgccgacagcuucgugauccguggcgacgaggugcggcagaucgcacccggccagacaggcaagaucgccgacuacaacuacaagcugcccgacgacuucaccggcugcgugaucgccuggaacagcaacaaccucgacagcaaggugggcggcaacuacaacuaccuguaccggcuguuccggaagagcaaccugaagcccuucgagcgggacaucagcaccgagaucuaccaagccggcaacaccccuugcaacggcguggagggcuucaacugcuacuucccucugcagagcuacggcuuccagcccaccaacggcgugggcuaccagcccuaccgggugguggugcugagcuucgagcugcugcacgccccagccaccguguguggccccaagaagagcaccaaccuggugaagaacaagugcgugaacuucaacuucaacggccuuaccggcaccggcgugcugaccgagagcaacaagaaauuccugcccuuucagcaguucggccgggacaucgccgacaccaccgacgcugugcgggauccccagacccuggagauccuggacaucaccccuugcagcuucggcggcgugagcgugaucaccccaggcaccaacaccagcaaccagguggccgugcuguaccagggcgugaacugcaccgaggugcccguggccauccacgccgaccagcugacacccaccuggcgggucuacagcaccggcagcaacguguuccagacccgggccgguugccugaucggcgccgagcacgugaacaacagcuacgagugcgacauccccaucggcgccggcaucugugccagcuaccagacccagaccaauucaccccggagggcaaggagcguggccagccagagcaucaucgccuacaccaugagccugggcgccgagaacagcguggccuacagcaacaacagcaucgccauccccaccaacuucaccaucagcgugaccaccgagauucugcccgugagcaugaccaagaccagcguggacugcaccauguacaucugcggcgacagcaccgagugcagcaaccugcugcugcaguacggcagcuucugcacccagcugaaccgggcccugaccggcaucgccguggagcaggacaagaacacccaggagguguucgcccaggugaagcagaucuacaagaccccucccaucaaggacuucggcggcuucaacuucagccagauccugcccgaccccagcaagcccagcaagcggagcuucaucgaggaccugcuguucaacaaggugacccuagccgacgccggcuucaucaagcaguacggcgacugccucggcgacauagccgcccgggaccugaucugcgcccagaaguucaacggccugaccgugcugccuccccugcugaccgacgagaugaucgcccaguacaccagcgcccuguuagccggaaccaucaccagcggcuggacuuucggcgcuggagccgcucugcagauccccuucgccaugcagauggccuaccgguucaacggcaucggcgugacccagaacgugcuguacgagaaccagaagcugaucgccaaccaguucaacagcgccaucggcaagauccaggacagccugagcagcaccgcuagcgcccugggcaagcugcaggacguggugaaccagaacgcccaggcccugaacacccuggugaagcagcugagcagcaacuucggcgccaucagcagcgugcugaacgacauccugagccggcuggacccucccgaggccgaggugcagaucgaccggcugaucacuggccggcugcagagccugcagaccuacgugacccagcagcugauccgggccgccgagauucgggccagcgccaaccuggccgccaccaagaugagcgagugcgugcugggccagagcaagcggguggacuucugcggcaagggcuaccaccugaugagcuuuccccagagcgcaccccacggagugguguuccugcacgugaccuacgugcccgcccaggagaagaacuucaccaccgccccagccaucugccacgacggcaaggcccacuuuccccgggagggcguguucgugagcaacggcacccacugguucgugacccagcggaacuucuacgagccccagaucaucaccaccgacaacaccuucgugagcggcaacugcgacguggugaucggcaucgugaacaacaccguguacgauccccugcagcccgagcuggacagcuucaaggaggagcuggacaaguacuucaagaaucacaccagccccgacguggaccugggcgacaucagcggcaucaacgccagcguggugaacauccagaaggagaucgaucggcugaacgagguggccaagaaccugaacgagagccugaucgaccugcaggagcugggcaaguacgagcaguacaucaaguggcccugguacaucuggcugggcuucaucgccggccugaucgccaucgugauggugaccaucaugcugugcugcaugaccagcugcugcagcugccugaagggcuguugcagcugcggcagcugcugcaaguucgacgaggacgacagcgagcccgugcugaagggcgugaagcugcacuacaccugaggacuagucccuguucccagagcccacuuuuuuuucuuuuuuugaaauaaaauagccugucuuucagaucucaaaggcucuuuucagagccaccaaaaaaaaaaaaaaaaaaaaaaaaaaaaaaaaaaaaaaaaaaaaaaaaaaaaaaaaaaaaaaaaaaaaaaaaaaaaaaaaaaaaaaaaaaaaaaaaaaaaa

SEQ ID NO: 23558 - RNA, 4094 nt, Artificial Sequence
  SARS-CoV-2/Wuhan/WIV05/2019__EPI_ISL_402128 spike protein mRNA gc (1-1273)(K986P_V987P_N501Y_D614G)
aggagagucccgcagucggcguccagcggcucugcuuguucgugugugugucguugcaggccuuauucaagcuuaccauguucguguuccuggugcugcugccccuggugagcagccagugcgugaaccugaccacccggacccagcugccaccagccuacaccaacagcuucacccggggcgucuacuaccccgacaagguguuccggagcagcguccugcacagcacccaggaccuguuccugcccuucuucagcaacgugaccugguuccacgccauccacgugagcggcaccaacggcaccaagcgguucgacaaccccgugcugcccuucaacgacggcguguacuucgccagcaccgagaagagcaacaucauccggggcuggaucuucggcaccacccuggacagcaagacccagagccugcugaucgugaauaacgccaccaacguggugaucaaggugugcgaguuccaguucugcaacgaccccuuccugggcguguacuaccacaagaacaacaagagcuggauggagagcgaguuccggguguacagcagcgccaacaacugcaccuucgaguacgugagccagcccuuccugauggaccuggagggcaagcagggcaacuucaagaaccugcgggaguucguguucaagaacaucgacggcuacuucaagaucuacagcaagcacaccccaaucaaccuggugcgggaucugccccagggcuucucagcccuggagccccugguggaccugcccaucggcaucaacaucacccgguuccagacccugcuggcccugcaccggagcuaccugaccccaggcgacagcagcagcggguggacagcaggcgcggcugcuuacuacgugggcuaccugcagccccggaccuuccugcugaaguacaacgagaacggcaccaucaccgacgccguggacugcgcccuggacccucugagcgagaccaagugcacccugaagagcuucaccguggagaagggcaucuaccagaccagcaacuuccgggugcagcccaccgagagcaucgugcgguuccccaacaucaccaaccugugccccuucggcgagguguucaacgccacccgguucgccagcguguacgccuggaaccggaagcggaucagcaacugcguggccgacuacagcgugcuguacaacagcgccagcuucagcaccuucaagugcuacggcgugagccccaccaagcugaacgaccugugcuucaccaacguguacgccgacagcuucgugauccguggcgacgaggugcggcagaucgcacccggccagacaggcaagaucgccgacuacaacuacaagcugcccgacgacuucaccggcugcgugaucgccuggaacagcaacaaccucgacagcaaggugggcggcaacuacaacuaccuguaccggcuguuccggaagagcaaccugaagcccuucgagcgggacaucagcaccgagaucuaccaagccggcuccaccccuugcaacggcguggagggcuucaacugcuacuucccucugcagagcuacggcuuccagcccaccuacggcgugggcuaccagcccuaccgggugguggugcugagcuucgagcugcugcacgccccagccaccguguguggccccaagaagagcaccaaccuggugaagaacaagugcgugaacuucaacuucaacggccuuaccggcaccggcgugcugaccgagagcaacaagaaauuccugcccuuucagcaguucggccgggacaucgccgacaccaccgacgcugugcgggauccccagacccuggagauccuggacaucaccccuugcagcuucggcggcgugagcgugaucaccccaggcaccaacaccagcaaccagguggccgugcuguaccagggcgugaacugcaccgaggugcccguggccauccacgccgaccagcugacacccaccuggcgggucuacagcaccggcagcaacguguuccagacccgggccgguugccugaucggcgccgagcacgugaacaacagcuacgagugcgacauccccaucggcgccggcaucugugccagcuaccagacccagaccaauucaccccggagggcaaggagcguggccagccagagcaucaucgccuacaccaugagccugggcgccgagaacagcguggccuacagcaacaacagcaucgccauccccaccaacuucaccaucagcgugaccaccgagauucugcccgugagcaugaccaagaccagcguggacugcaccauguacaucugcggcgacagcaccgagugcagcaaccugcugcugcaguacggcagcuucugcacccagcugaaccgggcccugaccggcaucgccguggagcaggacaagaacacccaggagguguucgcccaggugaagcagaucuacaagaccccucccaucaaggacuucggcggcuucaacuucagccagauccugcccgaccccagcaagcccagcaagcggagcuucaucgaggaccugcuguucaacaaggugacccuagccgacgccggcuucaucaagcaguacggcgacugccucggcgacauagccgcccgggaccugaucugcgcccagaaguucaacggccugaccgugcugccuccccugcugaccgacgagaugaucgcccaguacaccagcgcccuguuagccggaaccaucaccagcggcuggacuuucggcgcuggagccgcucugcagauccccuucgccaugcagauggccuaccgguucaacggcaucggcgugacccagaacgugcuguacgagaaccagaagcugaucgccaaccaguucaacagcgccaucggcaagauccaggacagccugagcagcaccgcuagcgcccugggcaagcugcaggacguggugaaccagaacgcccaggcccugaacacccuggugaagcagcugagcagcaacuucggcgccaucagcagcgugcugaacgacauccugagccggcuggacccucccgaggccgaggugcagaucgaccggcugaucacuggccggcugcagagccugcagaccuacgugacccagcagcugauccgggccgccgagauucgggccagcgccaaccuggccgccaccaagaugagcgagugcgugcugggccagagcaagcggguggacuucugcggcaagggcuaccaccugaugagcuuuccccagagcgcaccccacggagugguguuccugcacgugaccuacgugcccgcccaggagaagaacuucaccaccgccccagccaucugccacgacggcaaggcccacuuuccccgggagggcguguucgugagcaacggcacccacugguucgugacccagcggaacuucuacgagccccagaucaucaccaccgacaacaccuucgugagcggcaacugcgacguggugaucggcaucgugaacaacaccguguacgauccccugcagcccgagcuggacagcuucaaggaggagcuggacaaguacuucaagaaucacaccagccccgacguggaccugggcgacaucagcggcaucaacgccagcguggugaacauccagaaggagaucgaucggcugaacgagguggccaagaaccugaacgagagccugaucgaccugcaggagcugggcaaguacgagcaguacaucaaguggcccugguacaucuggcugggcuucaucgccggccugaucgccaucgugauggugaccaucaugcugugcugcaugaccagcugcugcagcugccugaagggcuguugcagcugcggcagcugcugcaaguucgacgaggacgacagcgagcccgugcugaagggcgugaagcugcacuacaccugaggacuagucccuguucccagagcccacuuuuuuuucuuuuuuugaaauaaaauagccugucuuucagaucucaaaggcucuuuucagagccaccaaaaaaaaaaaaaaaaaaaaaaaaaaaaaaaaaaaaaaaaaaaaaaaaaaaaaaaaaaaaaaaaaaaaaaaaaaaaaaaaaaaaaaaaaaaaaaaaaaaaa

SEQ ID NO: 23559 - RNA, 4088 nt, Artificial Sequence
  SARS-CoV-2/Wuhan/WIV05/2019__EPI_ISL_402128 spike protein mRNA gc (1-1273)(K986P_V987P_H69del_V70del_D614G)
aggagagucccgcagucggcguccagcggcucugcuuguucgugugugugucguugcaggccuuauucaagcuuaccauguucguguuccuggugcugcugccccuggugagcagccagugcgugaaccugaccacccggacccagcugccaccagccuacaccaacagcuucacccggggcgucuacuaccccgacaagguguuccggagcagcguccugcacagcacccaggaccuguuccugcccuucuucagcaacgugaccugguuccacgccaucagcggcaccaacggcaccaagcgguucgacaaccccgugcugcccuucaacgacggcguguacuucgccagcaccgagaagagcaacaucauccggggcuggaucuucggcaccacccuggacagcaagacccagagccugcugaucgugaauaacgccaccaacguggugaucaaggugugcgaguuccaguucugcaacgaccccuuccugggcguguacuaccacaagaacaacaagagcuggauggagagcgaguuccggguguacagcagcgccaacaacugcaccuucgaguacgugagccagcccuuccugauggaccuggagggcaagcagggcaacuucaagaaccugcgggaguucguguucaagaacaucgacggcuacuucaagaucuacagcaagcacaccccaaucaaccuggugcgggaucugccccagggcuucucagcccuggagccccugguggaccugcccaucggcaucaacaucacccgguuccagacccugcuggcccugcaccggagcuaccugaccccaggcgacagcagcagcggguggacagcaggcgcggcugcuuacuacgugggcuaccugcagccccggaccuuccugcugaaguacaacgagaacggcaccaucaccgacgccguggacugcgcccuggacccucugagcgagaccaagugcacccugaagagcuucaccguggagaagggcaucuaccagaccagcaacuuccgggugcagcccaccgagagcaucgugcgguuccccaacaucaccaaccugugccccuucggcgagguguucaacgccacccgguucgccagcguguacgccuggaaccggaagcggaucagcaacugcguggccgacuacagcgugcuguacaacagcgccagcuucagcaccuucaagugcuacggcgugagccccaccaagcugaacgaccugugcuucaccaacguguacgccgacagcuucgugauccguggcgacgaggugcggcagaucgcacccggccagacaggcaagaucgccgacuacaacuacaagcugcccgacgacuucaccggcugcgugaucgccuggaacagcaacaaccucgacagcaaggugggcggcaacuacaacuaccuguaccggcuguuccggaagagcaaccugaagcccuucgagcgggacaucagcaccgagaucuaccaagccggcuccaccccuugcaacggcguggagggcuucaacugcuacuucccucugcagagcuacggcuuccagcccaccaacggcgugggcuaccagcccuaccgggugguggugcugagcuucgagcugcugcacgccccagccaccguguguggccccaagaagagcaccaaccuggugaagaacaagugcgugaacuucaacuucaacggccuuaccggcaccggcgugcugaccgagagcaacaagaaauuccugcccuuucagcaguucggccgggacaucgccgacaccaccgacgcugugcgggauccccagacccuggagauccuggacaucaccccuugcagcuucggcggcgugagcgugaucaccccaggcaccaacaccagcaaccagguggccgugcuguaccagggcgugaacugcaccgaggugcccguggccauccacgccgaccagcugacacccaccuggcgggucuacagcaccggcagcaacguguuccagacccgggccgguugccugaucggcgccgagcacgugaacaacagcuacgagugcgacauccccaucggcgccggcaucugugccagcuaccagacccagaccaauucaccccggagggcaaggagcguggccagccagagcaucaucgccuacaccaugagccugggcgccgagaacagcguggccuacagcaacaacagcaucgccauccccaccaacuucaccaucagcgugaccaccgagauucugcccgugagcaugaccaagaccagcguggacugcaccauguacaucugcggcgacagcaccgagugcagcaaccugcugcugcaguacggcagcuucugcacccagcugaaccgggcccugaccggcaucgccguggagcaggacaagaacacccaggagguguucgcccaggugaagcagaucuacaagaccccucccaucaaggacuucggcggcuucaacuucagccagauccugcccgaccccagcaagcccagcaagcggagcuucaucgaggaccugcuguucaacaaggugacccuagccgacgccggcuucaucaagcaguacggcgacugccucggcgacauagccgcccgggaccugaucugcgcccagaaguucaacggccugaccgugcugccuccccugcugaccgacgagaugaucgcccaguacaccagcgcccuguuagccggaaccaucaccagcggcuggacuuucggcgcuggagccgcucugcagauccccuucgccaugcagauggccuaccgguucaacggcaucggcgugacccagaacgugcuguacgagaaccagaagcugaucgccaaccaguucaacagcgccaucggcaagauccaggacagccugagcagcaccgcuagcgcccugggcaagcugcaggacguggugaaccagaacgcccaggcccugaacacccuggugaagcagcugagcagcaacuucggcgccaucagcagcgugcugaacgacauccugagccggcuggacccucccgaggccgaggugcagaucgaccggcugaucacuggccggcugcagagccugcagaccuacgugacccagcagcugauccgggccgccgagauucgggccagcgccaaccuggccgccaccaagaugagcgagugcgugcugggccagagcaagcggguggacuucugcggcaagggcuaccaccugaugagcuuuccccagagcgcaccccacggagugguguuccugcacgugaccuacgugcccgcccaggagaagaacuucaccaccgccccagccaucugccacgacggcaaggcccacuuuccccgggagggcguguucgugagcaacggcacccacugguucgugacccagcggaacuucuacgagccccagaucaucaccaccgacaacaccuucgugagcggcaacugcgacguggugaucggcaucgugaacaacaccguguacgauccccugcagcccgagcuggacagcuucaaggaggagcuggacaaguacuucaagaaucacaccagccccgacguggaccugggcgacaucagcggcaucaacgccagcguggugaacauccagaaggagaucgaucggcugaacgagguggccaagaaccugaacgagagccugaucgaccugcaggagcugggcaaguacgagcaguacaucaaguggcccugguacaucuggcugggcuucaucgccggccugaucgccaucgugauggugaccaucaugcugugcugcaugaccagcugcugcagcugccugaagggcuguugcagcugcggcagcugcugcaaguucgacgaggacgacagcgagcccgugcugaagggcgugaagcugcacuacaccugaggacuagucccuguucccagagcccacuuuuuuuucuuuuuuugaaauaaaauagccugucuuucagaucucaaaggcucuuuucagagccaccaaaaaaaaaaaaaaaaaaaaaaaaaaaaaaaaaaaaaaaaaaaaaaaaaaaaaaaaaaaaaaaaaaaaaaaaaaaaaaaaaaaaaaaaaaaaaaaaaaaaa

SEQ ID NO: 23560 - RNA, 4094 nt, Artificial Sequence
  SARS-CoV-2/Wuhan/WIV05/2019__EPI_ISL_402128 spike protein mRNA gc (1-1273)(K986P_V987P_Y453F_D614G)
aggagagucccgcagucggcguccagcggcucugcuuguucgugugugugucguugcaggccuuauucaagcuuaccauguucguguuccuggugcugcugccccuggugagcagccagugcgugaaccugaccacccggacccagcugccaccagccuacaccaacagcuucacccggggcgucuacuaccccgacaagguguuccggagcagcguccugcacagcacccaggaccuguuccugcccuucuucagcaacgugaccugguuccacgccauccacgugagcggcaccaacggcaccaagcgguucgacaaccccgugcugcccuucaacgacggcguguacuucgccagcaccgagaagagcaacaucauccggggcuggaucuucggcaccacccuggacagcaagacccagagccugcugaucgugaauaacgccaccaacguggugaucaaggugugcgaguuccaguucugcaacgaccccuuccugggcguguacuaccacaagaacaacaagagcuggauggagagcgaguuccggguguacagcagcgccaacaacugcaccuucgaguacgugagccagcccuuccugauggaccuggagggcaagcagggcaacuucaagaaccugcgggaguucguguucaagaacaucgacggcuacuucaagaucuacagcaagcacaccccaaucaaccuggugcgggaucugccccagggcuucucagcccuggagccccugguggaccugcccaucggcaucaacaucacccgguuccagacccugcuggcccugcaccggagcuaccugaccccaggcgacagcagcagcggguggacagcaggcgcggcugcuuacuacgugggcuaccugcagccccggaccuuccugcugaaguacaacgagaacggcaccaucaccgacgccguggacugcgcccuggacccucugagcgagaccaagugcacccugaagagcuucaccguggagaagggcaucuaccagaccagcaacuuccgggugcagcccaccgagagcaucgugcgguuccccaacaucaccaaccugugccccuucggcgagguguucaacgccacccgguucgccagcguguacgccuggaaccggaagcggaucagcaacugcguggccgacuacagcgugcuguacaacagcgccagcuucagcaccuucaagugcuacggcgugagccccaccaagcugaacgaccugugcuucaccaacguguacgccgacagcuucgugauccguggcgacgaggugcggcagaucgcacccggccagacaggcaagaucgccgacuacaacuacaagcugcccgacgacuucaccggcugcgugaucgccuggaacagcaacaaccucgacagcaaggugggcggcaacuacaacuaccuguuccggcuguuccggaagagcaaccugaagcccuucgagcgggacaucagcaccgagaucuaccaagccggcuccaccccuugcaacggcguggagggcuucaacugcuacuucccucugcagagcuacggcuuccagcccaccaacggcgugggcuaccagcccuaccgggugguggugcugagcuucgagcugcugcacgccccagccaccguguguggccccaagaagagcaccaaccuggugaagaacaagugcgugaacuucaacuucaacggccuuaccggcaccggcgugcugaccgagagcaacaagaaauuccugcccuuucagcaguucggccgggacaucgccgacaccaccgacgcugugcgggauccccagacccuggagauccuggacaucaccccuugcagcuucggcggcgugagcgugaucaccccaggcaccaacaccagcaaccagguggccgugcuguaccagggcgugaacugcaccgaggugcccguggccauccacgccgaccagcugacacccaccuggcgggucuacagcaccggcagcaacguguuccagacccgggccgguugccugaucggcgccgagcacgugaacaacagcuacgagugcgacauccccaucggcgccggcaucugugccagcuaccagacccagaccaauucaccccggagggcaaggagcguggccagccagagcaucaucgccuacaccaugagccugggcgccgagaacagcguggccuacagcaacaacagcaucgccauccccaccaacuucaccaucagcgugaccaccgagauucugcccgugagcaugaccaagaccagcguggacugcaccauguacaucugcggcgacagcaccgagugcagcaaccugcugcugcaguacggcagcuucugcacccagcugaaccgggcccugaccggcaucgccguggagcaggacaagaacacccaggagguguucgcccaggugaagcagaucuacaagaccccucccaucaaggacuucggcggcuucaacuucagccagauccugcccgaccccagcaagcccagcaagcggagcuucaucgaggaccugcuguucaacaaggugacccuagccgacgccggcuucaucaagcaguacggcgacugccucggcgacauagccgcccgggaccugaucugcgcccagaaguucaacggccugaccgugcugccuccccugcugaccgacgagaugaucgcccaguacaccagcgcccuguuagccggaaccaucaccagcggcuggacuuucggcgcuggagccgcucugcagauccccuucgccaugcagauggccuaccgguucaacggcaucggcgugacccagaacgugcuguacgagaaccagaagcugaucgccaaccaguucaacagcgccaucggcaagauccaggacagccugagcagcaccgcuagcgcccugggcaagcugcaggacguggugaaccagaacgcccaggcccugaacacccuggugaagcagcugagcagcaacuucggcgccaucagcagcgugcugaacgacauccugagccggcuggacccucccgaggccgaggugcagaucgaccggcugaucacuggccggcugcagagccugcagaccuacgugacccagcagcugauccgggccgccgagauucgggccagcgccaaccuggccgccaccaagaugagcgagugcgugcugggccagagcaagcggguggacuucugcggcaagggcuaccaccugaugagcuuuccccagagcgcaccccacggagugguguuccugcacgugaccuacgugcccgcccaggagaagaacuucaccaccgccccagccaucugccacgacggcaaggcccacuuuccccgggagggcguguucgugagcaacggcacccacugguucgugacccagcggaacuucuacgagccccagaucaucaccaccgacaacaccuucgugagcggcaacugcgacguggugaucggcaucgugaacaacaccguguacgauccccugcagcccgagcuggacagcuucaaggaggagcuggacaaguacuucaagaaucacaccagccccgacguggaccugggcgacaucagcggcaucaacgccagcguggugaacauccagaaggagaucgaucggcugaacgagguggccaagaaccugaacgagagccugaucgaccugcaggagcugggcaaguacgagcaguacaucaaguggcccugguacaucuggcugggcuucaucgccggccugaucgccaucgugauggugaccaucaugcugugcugcaugaccagcugcugcagcugccugaagggcuguugcagcugcggcagcugcugcaaguucgacgaggacgacagcgagcccgugcugaagggcgugaagcugcacuacaccugaggacuagucccuguucccagagcccacuuuuuuuucuuuuuuugaaauaaaauagccugucuuucagaucucaaaggcucuuuucagagccaccaaaaaaaaaaaaaaaaaaaaaaaaaaaaaaaaaaaaaaaaaaaaaaaaaaaaaaaaaaaaaaaaaaaaaaaaaaaaaaaaaaaaaaaaaaaaaaaaaaaaa

SEQ ID NO: 23561 - RNA, 4094 nt, Artificial Sequence
  SARS-CoV-2/Wuhan/WIV05/2019__EPI_ISL_402128 spike protein mRNA gc (1-1273)(K986P_V987P_D614G_I692V)
aggagagucccgcagucggcguccagcggcucugcuuguucgugugugugucguugcaggccuuauucaagcuuaccauguucguguuccuggugcugcugccccuggugagcagccagugcgugaaccugaccacccggacccagcugccaccagccuacaccaacagcuucacccggggcgucuacuaccccgacaagguguuccggagcagcguccugcacagcacccaggaccuguuccugcccuucuucagcaacgugaccugguuccacgccauccacgugagcggcaccaacggcaccaagcgguucgacaaccccgugcugcccuucaacgacggcguguacuucgccagcaccgagaagagcaacaucauccggggcuggaucuucggcaccacccuggacagcaagacccagagccugcugaucgugaauaacgccaccaacguggugaucaaggugugcgaguuccaguucugcaacgaccccuuccugggcguguacuaccacaagaacaacaagagcuggauggagagcgaguuccggguguacagcagcgccaacaacugcaccuucgaguacgugagccagcccuuccugauggaccuggagggcaagcagggcaacuucaagaaccugcgggaguucguguucaagaacaucgacggcuacuucaagaucuacagcaagcacaccccaaucaaccuggugcgggaucugccccagggcuucucagcccuggagccccugguggaccugcccaucggcaucaacaucacccgguuccagacccugcuggcccugcaccggagcuaccugaccccaggcgacagcagcagcggguggacagcaggcgcggcugcuuacuacgugggcuaccugcagccccggaccuuccugcugaaguacaacgagaacggcaccaucaccgacgccguggacugcgcccuggacccucugagcgagaccaagugcacccugaagagcuucaccguggagaagggcaucuaccagaccagcaacuuccgggugcagcccaccgagagcaucgugcgguuccccaacaucaccaaccugugccccuucggcgagguguucaacgccacccgguucgccagcguguacgccuggaaccggaagcggaucagcaacugcguggccgacuacagcgugcuguacaacagcgccagcuucagcaccuucaagugcuacggcgugagccccaccaagcugaacgaccugugcuucaccaacguguacgccgacagcuucgugauccguggcgacgaggugcggcagaucgcacccggccagacaggcaagaucgccgacuacaacuacaagcugcccgacgacuucaccggcugcgugaucgccuggaacagcaacaaccucgacagcaaggugggcggcaacuacaacuaccuguaccggcuguuccggaagagcaaccugaagcccuucgagcgggacaucagcaccgagaucuaccaagccggcuccaccccuugcaacggcguggagggcuucaacugcuacuucccucugcagagcuacggcuuccagcccaccaacggcgugggcuaccagcccuaccgggugguggugcugagcuucgagcugcugcacgccccagccaccguguguggccccaagaagagcaccaaccuggugaagaacaagugcgugaacuucaacuucaacggccuuaccggcaccggcgugcugaccgagagcaacaagaaauuccugcccuuucagcaguucggccgggacaucgccgacaccaccgacgcugugcgggauccccagacccuggagauccuggacaucaccccuugcagcuucggcggcgugagcgugaucaccccaggcaccaacaccagcaaccagguggccgugcuguaccagggcgugaacugcaccgaggugcccguggccauccacgccgaccagcugacacccaccuggcgggucuacagcaccggcagcaacguguuccagacccgggccgguugccugaucggcgccgagcacgugaacaacagcuacgagugcgacauccccaucggcgccggcaucugugccagcuaccagacccagaccaauucaccccggagggcaaggagcguggccagccagagcgugaucgccuacaccaugagccugggcgccgagaacagcguggccuacagcaacaacagcaucgccauccccaccaacuucaccaucagcgugaccaccgagauucugcccgugagcaugaccaagaccagcguggacugcaccauguacaucugcggcgacagcaccgagugcagcaaccugcugcugcaguacggcagcuucugcacccagcugaaccgggcccugaccggcaucgccguggagcaggacaagaacacccaggagguguucgcccaggugaagcagaucuacaagaccccucccaucaaggacuucggcggcuucaacuucagccagauccugcccgaccccagcaagcccagcaagcggagcuucaucgaggaccugcuguucaacaaggugacccuagccgacgccggcuucaucaagcaguacggcgacugccucggcgacauagccgcccgggaccugaucugcgcccagaaguucaacggccugaccgugcugccuccccugcugaccgacgagaugaucgcccaguacaccagcgcccuguuagccggaaccaucaccagcggcuggacuuucggcgcuggagccgcucugcagauccccuucgccaugcagauggccuaccgguucaacggcaucggcgugacccagaacgugcuguacgagaaccagaagcugaucgccaaccaguucaacagcgccaucggcaagauccaggacagccugagcagcaccgcuagcgcccugggcaagcugcaggacguggugaaccagaacgcccaggcccugaacacccuggugaagcagcugagcagcaacuucggcgccaucagcagcgugcugaacgacauccugagccggcuggacccucccgaggccgaggugcagaucgaccggcugaucacuggccggcugcagagccugcagaccuacgugacccagcagcugauccgggccgccgagauucgggccagcgccaaccuggccgccaccaagaugagcgagugcgugcugggccagagcaagcggguggacuucugcggcaagggcuaccaccugaugagcuuuccccagagcgcaccccacggagugguguuccugcacgugaccuacgugcccgcccaggagaagaacuucaccaccgccccagccaucugccacgacggcaaggcccacuuuccccgggagggcguguucgugagcaacggcacccacugguucgugacccagcggaacuucuacgagccccagaucaucaccaccgacaacaccuucgugagcggcaacugcgacguggugaucggcaucgugaacaacaccguguacgauccccugcagcccgagcuggacagcuucaaggaggagcuggacaaguacuucaagaaucacaccagccccgacguggaccugggcgacaucagcggcaucaacgccagcguggugaacauccagaaggagaucgaucggcugaacgagguggccaagaaccugaacgagagccugaucgaccugcaggagcugggcaaguacgagcaguacaucaaguggcccugguacaucuggcugggcuucaucgccggccugaucgccaucgugauggugaccaucaugcugugcugcaugaccagcugcugcagcugccugaagggcuguugcagcugcggcagcugcugcaaguucgacgaggacgacagcgagcccgugcugaagggcgugaagcugcacuacaccugaggacuagucccuguucccagagcccacuuuuuuuucuuuuuuugaaauaaaauagccugucuuucagaucucaaaggcucuuuucagagccaccaaaaaaaaaaaaaaaaaaaaaaaaaaaaaaaaaaaaaaaaaaaaaaaaaaaaaaaaaaaaaaaaaaaaaaaaaaaaaaaaaaaaaaaaaaaaaaaaaaaaa

SEQ ID NO: 23562 - RNA, 4094 nt, Artificial Sequence
  SARS-CoV-2/Wuhan/WIV05/2019__EPI_ISL_402128 spike protein mRNA gc (1-1273)(K986P_V987P_D614G_M1229I)
aggagagucccgcagucggcguccagcggcucugcuuguucgugugugugucguugcaggccuuauucaagcuuaccauguucguguuccuggugcugcugccccuggugagcagccagugcgugaaccugaccacccggacccagcugccaccagccuacaccaacagcuucacccggggcgucuacuaccccgacaagguguuccggagcagcguccugcacagcacccaggaccuguuccugcccuucuucagcaacgugaccugguuccacgccauccacgugagcggcaccaacggcaccaagcgguucgacaaccccgugcugcccuucaacgacggcguguacuucgccagcaccgagaagagcaacaucauccggggcuggaucuucggcaccacccuggacagcaagacccagagccugcugaucgugaauaacgccaccaacguggugaucaaggugugcgaguuccaguucugcaacgaccccuuccugggcguguacuaccacaagaacaacaagagcuggauggagagcgaguuccggguguacagcagcgccaacaacugcaccuucgaguacgugagccagcccuuccugauggaccuggagggcaagcagggcaacuucaagaaccugcgggaguucguguucaagaacaucgacggcuacuucaagaucuacagcaagcacaccccaaucaaccuggugcgggaucugccccagggcuucucagcccuggagccccugguggaccugcccaucggcaucaacaucacccgguuccagacccugcuggcccugcaccggagcuaccugaccccaggcgacagcagcagcggguggacagcaggcgcggcugcuuacuacgugggcuaccugcagccccggaccuuccugcugaaguacaacgagaacggcaccaucaccgacgccguggacugcgcccuggacccucugagcgagaccaagugcacccugaagagcuucaccguggagaagggcaucuaccagaccagcaacuuccgggugcagcccaccgagagcaucgugcgguuccccaacaucaccaaccugugccccuucggcgagguguucaacgccacccgguucgccagcguguacgccuggaaccggaagcggaucagcaacugcguggccgacuacagcgugcuguacaacagcgccagcuucagcaccuucaagugcuacggcgugagccccaccaagcugaacgaccugugcuucaccaacguguacgccgacagcuucgugauccguggcgacgaggugcggcagaucgcacccggccagacaggcaagaucgccgacuacaacuacaagcugcccgacgacuucaccggcugcgugaucgccuggaacagcaacaaccucgacagcaaggugggcggcaacuacaacuaccuguaccggcuguuccggaagagcaaccugaagcccuucgagcgggacaucagcaccgagaucuaccaagccggcuccaccccuugcaacggcguggagggcuucaacugcuacuucccucugcagagcuacggcuuccagcccaccaacggcgugggcuaccagcccuaccgggugguggugcugagcuucgagcugcugcacgccccagccaccguguguggccccaagaagagcaccaaccuggugaagaacaagugcgugaacuucaacuucaacggccuuaccggcaccggcgugcugaccgagagcaacaagaaauuccugcccuuucagcaguucggccgggacaucgccgacaccaccgacgcugugcgggauccccagacccuggagauccuggacaucaccccuugcagcuucggcggcgugagcgugaucaccccaggcaccaacaccagcaaccagguggccgugcuguaccagggcgugaacugcaccgaggugcccguggccauccacgccgaccagcugacacccaccuggcgggucuacagcaccggcagcaacguguuccagacccgggccgguugccugaucggcgccgagcacgugaacaacagcuacgagugcgacauccccaucggcgccggcaucugugccagcuaccagacccagaccaauucaccccggagggcaaggagcguggccagccagagcaucaucgccuacaccaugagccugggcgccgagaacagcguggccuacagcaacaacagcaucgccauccccaccaacuucaccaucagcgugaccaccgagauucugcccgugagcaugaccaagaccagcguggacugcaccauguacaucugcggcgacagcaccgagugcagcaaccugcugcugcaguacggcagcuucugcacccagcugaaccgggcccugaccggcaucgccguggagcaggacaagaacacccaggagguguucgcccaggugaagcagaucuacaagaccccucccaucaaggacuucggcggcuucaacuucagccagauccugcccgaccccagcaagcccagcaagcggagcuucaucgaggaccugcuguucaacaaggugacccuagccgacgccggcuucaucaagcaguacggcgacugccucggcgacauagccgcccgggaccugaucugcgcccagaaguucaacggccugaccgugcugccuccccugcugaccgacgagaugaucgcccaguacaccagcgcccuguuagccggaaccaucaccagcggcuggacuuucggcgcuggagccgcucugcagauccccuucgccaugcagauggccuaccgguucaacggcaucggcgugacccagaacgugcuguacgagaaccagaagcugaucgccaaccaguucaacagcgccaucggcaagauccaggacagccugagcagcaccgcuagcgcccugggcaagcugcaggacguggugaaccagaacgcccaggcccugaacacccuggugaagcagcugagcagcaacuucggcgccaucagcagcgugcugaacgacauccugagccggcuggacccucccgaggccgaggugcagaucgaccggcugaucacuggccggcugcagagccugcagaccuacgugacccagcagcugauccgggccgccgagauucgggccagcgccaaccuggccgccaccaagaugagcgagugcgugcugggccagagcaagcggguggacuucugcggcaagggcuaccaccugaugagcuuuccccagagcgcaccccacggagugguguuccugcacgugaccuacgugcccgcccaggagaagaacuucaccaccgccccagccaucugccacgacggcaaggcccacuuuccccgggagggcguguucgugagcaacggcacccacugguucgugacccagcggaacuucuacgagccccagaucaucaccaccgacaacaccuucgugagcggcaacugcgacguggugaucggcaucgugaacaacaccguguacgauccccugcagcccgagcuggacagcuucaaggaggagcuggacaaguacuucaagaaucacaccagccccgacguggaccugggcgacaucagcggcaucaacgccagcguggugaacauccagaaggagaucgaucggcugaacgagguggccaagaaccugaacgagagccugaucgaccugcaggagcugggcaaguacgagcaguacaucaaguggcccugguacaucuggcugggcuucaucgccggccugaucgccaucgugaucgugaccaucaugcugugcugcaugaccagcugcugcagcugccugaagggcuguugcagcugcggcagcugcugcaaguucgacgaggacgacagcgagcccgugcugaagggcgugaagcugcacuacaccugaggacuagucccuguucccagagcccacuuuuuuuucuuuuuuugaaauaaaauagccugucuuucagaucucaaaggcucuuuucagagccaccaaaaaaaaaaaaaaaaaaaaaaaaaaaaaaaaaaaaaaaaaaaaaaaaaaaaaaaaaaaaaaaaaaaaaaaaaaaaaaaaaaaaaaaaaaaaaaaaaaaaa

SEQ ID NO: 23563 - RNA, 4088 nt, Artificial Sequence
  SARS-CoV-2/Wuhan/WIV05/2019__EPI_ISL_402128 spike protein mRNA gc (1-1273)(K986P_V987P_H69del_V70del_A222V_Y453F_S477N_D614G_I692V)
aggagagucccgcagucggcguccagcggcucugcuuguucgugugugugucguugcaggccuuauucaagcuuaccauguucguguuccuggugcugcugccccuggugagcagccagugcgugaaccugaccacccggacccagcugccaccagccuacaccaacagcuucacccggggcgucuacuaccccgacaagguguuccggagcagcguccugcacagcacccaggaccuguuccugcccuucuucagcaacgugaccugguuccacgccaucagcggcaccaacggcaccaagcgguucgacaaccccgugcugcccuucaacgacggcguguacuucgccagcaccgagaagagcaacaucauccggggcuggaucuucggcaccacccuggacagcaagacccagagccugcugaucgugaauaacgccaccaacguggugaucaaggugugcgaguuccaguucugcaacgaccccuuccugggcguguacuaccacaagaacaacaagagcuggauggagagcgaguuccggguguacagcagcgccaacaacugcaccuucgaguacgugagccagcccuuccugauggaccuggagggcaagcagggcaacuucaagaaccugcgggaguucguguucaagaacaucgacggcuacuucaagaucuacagcaagcacaccccaaucaaccuggugcgggaucugccccagggcuucucagugcuggagccccugguggaccugcccaucggcaucaacaucacccgguuccagacccugcuggcccugcaccggagcuaccugaccccaggcgacagcagcagcggguggacagcaggcgcggcugcuuacuacgugggcuaccugcagccccggaccuuccugcugaaguacaacgagaacggcaccaucaccgacgccguggacugcgcccuggacccucugagcgagaccaagugcacccugaagagcuucaccguggagaagggcaucuaccagaccagcaacuuccgggugcagcccaccgagagcaucgugcgguuccccaacaucaccaaccugugccccuucggcgagguguucaacgccacccgguucgccagcguguacgccuggaaccggaagcggaucagcaacugcguggccgacuacagcgugcuguacaacagcgccagcuucagcaccuucaagugcuacggcgugagccccaccaagcugaacgaccugugcuucaccaacguguacgccgacagcuucgugauccguggcgacgaggugcggcagaucgcacccggccagacaggcaagaucgccgacuacaacuacaagcugcccgacgacuucaccggcugcgugaucgccuggaacagcaacaaccucgacagcaaggugggcggcaacuacaacuaccuguuccggcuguuccggaagagcaaccugaagcccuucgagcgggacaucagcaccgagaucuaccaagccggcaacaccccuugcaacggcguggagggcuucaacugcuacuucccucugcagagcuacggcuuccagcccaccaacggcgugggcuaccagcccuaccgggugguggugcugagcuucgagcugcugcacgccccagccaccguguguggccccaagaagagcaccaaccuggugaagaacaagugcgugaacuucaacuucaacggccuuaccggcaccggcgugcugaccgagagcaacaagaaauuccugcccuuucagcaguucggccgggacaucgccgacaccaccgacgcugugcgggauccccagacccuggagauccuggacaucaccccuugcagcuucggcggcgugagcgugaucaccccaggcaccaacaccagcaaccagguggccgugcuguaccagggcgugaacugcaccgaggugcccguggccauccacgccgaccagcugacacccaccuggcgggucuacagcaccggcagcaacguguuccagacccgggccgguugccugaucggcgccgagcacgugaacaacagcuacgagugcgacauccccaucggcgccggcaucugugccagcuaccagacccagaccaauucaccccggagggcaaggagcguggccagccagagcgugaucgccuacaccaugagccugggcgccgagaacagcguggccuacagcaacaacagcaucgccauccccaccaacuucaccaucagcgugaccaccgagauucugcccgugagcaugaccaagaccagcguggacugcaccauguacaucugcggcgacagcaccgagugcagcaaccugcugcugcaguacggcagcuucugcacccagcugaaccgggcccugaccggcaucgccguggagcaggacaagaacacccaggagguguucgcccaggugaagcagaucuacaagaccccucccaucaaggacuucggcggcuucaacuucagccagauccugcccgaccccagcaagcccagcaagcggagcuucaucgaggaccugcuguucaacaaggugacccuagccgacgccggcuucaucaagcaguacggcgacugccucggcgacauagccgcccgggaccugaucugcgcccagaaguucaacggccugaccgugcugccuccccugcugaccgacgagaugaucgcccaguacaccagcgcccuguuagccggaaccaucaccagcggcuggacuuucggcgcuggagccgcucugcagauccccuucgccaugcagauggccuaccgguucaacggcaucggcgugacccagaacgugcuguacgagaaccagaagcugaucgccaaccaguucaacagcgccaucggcaagauccaggacagccugagcagcaccgcuagcgcccugggcaagcugcaggacguggugaaccagaacgcccaggcccugaacacccuggugaagcagcugagcagcaacuucggcgccaucagcagcgugcugaacgacauccugagccggcuggacccucccgaggccgaggugcagaucgaccggcugaucacuggccggcugcagagccugcagaccuacgugacccagcagcugauccgggccgccgagauucgggccagcgccaaccuggccgccaccaagaugagcgagugcgugcugggccagagcaagcggguggacuucugcggcaagggcuaccaccugaugagcuuuccccagagcgcaccccacggagugguguuccugcacgugaccuacgugcccgcccaggagaagaacuucaccaccgccccagccaucugccacgacggcaaggcccacuuuccccgggagggcguguucgugagcaacggcacccacugguucgugacccagcggaacuucuacgagccccagaucaucaccaccgacaacaccuucgugagcggcaacugcgacguggugaucggcaucgugaacaacaccguguacgauccccugcagcccgagcuggacagcuucaaggaggagcuggacaaguacuucaagaaucacaccagccccgacguggaccugggcgacaucagcggcaucaacgccagcguggugaacauccagaaggagaucgaucggcugaacgagguggccaagaaccugaacgagagccugaucgaccugcaggagcugggcaaguacgagcaguacaucaaguggcccugguacaucuggcugggcuucaucgccggccugaucgccaucgugauggugaccaucaugcugugcugcaugaccagcugcugcagcugccugaagggcuguugcagcugcggcagcugcugcaaguucgacgaggacgacagcgagcccgugcugaagggcgugaagcugcacuacaccugaggacuagucccuguucccagagcccacuuuuuuuucuuuuuuugaaauaaaauagccugucuuucagaucucaaaggcucuuuucagagccaccaaaaaaaaaaaaaaaaaaaaaaaaaaaaaaaaaaaaaaaaaaaaaaaaaaaaaaaaaaaaaaaaaaaaaaaaaaaaaaaaaaaaaaaaaaaaaaaaaaaaa

SEQ ID NO: 23564 - RNA, 4088 nt, Artificial Sequence
  SARS-CoV-2/Wuhan/WIV05/2019__EPI_ISL_402128 spike protein mRNA gc (1-1273)(K986P_V987P_H69del_V70del_Y453F_D614G_I692V_M1229I)
aggagagucccgcagucggcguccagcggcucugcuuguucgugugugugucguugcaggccuuauucaagcuuaccauguucguguuccuggugcugcugccccuggugagcagccagugcgugaaccugaccacccggacccagcugccaccagccuacaccaacagcuucacccggggcgucuacuaccccgacaagguguuccggagcagcguccugcacagcacccaggaccuguuccugcccuucuucagcaacgugaccugguuccacgccaucagcggcaccaacggcaccaagcgguucgacaaccccgugcugcccuucaacgacggcguguacuucgccagcaccgagaagagcaacaucauccggggcuggaucuucggcaccacccuggacagcaagacccagagccugcugaucgugaauaacgccaccaacguggugaucaaggugugcgaguuccaguucugcaacgaccccuuccugggcguguacuaccacaagaacaacaagagcuggauggagagcgaguuccggguguacagcagcgccaacaacugcaccuucgaguacgugagccagcccuuccugauggaccuggagggcaagcagggcaacuucaagaaccugcgggaguucguguucaagaacaucgacggcuacuucaagaucuacagcaagcacaccccaaucaaccuggugcgggaucugccccagggcuucucagcccuggagccccugguggaccugcccaucggcaucaacaucacccgguuccagacccugcuggcccugcaccggagcuaccugaccccaggcgacagcagcagcggguggacagcaggcgcggcugcuuacuacgugggcuaccugcagccccggaccuuccugcugaaguacaacgagaacggcaccaucaccgacgccguggacugcgcccuggacccucugagcgagaccaagugcacccugaagagcuucaccguggagaagggcaucuaccagaccagcaacuuccgggugcagcccaccgagagcaucgugcgguuccccaacaucaccaaccugugccccuucggcgagguguucaacgccacccgguucgccagcguguacgccuggaaccggaagcggaucagcaacugcguggccgacuacagcgugcuguacaacagcgccagcuucagcaccuucaagugcuacggcgugagccccaccaagcugaacgaccugugcuucaccaacguguacgccgacagcuucgugauccguggcgacgaggugcggcagaucgcacccggccagacaggcaagaucgccgacuacaacuacaagcugcccgacgacuucaccggcugcgugaucgccuggaacagcaacaaccucgacagcaaggugggcggcaacuacaacuaccuguuccggcuguuccggaagagcaaccugaagcccuucgagcgggacaucagcaccgagaucuaccaagccggcuccaccccuugcaacggcguggagggcuucaacugcuacuucccucugcagagcuacggcuuccagcccaccaacggcgugggcuaccagcccuaccgggugguggugcugagcuucgagcugcugcacgccccagccaccguguguggccccaagaagagcaccaaccuggugaagaacaagugcgugaacuucaacuucaacggccuuaccggcaccggcgugcugaccgagagcaacaagaaauuccugcccuuucagcaguucggccgggacaucgccgacaccaccgacgcugugcgggauccccagacccuggagauccuggacaucaccccuugcagcuucggcggcgugagcgugaucaccccaggcaccaacaccagcaaccagguggccgugcuguaccagggcgugaacugcaccgaggugcccguggccauccacgccgaccagcugacacccaccuggcgggucuacagcaccggcagcaacguguuccagacccgggccgguugccugaucggcgccgagcacgugaacaacagcuacgagugcgacauccccaucggcgccggcaucugugccagcuaccagacccagaccaauucaccccggagggcaaggagcguggccagccagagcgugaucgccuacaccaugagccugggcgccgagaacagcguggccuacagcaacaacagcaucgccauccccaccaacuucaccaucagcgugaccaccgagauucugcccgugagcaugaccaagaccagcguggacugcaccauguacaucugcggcgacagcaccgagugcagcaaccugcugcugcaguacggcagcuucugcacccagcugaaccgggcccugaccggcaucgccguggagcaggacaagaacacccaggagguguucgcccaggugaagcagaucuacaagaccccucccaucaaggacuucggcggcuucaacuucagccagauccugcccgaccccagcaagcccagcaagcggagcuucaucgaggaccugcuguucaacaaggugacccuagccgacgccggcuucaucaagcaguacggcgacugccucggcgacauagccgcccgggaccugaucugcgcccagaaguucaacggccugaccgugcugccuccccugcugaccgacgagaugaucgcccaguacaccagcgcccuguuagccggaaccaucaccagcggcuggacuuucggcgcuggagccgcucugcagauccccuucgccaugcagauggccuaccgguucaacggcaucggcgugacccagaacgugcuguacgagaaccagaagcugaucgccaaccaguucaacagcgccaucggcaagauccaggacagccugagcagcaccgcuagcgcccugggcaagcugcaggacguggugaaccagaacgcccaggcccugaacacccuggugaagcagcugagcagcaacuucggcgccaucagcagcgugcugaacgacauccugagccggcuggacccucccgaggccgaggugcagaucgaccggcugaucacuggccggcugcagagccugcagaccuacgugacccagcagcugauccgggccgccgagauucgggccagcgccaaccuggccgccaccaagaugagcgagugcgugcugggccagagcaagcggguggacuucugcggcaagggcuaccaccugaugagcuuuccccagagcgcaccccacggagugguguuccugcacgugaccuacgugcccgcccaggagaagaacuucaccaccgccccagccaucugccacgacggcaaggcccacuuuccccgggagggcguguucgugagcaacggcacccacugguucgugacccagcggaacuucuacgagccccagaucaucaccaccgacaacaccuucgugagcggcaacugcgacguggugaucggcaucgugaacaacaccguguacgauccccugcagcccgagcuggacagcuucaaggaggagcuggacaaguacuucaagaaucacaccagccccgacguggaccugggcgacaucagcggcaucaacgccagcguggugaacauccagaaggagaucgaucggcugaacgagguggccaagaaccugaacgagagccugaucgaccugcaggagcugggcaaguacgagcaguacaucaaguggcccugguacaucuggcugggcuucaucgccggccugaucgccaucgugaucgugaccaucaugcugugcugcaugaccagcugcugcagcugccugaagggcuguugcagcugcggcagcugcugcaaguucgacgaggacgacagcgagcccgugcugaagggcgugaagcugcacuacaccugaggacuagucccuguucccagagcccacuuuuuuuucuuuuuuugaaauaaaauagccugucuuucagaucucaaaggcucuuuucagagccaccaaaaaaaaaaaaaaaaaaaaaaaaaaaaaaaaaaaaaaaaaaaaaaaaaaaaaaaaaaaaaaaaaaaaaaaaaaaaaaaaaaaaaaaaaaaaaaaaaaaaa

SEQ ID NO: 23565 - RNA, 4085 nt, Artificial Sequence
  SARS-CoV-2/Wuhan/WIV05/2019__EPI_ISL_402128 spike protein mRNA gc (1-1273)(K986P_V987P_K986P_V987P_H69del_V70del_Y144del_N501Y_A570 D_D614G_P681H_T716I_S982A_D1118H)
aggagagucccgcagucggcguccagcggcucugcuuguucgugugugugucguugcaggccuuauucaagcuuaccauguucguguuccuggugcugcugccccuggugagcagccagugcgugaaccugaccacccggacccagcugccaccagccuacaccaacagcuucacccggggcgucuacuaccccgacaagguguuccggagcagcguccugcacagcacccaggaccuguuccugcccuucuucagcaacgugaccugguuccacgccaucagcggcaccaacggcaccaagcgguucgacaaccccgugcugcccuucaacgacggcguguacuucgccagcaccgagaagagcaacaucauccggggcuggaucuucggcaccacccuggacagcaagacccagagccugcugaucgugaauaacgccaccaacguggugaucaaggugugcgaguuccaguucugcaacgaccccuuccugggcguguaccacaagaacaacaagagcuggauggagagcgaguuccggguguacagcagcgccaacaacugcaccuucgaguacgugagccagcccuuccugauggaccuggagggcaagcagggcaacuucaagaaccugcgggaguucguguucaagaacaucgacggcuacuucaagaucuacagcaagcacaccccaaucaaccuggugcgggaucugccccagggcuucucagcccuggagccccugguggaccugcccaucggcaucaacaucacccgguuccagacccugcuggcccugcaccggagcuaccugaccccaggcgacagcagcagcggguggacagcaggcgcggcugcuuacuacgugggcuaccugcagccccggaccuuccugcugaaguacaacgagaacggcaccaucaccgacgccguggacugcgcccuggacccucugagcgagaccaagugcacccugaagagcuucaccguggagaagggcaucuaccagaccagcaacuuccgggugcagcccaccgagagcaucgugcgguuccccaacaucaccaaccugugccccuucggcgagguguucaacgccacccgguucgccagcguguacgccuggaaccggaagcggaucagcaacugcguggccgacuacagcgugcuguacaacagcgccagcuucagcaccuucaagugcuacggcgugagccccaccaagcugaacgaccugugcuucaccaacguguacgccgacagcuucgugauccguggcgacgaggugcggcagaucgcacccggccagacaggcaagaucgccgacuacaacuacaagcugcccgacgacuucaccggcugcgugaucgccuggaacagcaacaaccucgacagcaaggugggcggcaacuacaacuaccuguaccggcuguuccggaagagcaaccugaagcccuucgagcgggacaucagcaccgagaucuaccaagccggcuccaccccuugcaacggcguggagggcuucaacugcuacuucccucugcagagcuacggcuuccagcccaccuacggcgugggcuaccagcccuaccgggugguggugcugagcuucgagcugcugcacgccccagccaccguguguggccccaagaagagcaccaaccuggugaagaacaagugcgugaacuucaacuucaacggccuuaccggcaccggcgugcugaccgagagcaacaagaaauuccugcccuuucagcaguucggccgggacaucgacgacaccaccgacgcugugcgggauccccagacccuggagauccuggacaucaccccuugcagcuucggcggcgugagcgugaucaccccaggcaccaacaccagcaaccagguggccgugcuguaccagggcgugaacugcaccgaggugcccguggccauccacgccgaccagcugacacccaccuggcgggucuacagcaccggcagcaacguguuccagacccgggccgguugccugaucggcgccgagcacgugaacaacagcuacgagugcgacauccccaucggcgccggcaucugugccagcuaccagacccagaccaauucacaccggagggcaaggagcguggccagccagagcaucaucgccuacaccaugagccugggcgccgagaacagcguggccuacagcaacaacagcaucgccauccccaucaacuucaccaucagcgugaccaccgagauucugcccgugagcaugaccaagaccagcguggacugcaccauguacaucugcggcgacagcaccgagugcagcaaccugcugcugcaguacggcagcuucugcacccagcugaaccgggcccugaccggcaucgccguggagcaggacaagaacacccaggagguguucgcccaggugaagcagaucuacaagaccccucccaucaaggacuucggcggcuucaacuucagccagauccugcccgaccccagcaagcccagcaagcggagcuucaucgaggaccugcuguucaacaaggugacccuagccgacgccggcuucaucaagcaguacggcgacugccucggcgacauagccgcccgggaccugaucugcgcccagaaguucaacggccugaccgugcugccuccccugcugaccgacgagaugaucgcccaguacaccagcgcccuguuagccggaaccaucaccagcggcuggacuuucggcgcuggagccgcucugcagauccccuucgccaugcagauggccuaccgguucaacggcaucggcgugacccagaacgugcuguacgagaaccagaagcugaucgccaaccaguucaacagcgccaucggcaagauccaggacagccugagcagcaccgcuagcgcccugggcaagcugcaggacguggugaaccagaacgcccaggcccugaacacccuggugaagcagcugagcagcaacuucggcgccaucagcagcgugcugaacgacauccuggcccggcuggacccucccgaggccgaggugcagaucgaccggcugaucacuggccggcugcagagccugcagaccuacgugacccagcagcugauccgggccgccgagauucgggccagcgccaaccuggccgccaccaagaugagcgagugcgugcugggccagagcaagcggguggacuucugcggcaagggcuaccaccugaugagcuuuccccagagcgcaccccacggagugguguuccugcacgugaccuacgugcccgcccaggagaagaacuucaccaccgccccagccaucugccacgacggcaaggcccacuuuccccgggagggcguguucgugagcaacggcacccacugguucgugacccagcggaacuucuacgagccccagaucaucaccacccacaacaccuucgugagcggcaacugcgacguggugaucggcaucgugaacaacaccguguacgauccccugcagcccgagcuggacagcuucaaggaggagcuggacaaguacuucaagaaucacaccagccccgacguggaccugggcgacaucagcggcaucaacgccagcguggugaacauccagaaggagaucgaucggcugaacgagguggccaagaaccugaacgagagccugaucgaccugcaggagcugggcaaguacgagcaguacaucaaguggcccugguacaucuggcugggcuucaucgccggccugaucgccaucgugauggugaccaucaugcugugcugcaugaccagcugcugcagcugccugaagggcuguugcagcugcggcagcugcugcaaguucgacgaggacgacagcgagcccgugcugaagggcgugaagcugcacuacaccugaggacuagucccuguucccagagcccacuuuuuuuucuuuuuuugaaauaaaauagccugucuuucagaucucaaaggcucuuuucagagccaccaaaaaaaaaaaaaaaaaaaaaaaaaaaaaaaaaaaaaaaaaaaaaaaaaaaaaaaaaaaaaaaaaaaaaaaaaaaaaaaaaaaaaaaaaaaaaaaaaaaaa

SEQ ID NO: 23566 - RNA, 4094 nt, Artificial Sequence
  SARS-CoV-2/Wuhan/WIV05/2019__EPI_ISL_402128 spike protein mRNA gc (1-1273)(K986P_V987P_K986P_V987P_K417N_E484K_N501Y_D614G)
aggagagucccgcagucggcguccagcggcucugcuuguucgugugugugucguugcaggccuuauucaagcuuaccauguucguguuccuggugcugcugccccuggugagcagccagugcgugaaccugaccacccggacccagcugccaccagccuacaccaacagcuucacccggggcgucuacuaccccgacaagguguuccggagcagcguccugcacagcacccaggaccuguuccugcccuucuucagcaacgugaccugguuccacgccauccacgugagcggcaccaacggcaccaagcgguucgacaaccccgugcugcccuucaacgacggcguguacuucgccagcaccgagaagagcaacaucauccggggcuggaucuucggcaccacccuggacagcaagacccagagccugcugaucgugaauaacgccaccaacguggugaucaaggugugcgaguuccaguucugcaacgaccccuuccugggcguguacuaccacaagaacaacaagagcuggauggagagcgaguuccggguguacagcagcgccaacaacugcaccuucgaguacgugagccagcccuuccugauggaccuggagggcaagcagggcaacuucaagaaccugcgggaguucguguucaagaacaucgacggcuacuucaagaucuacagcaagcacaccccaaucaaccuggugcgggaucugccccagggcuucucagcccuggagccccugguggaccugcccaucggcaucaacaucacccgguuccagacccugcuggcccugcaccggagcuaccugaccccaggcgacagcagcagcggguggacagcaggcgcggcugcuuacuacgugggcuaccugcagccccggaccuuccugcugaaguacaacgagaacggcaccaucaccgacgccguggacugcgcccuggacccucugagcgagaccaagugcacccugaagagcuucaccguggagaagggcaucuaccagaccagcaacuuccgggugcagcccaccgagagcaucgugcgguuccccaacaucaccaaccugugccccuucggcgagguguucaacgccacccgguucgccagcguguacgccuggaaccggaagcggaucagcaacugcguggccgacuacagcgugcuguacaacagcgccagcuucagcaccuucaagugcuacggcgugagccccaccaagcugaacgaccugugcuucaccaacguguacgccgacagcuucgugauccguggcgacgaggugcggcagaucgcacccggccagacaggcaacaucgccgacuacaacuacaagcugcccgacgacuucaccggcugcgugaucgccuggaacagcaacaaccucgacagcaaggugggcggcaacuacaacuaccuguaccggcuguuccggaagagcaaccugaagcccuucgagcgggacaucagcaccgagaucuaccaagccggcuccaccccuugcaacggcgugaagggcuucaacugcuacuucccucugcagagcuacggcuuccagcccaccuacggcgugggcuaccagcccuaccgggugguggugcugagcuucgagcugcugcacgccccagccaccguguguggccccaagaagagcaccaaccuggugaagaacaagugcgugaacuucaacuucaacggccuuaccggcaccggcgugcugaccgagagcaacaagaaauuccugcccuuucagcaguucggccgggacaucgccgacaccaccgacgcugugcgggauccccagacccuggagauccuggacaucaccccuugcagcuucggcggcgugagcgugaucaccccaggcaccaacaccagcaaccagguggccgugcuguaccagggcgugaacugcaccgaggugcccguggccauccacgccgaccagcugacacccaccuggcgggucuacagcaccggcagcaacguguuccagacccgggccgguugccugaucggcgccgagcacgugaacaacagcuacgagugcgacauccccaucggcgccggcaucugugccagcuaccagacccagaccaauucaccccggagggcaaggagcguggccagccagagcaucaucgccuacaccaugagccugggcgccgagaacagcguggccuacagcaacaacagcaucgccauccccaccaacuucaccaucagcgugaccaccgagauucugcccgugagcaugaccaagaccagcguggacugcaccauguacaucugcggcgacagcaccgagugcagcaaccugcugcugcaguacggcagcuucugcacccagcugaaccgggcccugaccggcaucgccguggagcaggacaagaacacccaggagguguucgcccaggugaagcagaucuacaagaccccucccaucaaggacuucggcggcuucaacuucagccagauccugcccgaccccagcaagcccagcaagcggagcuucaucgaggaccugcuguucaacaaggugacccuagccgacgccggcuucaucaagcaguacggcgacugccucggcgacauagccgcccgggaccugaucugcgcccagaaguucaacggccugaccgugcugccuccccugcugaccgacgagaugaucgcccaguacaccagcgcccuguuagccggaaccaucaccagcggcuggacuuucggcgcuggagccgcucugcagauccccuucgccaugcagauggccuaccgguucaacggcaucggcgugacccagaacgugcuguacgagaaccagaagcugaucgccaaccaguucaacagcgccaucggcaagauccaggacagccugagcagcaccgcuagcgcccugggcaagcugcaggacguggugaaccagaacgcccaggcccugaacacccuggugaagcagcugagcagcaacuucggcgccaucagcagcgugcugaacgacauccugagccggcuggacccucccgaggccgaggugcagaucgaccggcugaucacuggccggcugcagagccugcagaccuacgugacccagcagcugauccgggccgccgagauucgggccagcgccaaccuggccgccaccaagaugagcgagugcgugcugggccagagcaagcggguggacuucugcggcaagggcuaccaccugaugagcuuuccccagagcgcaccccacggagugguguuccugcacgugaccuacgugcccgcccaggagaagaacuucaccaccgccccagccaucugccacgacggcaaggcccacuuuccccgggagggcguguucgugagcaacggcacccacugguucgugacccagcggaacuucuacgagccccagaucaucaccaccgacaacaccuucgugagcggcaacugcgacguggugaucggcaucgugaacaacaccguguacgauccccugcagcccgagcuggacagcuucaaggaggagcuggacaaguacuucaagaaucacaccagccccgacguggaccugggcgacaucagcggcaucaacgccagcguggugaacauccagaaggagaucgaucggcugaacgagguggccaagaaccugaacgagagccugaucgaccugcaggagcugggcaaguacgagcaguacaucaaguggcccugguacaucuggcugggcuucaucgccggccugaucgccaucgugauggugaccaucaugcugugcugcaugaccagcugcugcagcugccugaagggcuguugcagcugcggcagcugcugcaaguucgacgaggacgacagcgagcccgugcugaagggcgugaagcugcacuacaccugaggacuagucccuguucccagagcccacuuuuuuuucuuuuuuugaaauaaaauagccugucuuucagaucucaaaggcucuuuucagagccaccaaaaaaaaaaaaaaaaaaaaaaaaaaaaaaaaaaaaaaaaaaaaaaaaaaaaaaaaaaaaaaaaaaaaaaaaaaaaaaaaaaaaaaaaaaaaaaaaaaaaa

SEQ ID NO: 23567 - RNA, 4085 nt, Artificial Sequence
  SARS-CoV-2/Wuhan/WIV05/2019__EPI_ISL_402128 spike protein mRNA gc (1-1273)(K986P_V987P_K986P_V987P_L18F_D80A_D215G_L242del_A243del_ L244del_R246I_K417N_E484K_N501Y_D614G_A701V)
aggagagucccgcagucggcguccagcggcucugcuuguucgugugugugucguugcaggccuuauucaagcuuaccauguucguguuccuggugcugcugccccuggugagcagccagugcgugaacuucaccacccggacccagcugccaccagccuacaccaacagcuucacccggggcgucuacuaccccgacaagguguuccggagcagcguccugcacagcacccaggaccuguuccugcccuucuucagcaacgugaccugguuccacgccauccacgugagcggcaccaacggcaccaagcgguucgccaaccccgugcugcccuucaacgacggcguguacuucgccagcaccgagaagagcaacaucauccggggcuggaucuucggcaccacccuggacagcaagacccagagccugcugaucgugaauaacgccaccaacguggugaucaaggugugcgaguuccaguucugcaacgaccccuuccugggcguguacuaccacaagaacaacaagagcuggauggagagcgaguuccggguguacagcagcgccaacaacugcaccuucgaguacgugagccagcccuuccugauggaccuggagggcaagcagggcaacuucaagaaccugcgggaguucguguucaagaacaucgacggcuacuucaagaucuacagcaagcacaccccaaucaaccuggugcggggccugccccagggcuucucagcccuggagccccugguggaccugcccaucggcaucaacaucacccgguuccagacccugcacaucagcuaccugaccccaggcgacagcagcagcggguggacagcaggcgcggcugcuuacuacgugggcuaccugcagccccggaccuuccugcugaaguacaacgagaacggcaccaucaccgacgccguggacugcgcccuggacccucugagcgagaccaagugcacccugaagagcuucaccguggagaagggcaucuaccagaccagcaacuuccgggugcagcccaccgagagcaucgugcgguuccccaacaucaccaaccugugccccuucggcgagguguucaacgccacccgguucgccagcguguacgccuggaaccggaagcggaucagcaacugcguggccgacuacagcgugcuguacaacagcgccagcuucagcaccuucaagugcuacggcgugagccccaccaagcugaacgaccugugcuucaccaacguguacgccgacagcuucgugauccguggcgacgaggugcggcagaucgcacccggccagacaggcaacaucgccgacuacaacuacaagcugcccgacgacuucaccggcugcgugaucgccuggaacagcaacaaccucgacagcaaggugggcggcaacuacaacuaccuguaccggcuguuccggaagagcaaccugaagcccuucgagcgggacaucagcaccgagaucuaccaagccggcuccaccccuugcaacggcgugaagggcuucaacugcuacuucccucugcagagcuacggcuuccagcccaccuacggcgugggcuaccagcccuaccgggugguggugcugagcuucgagcugcugcacgccccagccaccguguguggccccaagaagagcaccaaccuggugaagaacaagugcgugaacuucaacuucaacggccuuaccggcaccggcgugcugaccgagagcaacaagaaauuccugcccuuucagcaguucggccgggacaucgccgacaccaccgacgcugugcgggauccccagacccuggagauccuggacaucaccccuugcagcuucggcggcgugagcgugaucaccccaggcaccaacaccagcaaccagguggccgugcuguaccagggcgugaacugcaccgaggugcccguggccauccacgccgaccagcugacacccaccuggcgggucuacagcaccggcagcaacguguuccagacccgggccgguugccugaucggcgccgagcacgugaacaacagcuacgagugcgacauccccaucggcgccggcaucugugccagcuaccagacccagaccaauucaccccggagggcaaggagcguggccagccagagcaucaucgccuacaccaugagccugggcguggagaacagcguggccuacagcaacaacagcaucgccauccccaccaacuucaccaucagcgugaccaccgagauucugcccgugagcaugaccaagaccagcguggacugcaccauguacaucugcggcgacagcaccgagugcagcaaccugcugcugcaguacggcagcuucugcacccagcugaaccgggcccugaccggcaucgccguggagcaggacaagaacacccaggagguguucgcccaggugaagcagaucuacaagaccccucccaucaaggacuucggcggcuucaacuucagccagauccugcccgaccccagcaagcccagcaagcggagcuucaucgaggaccugcuguucaacaaggugacccuagccgacgccggcuucaucaagcaguacggcgacugccucggcgacauagccgcccgggaccugaucugcgcccagaaguucaacggccugaccgugcugccuccccugcugaccgacgagaugaucgcccaguacaccagcgcccuguuagccggaaccaucaccagcggcuggacuuucggcgcuggagccgcucugcagauccccuucgccaugcagauggccuaccgguucaacggcaucggcgugacccagaacgugcuguacgagaaccagaagcugaucgccaaccaguucaacagcgccaucggcaagauccaggacagccugagcagcaccgcuagcgcccugggcaagcugcaggacguggugaaccagaacgcccaggcccugaacacccuggugaagcagcugagcagcaacuucggcgccaucagcagcgugcugaacgacauccugagccggcuggacccucccgaggccgaggugcagaucgaccggcugaucacuggccggcugcagagccugcagaccuacgugacccagcagcugauccgggccgccgagauucgggccagcgccaaccuggccgccaccaagaugagcgagugcgugcugggccagagcaagcggguggacuucugcggcaagggcuaccaccugaugagcuuuccccagagcgcaccccacggagugguguuccugcacgugaccuacgugcccgcccaggagaagaacuucaccaccgccccagccaucugccacgacggcaaggcccacuuuccccgggagggcguguucgugagcaacggcacccacugguucgugacccagcggaacuucuacgagccccagaucaucaccaccgacaacaccuucgugagcggcaacugcgacguggugaucggcaucgugaacaacaccguguacgauccccugcagcccgagcuggacagcuucaaggaggagcuggacaaguacuucaagaaucacaccagccccgacguggaccugggcgacaucagcggcaucaacgccagcguggugaacauccagaaggagaucgaucggcugaacgagguggccaagaaccugaacgagagccugaucgaccugcaggagcugggcaaguacgagcaguacaucaaguggcccugguacaucuggcugggcuucaucgccggccugaucgccaucgugauggugaccaucaugcugugcugcaugaccagcugcugcagcugccugaagggcuguugcagcugcggcagcugcugcaaguucgacgaggacgacagcgagcccgugcugaagggcgugaagcugcacuacaccugaggacuagucccuguucccagagcccacuuuuuuuucuuuuuuugaaauaaaauagccugucuuucagaucucaaaggcucuuuucagagccaccaaaaaaaaaaaaaaaaaaaaaaaaaaaaaaaaaaaaaaaaaaaaaaaaaaaaaaaaaaaaaaaaaaaaaaaaaaaaaaaaaaaaaaaaaaaaaaaaaaaaa

SEQ ID NO: 23568 - RNA, 4094 nt, Artificial Sequence
  SARS-CoV-2/Wuhan/WIV05/2019__EPI_ISL_402128 spike protein mRNA gc (1-1273)(K986P_V987P_K986P_V987P_E484K_D614G)
aggagagucccgcagucggcguccagcggcucugcuuguucgugugugugucguugcaggccuuauucaagcuuaccauguucguguuccuggugcugcugccccuggugagcagccagugcgugaaccugaccacccggacccagcugccaccagccuacaccaacagcuucacccggggcgucuacuaccccgacaagguguuccggagcagcguccugcacagcacccaggaccuguuccugcccuucuucagcaacgugaccugguuccacgccauccacgugagcggcaccaacggcaccaagcgguucgacaaccccgugcugcccuucaacgacggcguguacuucgccagcaccgagaagagcaacaucauccggggcuggaucuucggcaccacccuggacagcaagacccagagccugcugaucgugaauaacgccaccaacguggugaucaaggugugcgaguuccaguucugcaacgaccccuuccugggcguguacuaccacaagaacaacaagagcuggauggagagcgaguuccggguguacagcagcgccaacaacugcaccuucgaguacgugagccagcccuuccugauggaccuggagggcaagcagggcaacuucaagaaccugcgggaguucguguucaagaacaucgacggcuacuucaagaucuacagcaagcacaccccaaucaaccuggugcgggaucugccccagggcuucucagcccuggagccccugguggaccugcccaucggcaucaacaucacccgguuccagacccugcuggcccugcaccggagcuaccugaccccaggcgacagcagcagcggguggacagcaggcgcggcugcuuacuacgugggcuaccugcagccccggaccuuccugcugaaguacaacgagaacggcaccaucaccgacgccguggacugcgcccuggacccucugagcgagaccaagugcacccugaagagcuucaccguggagaagggcaucuaccagaccagcaacuuccgggugcagcccaccgagagcaucgugcgguuccccaacaucaccaaccugugccccuucggcgagguguucaacgccacccgguucgccagcguguacgccuggaaccggaagcggaucagcaacugcguggccgacuacagcgugcuguacaacagcgccagcuucagcaccuucaagugcuacggcgugagccccaccaagcugaacgaccugugcuucaccaacguguacgccgacagcuucgugauccguggcgacgaggugcggcagaucgcacccggccagacaggcaagaucgccgacuacaacuacaagcugcccgacgacuucaccggcugcgugaucgccuggaacagcaacaaccucgacagcaaggugggcggcaacuacaacuaccuguaccggcuguuccggaagagcaaccugaagcccuucgagcgggacaucagcaccgagaucuaccaagccggcuccaccccuugcaacggcgugaagggcuucaacugcuacuucccucugcagagcuacggcuuccagcccaccaacggcgugggcuaccagcccuaccgggugguggugcugagcuucgagcugcugcacgccccagccaccguguguggccccaagaagagcaccaaccuggugaagaacaagugcgugaacuucaacuucaacggccuuaccggcaccggcgugcugaccgagagcaacaagaaauuccugcccuuucagcaguucggccgggacaucgccgacaccaccgacgcugugcgggauccccagacccuggagauccuggacaucaccccuugcagcuucggcggcgugagcgugaucaccccaggcaccaacaccagcaaccagguggccgugcuguaccagggcgugaacugcaccgaggugcccguggccauccacgccgaccagcugacacccaccuggcgggucuacagcaccggcagcaacguguuccagacccgggccgguugccugaucggcgccgagcacgugaacaacagcuacgagugcgacauccccaucggcgccggcaucugugccagcuaccagacccagaccaauucaccccggagggcaaggagcguggccagccagagcaucaucgccuacaccaugagccugggcgccgagaacagcguggccuacagcaacaacagcaucgccauccccaccaacuucaccaucagcgugaccaccgagauucugcccgugagcaugaccaagaccagcguggacugcaccauguacaucugcggcgacagcaccgagugcagcaaccugcugcugcaguacggcagcuucugcacccagcugaaccgggcccugaccggcaucgccguggagcaggacaagaacacccaggagguguucgcccaggugaagcagaucuacaagaccccucccaucaaggacuucggcggcuucaacuucagccagauccugcccgaccccagcaagcccagcaagcggagcuucaucgaggaccugcuguucaacaaggugacccuagccgacgccggcuucaucaagcaguacggcgacugccucggcgacauagccgcccgggaccugaucugcgcccagaaguucaacggccugaccgugcugccuccccugcugaccgacgagaugaucgcccaguacaccagcgcccuguuagccggaaccaucaccagcggcuggacuuucggcgcuggagccgcucugcagauccccuucgccaugcagauggccuaccgguucaacggcaucggcgugacccagaacgugcuguacgagaaccagaagcugaucgccaaccaguucaacagcgccaucggcaagauccaggacagccugagcagcaccgcuagcgcccugggcaagcugcaggacguggugaaccagaacgcccaggcccugaacacccuggugaagcagcugagcagcaacuucggcgccaucagcagcgugcugaacgacauccugagccggcuggacccucccgaggccgaggugcagaucgaccggcugaucacuggccggcugcagagccugcagaccuacgugacccagcagcugauccgggccgccgagauucgggccagcgccaaccuggccgccaccaagaugagcgagugcgugcugggccagagcaagcggguggacuucugcggcaagggcuaccaccugaugagcuuuccccagagcgcaccccacggagugguguuccugcacgugaccuacgugcccgcccaggagaagaacuucaccaccgccccagccaucugccacgacggcaaggcccacuuuccccgggagggcguguucgugagcaacggcacccacugguucgugacccagcggaacuucuacgagccccagaucaucaccaccgacaacaccuucgugagcggcaacugcgacguggugaucggcaucgugaacaacaccguguacgauccccugcagcccgagcuggacagcuucaaggaggagcuggacaaguacuucaagaaucacaccagccccgacguggaccugggcgacaucagcggcaucaacgccagcguggugaacauccagaaggagaucgaucggcugaacgagguggccaagaaccugaacgagagccugaucgaccugcaggagcugggcaaguacgagcaguacaucaaguggcccugguacaucuggcugggcuucaucgccggccugaucgccaucgugauggugaccaucaugcugugcugcaugaccagcugcugcagcugccugaagggcuguugcagcugcggcagcugcugcaaguucgacgaggacgacagcgagcccgugcugaagggcgugaagcugcacuacaccugaggacuagucccuguucccagagcccacuuuuuuuucuuuuuuugaaauaaaauagccugucuuucagaucucaaaggcucuuuucagagccaccaaaaaaaaaaaaaaaaaaaaaaaaaaaaaaaaaaaaaaaaaaaaaaaaaaaaaaaaaaaaaaaaaaaaaaaaaaaaaaaaaaaaaaaaaaaaaaaaaaaaa

SEQ ID NO: 23569 - RNA, 4094 nt, Artificial Sequence
  SARS-CoV-2/Wuhan/WIV05/2019__EPI_ISL_402128 spike protein mRNA gc (1-1273)(K986P_V987P_K986P_V987P_L18F_T20N_P26S_D138Y_R190S_K417T _E484K_N501Y_D614G_H655Y_T1027I)
aggagagucccgcagucggcguccagcggcucugcuuguucgugugugugucguugcaggccuuauucaagcuuaccauguucguguuccuggugcugcugccccuggugagcagccagugcgugaacuucaccaaccggacccagcugccaagcgccuacaccaacagcuucacccggggcgucuacuaccccgacaagguguuccggagcagcguccugcacagcacccaggaccuguuccugcccuucuucagcaacgugaccugguuccacgccauccacgugagcggcaccaacggcaccaagcgguucgacaaccccgugcugcccuucaacgacggcguguacuucgccagcaccgagaagagcaacaucauccggggcuggaucuucggcaccacccuggacagcaagacccagagccugcugaucgugaauaacgccaccaacguggugaucaaggugugcgaguuccaguucugcaacuaccccuuccugggcguguacuaccacaagaacaacaagagcuggauggagagcgaguuccggguguacagcagcgccaacaacugcaccuucgaguacgugagccagcccuuccugauggaccuggagggcaagcagggcaacuucaagaaccugagcgaguucguguucaagaacaucgacggcuacuucaagaucuacagcaagcacaccccaaucaaccuggugcgggaucugccccagggcuucucagcccuggagccccugguggaccugcccaucggcaucaacaucacccgguuccagacccugcuggcccugcaccggagcuaccugaccccaggcgacagcagcagcggguggacagcaggcgcggcugcuuacuacgugggcuaccugcagccccggaccuuccugcugaaguacaacgagaacggcaccaucaccgacgccguggacugcgcccuggacccucugagcgagaccaagugcacccugaagagcuucaccguggagaagggcaucuaccagaccagcaacuuccgggugcagcccaccgagagcaucgugcgguuccccaacaucaccaaccugugccccuucggcgagguguucaacgccacccgguucgccagcguguacgccuggaaccggaagcggaucagcaacugcguggccgacuacagcgugcuguacaacagcgccagcuucagcaccuucaagugcuacggcgugagccccaccaagcugaacgaccugugcuucaccaacguguacgccgacagcuucgugauccguggcgacgaggugcggcagaucgcacccggccagacaggcaccaucgccgacuacaacuacaagcugcccgacgacuucaccggcugcgugaucgccuggaacagcaacaaccucgacagcaaggugggcggcaacuacaacuaccuguaccggcuguuccggaagagcaaccugaagcccuucgagcgggacaucagcaccgagaucuaccaagccggcuccaccccuugcaacggcgugaagggcuucaacugcuacuucccucugcagagcuacggcuuccagcccaccuacggcgugggcuaccagcccuaccgggugguggugcugagcuucgagcugcugcacgccccagccaccguguguggccccaagaagagcaccaaccuggugaagaacaagugcgugaacuucaacuucaacggccuuaccggcaccggcgugcugaccgagagcaacaagaaauuccugcccuuucagcaguucggccgggacaucgccgacaccaccgacgcugugcgggauccccagacccuggagauccuggacaucaccccuugcagcuucggcggcgugagcgugaucaccccaggcaccaacaccagcaaccagguggccgugcuguaccagggcgugaacugcaccgaggugcccguggccauccacgccgaccagcugacacccaccuggcgggucuacagcaccggcagcaacguguuccagacccgggccgguugccugaucggcgccgaguacgugaacaacagcuacgagugcgacauccccaucggcgccggcaucugugccagcuaccagacccagaccaauucaccccggagggcaaggagcguggccagccagagcaucaucgccuacaccaugagccugggcgccgagaacagcguggccuacagcaacaacagcaucgccauccccaccaacuucaccaucagcgugaccaccgagauucugcccgugagcaugaccaagaccagcguggacugcaccauguacaucugcggcgacagcaccgagugcagcaaccugcugcugcaguacggcagcuucugcacccagcugaaccgggcccugaccggcaucgccguggagcaggacaagaacacccaggagguguucgcccaggugaagcagaucuacaagaccccucccaucaaggacuucggcggcuucaacuucagccagauccugcccgaccccagcaagcccagcaagcggagcuucaucgaggaccugcuguucaacaaggugacccuagccgacgccggcuucaucaagcaguacggcgacugccucggcgacauagccgcccgggaccugaucugcgcccagaaguucaacggccugaccgugcugccuccccugcugaccgacgagaugaucgcccaguacaccagcgcccuguuagccggaaccaucaccagcggcuggacuuucggcgcuggagccgcucugcagauccccuucgccaugcagauggccuaccgguucaacggcaucggcgugacccagaacgugcuguacgagaaccagaagcugaucgccaaccaguucaacagcgccaucggcaagauccaggacagccugagcagcaccgcuagcgcccugggcaagcugcaggacguggugaaccagaacgcccaggcccugaacacccuggugaagcagcugagcagcaacuucggcgccaucagcagcgugcugaacgacauccugagccggcuggacccucccgaggccgaggugcagaucgaccggcugaucacuggccggcugcagagccugcagaccuacgugacccagcagcugauccgggccgccgagauucgggccagcgccaaccuggccgccaucaagaugagcgagugcgugcugggccagagcaagcggguggacuucugcggcaagggcuaccaccugaugagcuuuccccagagcgcaccccacggagugguguuccugcacgugaccuacgugcccgcccaggagaagaacuucaccaccgccccagccaucugccacgacggcaaggcccacuuuccccgggagggcguguucgugagcaacggcacccacugguucgugacccagcggaacuucuacgagccccagaucaucaccaccgacaacaccuucgugagcggcaacugcgacguggugaucggcaucgugaacaacaccguguacgauccccugcagcccgagcuggacagcuucaaggaggagcuggacaaguacuucaagaaucacaccagccccgacguggaccugggcgacaucagcggcaucaacgccagcguggugaacauccagaaggagaucgaucggcugaacgagguggccaagaaccugaacgagagccugaucgaccugcaggagcugggcaaguacgagcaguacaucaaguggcccugguacaucuggcugggcuucaucgccggccugaucgccaucgugauggugaccaucaugcugugcugcaugaccagcugcugcagcugccugaagggcuguugcagcugcggcagcugcugcaaguucgacgaggacgacagcgagcccgugcugaagggcgugaagcugcacuacaccugaggacuagucccuguucccagagcccacuuuuuuuucuuuuuuugaaauaaaauagccugucuuucagaucucaaaggcucuuuucagagccaccaaaaaaaaaaaaaaaaaaaaaaaaaaaaaaaaaaaaaaaaaaaaaaaaaaaaaaaaaaaaaaaaaaaaaaaaaaaaaaaaaaaaaaaaaaaaaaaaaaaaa

SEQ ID NO: 23570 - RNA, 4094 nt, Artificial Sequence
  SARS-CoV-2/Wuhan/WIV05/2019__EPI_ISL_402128 spike protein mRNA gc (1-1273)(K986P_V987P_K986P_V987P_S13I_W152C_L452R_D614G)
aggagagucccgcagucggcguccagcggcucugcuuguucgugugugugucguugcaggccuuauucaagcuuaccauguucguguuccuggugcugcugccccuggugagcauccagugcgugaaccugaccacccggacccagcugccaccagccuacaccaacagcuucacccggggcgucuacuaccccgacaagguguuccggagcagcguccugcacagcacccaggaccuguuccugcccuucuucagcaacgugaccugguuccacgccauccacgugagcggcaccaacggcaccaagcgguucgacaaccccgugcugcccuucaacgacggcguguacuucgccagcaccgagaagagcaacaucauccggggcuggaucuucggcaccacccuggacagcaagacccagagccugcugaucgugaauaacgccaccaacguggugaucaaggugugcgaguuccaguucugcaacgaccccuuccugggcguguacuaccacaagaacaacaagagcugcauggagagcgaguuccggguguacagcagcgccaacaacugcaccuucgaguacgugagccagcccuuccugauggaccuggagggcaagcagggcaacuucaagaaccugcgggaguucguguucaagaacaucgacggcuacuucaagaucuacagcaagcacaccccaaucaaccuggugcgggaucugccccagggcuucucagcccuggagccccugguggaccugcccaucggcaucaacaucacccgguuccagacccugcuggcccugcaccggagcuaccugaccccaggcgacagcagcagcggguggacagcaggcgcggcugcuuacuacgugggcuaccugcagccccggaccuuccugcugaaguacaacgagaacggcaccaucaccgacgccguggacugcgcccuggacccucugagcgagaccaagugcacccugaagagcuucaccguggagaagggcaucuaccagaccagcaacuuccgggugcagcccaccgagagcaucgugcgguuccccaacaucaccaaccugugccccuucggcgagguguucaacgccacccgguucgccagcguguacgccuggaaccggaagcggaucagcaacugcguggccgacuacagcgugcuguacaacagcgccagcuucagcaccuucaagugcuacggcgugagccccaccaagcugaacgaccugugcuucaccaacguguacgccgacagcuucgugauccguggcgacgaggugcggcagaucgcacccggccagacaggcaagaucgccgacuacaacuacaagcugcccgacgacuucaccggcugcgugaucgccuggaacagcaacaaccucgacagcaaggugggcggcaacuacaacuaccgcuaccggcuguuccggaagagcaaccugaagcccuucgagcgggacaucagcaccgagaucuaccaagccggcuccaccccuugcaacggcguggagggcuucaacugcuacuucccucugcagagcuacggcuuccagcccaccaacggcgugggcuaccagcccuaccgggugguggugcugagcuucgagcugcugcacgccccagccaccguguguggccccaagaagagcaccaaccuggugaagaacaagugcgugaacuucaacuucaacggccuuaccggcaccggcgugcugaccgagagcaacaagaaauuccugcccuuucagcaguucggccgggacaucgccgacaccaccgacgcugugcgggauccccagacccuggagauccuggacaucaccccuugcagcuucggcggcgugagcgugaucaccccaggcaccaacaccagcaaccagguggccgugcuguaccagggcgugaacugcaccgaggugcccguggccauccacgccgaccagcugacacccaccuggcgggucuacagcaccggcagcaacguguuccagacccgggccgguugccugaucggcgccgagcacgugaacaacagcuacgagugcgacauccccaucggcgccggcaucugugccagcuaccagacccagaccaauucaccccggagggcaaggagcguggccagccagagcaucaucgccuacaccaugagccugggcgccgagaacagcguggccuacagcaacaacagcaucgccauccccaccaacuucaccaucagcgugaccaccgagauucugcccgugagcaugaccaagaccagcguggacugcaccauguacaucugcggcgacagcaccgagugcagcaaccugcugcugcaguacggcagcuucugcacccagcugaaccgggcccugaccggcaucgccguggagcaggacaagaacacccaggagguguucgcccaggugaagcagaucuacaagaccccucccaucaaggacuucggcggcuucaacuucagccagauccugcccgaccccagcaagcccagcaagcggagcuucaucgaggaccugcuguucaacaaggugacccuagccgacgccggcuucaucaagcaguacggcgacugccucggcgacauagccgcccgggaccugaucugcgcccagaaguucaacggccugaccgugcugccuccccugcugaccgacgagaugaucgcccaguacaccagcgcccuguuagccggaaccaucaccagcggcuggacuuucggcgcuggagccgcucugcagauccccuucgccaugcagauggccuaccgguucaacggcaucggcgugacccagaacgugcuguacgagaaccagaagcugaucgccaaccaguucaacagcgccaucggcaagauccaggacagccugagcagcaccgcuagcgcccugggcaagcugcaggacguggugaaccagaacgcccaggcccugaacacccuggugaagcagcugagcagcaacuucggcgccaucagcagcgugcugaacgacauccugagccggcuggacccucccgaggccgaggugcagaucgaccggcugaucacuggccggcugcagagccugcagaccuacgugacccagcagcugauccgggccgccgagauucgggccagcgccaaccuggccgccaccaagaugagcgagugcgugcugggccagagcaagcggguggacuucugcggcaagggcuaccaccugaugagcuuuccccagagcgcaccccacggagugguguuccugcacgugaccuacgugcccgcccaggagaagaacuucaccaccgccccagccaucugccacgacggcaaggcccacuuuccccgggagggcguguucgugagcaacggcacccacugguucgugacccagcggaacuucuacgagccccagaucaucaccaccgacaacaccuucgugagcggcaacugcgacguggugaucggcaucgugaacaacaccguguacgauccccugcagcccgagcuggacagcuucaaggaggagcuggacaaguacuucaagaaucacaccagccccgacguggaccugggcgacaucagcggcaucaacgccagcguggugaacauccagaaggagaucgaucggcugaacgagguggccaagaaccugaacgagagccugaucgaccugcaggagcugggcaaguacgagcaguacaucaaguggcccugguacaucuggcugggcuucaucgccggccugaucgccaucgugauggugaccaucaugcugugcugcaugaccagcugcugcagcugccugaagggcuguugcagcugcggcagcugcugcaaguucgacgaggacgacagcgagcccgugcugaagggcgugaagcugcacuacaccugaggacuagucccuguucccagagcccacuuuuuuuucuuuuuuugaaauaaaauagccugucuuucagaucucaaaggcucuuuucagagccaccaaaaaaaaaaaaaaaaaaaaaaaaaaaaaaaaaaaaaaaaaaaaaaaaaaaaaaaaaaaaaaaaaaaaaaaaaaaaaaaaaaaaaaaaaaaaaaaaaaaaa

SEQ ID NO: 23571 - RNA, 4094 nt, Artificial Sequence
  SARS-CoV-2/Wuhan/WIV05/2019__EPI_ISL_402128 spike protein mRNA gc (1-1273)(K986P_V987P)
aggagagucccgcagucggcguccagcggcucugcuuguucgugugugugucguugcaggccuuauucaagcuuaccauguucguguuccuggugcugcugccccuggugagcagccagugcgugaaccugaccacccggacccagcugcccccugccuacaccaacagcuucacccggggcguguacuaccccgacaagguguuccggagcagcgugcugcacagcacccaggaccuguuccugcccuucuucagcaacgugaccugguuccacgccauccacgugagcggcaccaacggcaccaagcgguucgacaacccagugcugcccuucaacgacggcguguacuucgccagcaccgagaagucaaacaucauccggggcuggaucuucggcaccacccuggacagcaagacacagagccugcugaucgugaacaacgccaccaacguggugaucaaggugugcgaguuucaguucugcaacgaccccuuccugggcguguacuaccacaagaacaacaagagcuggauggagagcgaguuccgggucuacagcagcgcuaacaauugcaccuucgaguacgugagccagcccuuccugauggaccucgagggcaagcagggcaacuucaagaaccugcgggaguucguguucaagaacaucgauggcuacuucaagaucuacagcaagcacacccccaucaaccuggugcgggaccugccccagggauucagcgcccuggagccucugguggaccugcccaucggcaucaacaucaccagguuccagacccugcuggcccugcaccggagcuaccugacccccggcgacagcagcagcggcuggaccgccggcgccgccgcauacuacgugggcuaccugcagccacggaccuuccugcugaaguacaacgagaacggcaccaucaccgacgccguggacugcgcccuggacccccugagcgagaccaagugcacccuaaagagcuucaccguggagaagggcaucuaccagaccagcaacuuccgggugcagcccacugagagcaucgugcgguuccccaacauuaccaaccugugucccuucggcgagguguucaacgccacccgguucgccagcguguacgccuggaaccggaagcggaucagcaacugcguggccgacuacagcgugcuguacaacagcgccagcuucagcaccuucaagugcuacggcgugagcccuaccaagcugaacgaccugugcuucaccaacguguacgcugacagcuucgugauccggggcgacgaggugcggcagaucgcccccggccagaccggcaagaucgccgacuacaacuacaagcugcccgacgacuucaccggcugcgugaucgccuggaacagcaacaaccuggacagcaaggugggcggcaacuacaacuaccuguaccggcuguuccguaagagcaaccugaagccauucgagcgggacaucagcaccgagaucuaccaggccggcagcacccccugcaacgguguggagggcuuuaacugcuacuucccccugcagagcuacggcuuccagcccaccaacggcgugggcuaccagcccuaccgggugguggugcugagcuucgagcugcugcacgcccccgccaccgugugcggcccuaaaaagagcaccaaccuggugaagaacaagugcgugaacuucaauuucaacggccugaccggcaccggcgugcugaccgagagcaacaagaaguuccugcccuuccagcaguucggccgggauaucgccgacaccaccgacgcagugcgggacccccagacccuggagauccuggacaucaccccaugcagcuucggcggcgugagcgucaucacccccggcacaaacaccagcaaccagguggccgugcuguaccaggacgugaacugcaccgaggugcccguggccauccacgccgaccagcugacccccaccuggcggguguacagcaccggaagcaacguguuccagacccgggccggcugccugaucggcgccgagcacgugaacaacuccuacgagugcgacauccccaucggcgcuggcaucugcgccagcuaccagacccagaccaacagcccccggcgggcccggagcguggccagccagagcaucaucgccuacaccaugagcuuaggcgccgagaacagcguggccuacagcaacaacagcaucgcgaucccuaccaacuucaccaucagcgugaccaccgagauacugcccgugagcaugaccaagaccagcguggacuguaccauguacaucugcggcgacagcaccgagugcagcaaccugcugcugcaguacggcagcuucugcacccagcugaaccgggcccugaccggcaucgccguggagcaggacaagaacacccaagagguguucgcccaggugaagcagaucuacaagacucccccaaucaaggacuucggcggcuucaacuucagccagauccugcccgaccccagcaagcccagcaagcggagcuucaucgaggaccugcuguucaacaaggugacccuggccgacgccggcuucaucaagcaguacggcgauugccugggcgacaucgccgcucgggaccugaucugcgcccagaaguucaacgggcugaccgugcugcccccucugcugaccgacgagaugaucgcccaguacaccagcgcccugcuugccggcaccaucaccagcggcuggaccuucggcgccggcgcagcccugcagauccccuucgccaugcagauggccuaccgguucaacggcaucggcgugacccagaacgugcuguacgagaaccagaagcugaucgccaaccaguucaacagcgccaucggcaagauccaggacagccugagcagcaccgccagcgcccugggcaagcugcaggacguggugaaccagaacgcucaggcccugaacacccuggugaagcagcugagcagcaacuucggcgccaucagcucagugcugaaugacauccugagcaggcuggaucccccagaggccgaggugcagaucgaccggcugaucaccggccggcugcagagccugcagaccuacgugacccagcagcugauccgggccgccgagauccgggccagcgccaaccuggcagccaccaagaugagcgagugcgugcugggccagagcaagcggguggacuuuugcggcaagggcuaccaccugaugagcuucccccagagcgcuccccacggcgugguguuccuccacgugacauacguccccgcccaggagaagaacuucaccaccgcccccgccauuugccacgacggcaaggcccacuucccccgggagggcguguucgugagcaacggaacccacugguucgugacccagcggaacuucuacgagccucagaucaucaccaccgacaacaccuucgugagcggcaacugcgacguggugaucggcaucgugaacaacaccguguacgacccccugcagcccgagcuggacagcuucaaggaggagcuggacaaguacuucaagaaccacaccagcccagacguggaccugggcgacaucagcggcaucaacgccagcguggugaacauccagaaggagaucgaccggcugaacgagguggccaagaaccugaacgagagccugaucgaccugcaggagcugggcaaguacgagcaguacaucaaguggcccugguacaucuggcugggcuucaucgccggccugaucgccaucgugauggugaccaucaugcugugcugcaugaccagcugcuguagcugccugaagggcugcugcagcugcggcagcugcugcaaguucgacgaggacgacagcgagcccgugcugaagggcgugaagcugcacuacaccugaggacuagucccuguucccagagcccacuuuuuuuucuuuuuuugaaauaaaauagccugucuuucagaucucaaaggcucuuuucagagccaccaaaaaaaaaaaaaaaaaaaaaaaaaaaaaaaaaaaaaaaaaaaaaaaaaaaaaaaaaaaaaaaaaaaaaaaaaaaaaaaaaaaaaaaaaaaaaaaaaaaaa

SEQ ID NO: 23572 - RNA, 4094 nt, Artificial Sequence
  SARS-CoV-2/Wuhan/WIV05/2019__EPI_ISL_402128 spike protein mRNA gc (1-1273)(K986P_V987P_ D614G)
aggagagucccgcagucggcguccagcggcucugcuuguucgugugugugucguugcaggccuuauucaagcuuaccauguucguguuccuggugcugcugccccuggugagcagccagugcgugaaccugaccacccggacccagcugcccccugccuacaccaacagcuucacccggggcguguacuaccccgacaagguguuccggagcagcgugcugcacagcacccaggaccuguuccugcccuucuucagcaacgugaccugguuccacgccauccacgugagcggcaccaacggcaccaagcgguucgacaacccagugcugcccuucaacgacggcguguacuucgccagcaccgagaagucaaacaucauccggggcuggaucuucggcaccacccuggacagcaagacacagagccugcugaucgugaacaacgccaccaacguggugaucaaggugugcgaguuucaguucugcaacgaccccuuccugggcguguacuaccacaagaacaacaagagcuggauggagagcgaguuccgggucuacagcagcgcuaacaauugcaccuucgaguacgugagccagcccuuccugauggaccucgagggcaagcagggcaacuucaagaaccugcgggaguucguguucaagaacaucgauggcuacuucaagaucuacagcaagcacacccccaucaaccuggugcgggaccugccccagggauucagcgcccuggagccucugguggaccugcccaucggcaucaacaucaccagguuccagacccugcuggcccugcaccggagcuaccugacccccggcgacagcagcagcggcuggaccgccggcgccgccgcauacuacgugggcuaccugcagccacggaccuuccugcugaaguacaacgagaacggcaccaucaccgacgccguggacugcgcccuggacccccugagcgagaccaagugcacccuaaagagcuucaccguggagaagggcaucuaccagaccagcaacuuccgggugcagcccacugagagcaucgugcgguuccccaacauuaccaaccugugucccuucggcgagguguucaacgccacccgguucgccagcguguacgccuggaaccggaagcggaucagcaacugcguggccgacuacagcgugcuguacaacagcgccagcuucagcaccuucaagugcuacggcgugagcccuaccaagcugaacgaccugugcuucaccaacguguacgcugacagcuucgugauccggggcgacgaggugcggcagaucgcccccggccagaccggcaagaucgccgacuacaacuacaagcugcccgacgacuucaccggcugcgugaucgccuggaacagcaacaaccuggacagcaaggugggcggcaacuacaacuaccuguaccggcuguuccguaagagcaaccugaagccauucgagcgggacaucagcaccgagaucuaccaggccggcagcacccccugcaacgguguggagggcuuuaacugcuacuucccccugcagagcuacggcuuccagcccaccaacggcgugggcuaccagcccuaccgggugguggugcugagcuucgagcugcugcacgcccccgccaccgugugcggcccuaaaaagagcaccaaccuggugaagaacaagugcgugaacuucaauuucaacggccugaccggcaccggcgugcugaccgagagcaacaagaaguuccugcccuuccagcaguucggccgggauaucgccgacaccaccgacgcagugcgggacccccagacccuggagauccuggacaucaccccaugcagcuucggcggcgugagcgucaucacccccggcacaaacaccagcaaccagguggccgugcuguaccagggagugaacugcaccgaggugcccguggccauccacgccgaccagcugacccccaccuggcggguguacagcaccggcagcaacguguuccagacccgggccggcugccugaucggcgccgagcacgugaacaacuccuacgagugcgacauccccaucggcgcuggcaucugcgccagcuaccagacccagaccaacagcccccggcgggcccggagcguggccagccagagcaucaucgccuacaccaugagcuuaggcgccgagaacagcguggccuacagcaacaacagcaucgcgaucccuaccaacuucaccaucagcgugaccaccgagauacugcccgugagcaugaccaagaccagcguggacuguaccauguacaucugcggcgacagcaccgagugcagcaaccugcugcugcaguacggcagcuucugcacccagcugaaccgggcccugaccggcaucgccguggagcaggacaagaacacccaagagguguucgcccaggugaagcagaucuacaagacucccccaaucaaggacuucggcggcuucaacuucagccagauccugcccgaccccagcaagcccagcaagcggagcuucaucgaggaccugcuguucaacaaggugacccuggccgacgccggcuucaucaagcaguacggcgacugccugggggauaucgccgcucgggaccugaucugcgcccagaaguucaacggccugaccgugcugcccccucugcugaccgacgagaugaucgcccaguacaccagcgcccugcuugccggcaccaucaccagcggcuggaccuucggcgccggcgcagcccugcagauccccuucgccaugcagauggccuaccgguucaacggcaucggcgugacccagaacgugcuguacgagaaccagaagcugaucgccaaccaguucaacagcgccaucggcaagauccaggacagccugagcagcaccgccagcgcccugggcaagcugcaggacguggugaaccagaacgcucaggcccugaacacccuggugaagcagcugagcagcaacuucggcgccaucagcucagugcugaaugacauccugagcaggcuggaucccccagaggccgaggugcagaucgaccggcugaucaccggccggcugcagagccugcagaccuacgugacccagcagcugauccgggccgccgagauccgggccagcgccaaccuggcagccaccaagaugagcgagugcgugcugggccagagcaagcggguggacuuuugcggcaagggcuaccaccugaugagcuucccccagagcgcuccccacggcgugguguuccuccacgugacauacguccccgcccaggagaagaacuucaccaccgcccccgccauuugccacgacggcaaggcccacuucccccgggagggaguguucgugagcaacggcacccacugguucgugacccagcggaacuucuacgagccucagaucaucaccaccgacaacaccuucgugagcggcaacugcgacguggugaucggcaucgugaacaacaccguguacgacccccugcagcccgagcuggacagcuucaaggaggagcuggacaaguacuucaagaaccacaccagcccagacguggaccugggcgacaucagcggcaucaacgccagcguggugaacauccagaaggagaucgaccggcugaacgagguggccaagaaccugaacgagagccugaucgaccugcaggagcugggcaaguacgagcaguacaucaaguggcccugguacaucuggcugggcuucaucgccggccugaucgccaucgugauggugaccaucaugcugugcugcaugaccagcugcuguagcugccugaagggcugcugcagcugcggcagcugcugcaaguucgacgaggacgacagcgagcccgugcugaagggcgugaagcugcacuacaccugaggacuagucccuguucccagagcccacuuuuuuuucuuuuuuugaaauaaaauagccugucuuucagaucucaaaggcucuuuucagagccaccaaaaaaaaaaaaaaaaaaaaaaaaaaaaaaaaaaaaaaaaaaaaaaaaaaaaaaaaaaaaaaaaaaaaaaaaaaaaaaaaaaaaaaaaaaaaaaaaaaaaa

SEQ ID NO: 23573 - RNA, 4094 nt, Artificial Sequence
  SARS-CoV-2/Wuhan/WIV05/2019__EPI_ISL_402128 spike protein mRNA gc (1-1273)(K986P_V987P_A222V_D614G)
aggagagucccgcagucggcguccagcggcucugcuuguucgugugugugucguugcaggccuuauucaagcuuaccauguucguguuccuggugcugcugccccuggugagcagccagugcgugaaccugaccacccggacccagcugcccccugccuacaccaacagcuucacccggggcguguacuaccccgacaagguguuccggagcagcgugcugcacagcacccaggaccuguuccugcccuucuucagcaacgugaccugguuccacgccauccacgugagcggcaccaacggcaccaagcgguucgacaacccagugcugcccuucaacgacggcguguacuucgccagcaccgagaagucaaacaucauccggggcuggaucuucggcaccacccuggacagcaagacacagagccugcugaucgugaacaacgccaccaacguggugaucaaggugugcgaguuucaguucugcaacgaccccuuccugggcguguacuaccacaagaacaacaagagcuggauggagagcgaguuccgggucuacagcagcgcuaacaauugcaccuucgaguacgugagccagcccuuccugauggaccucgagggcaagcagggcaacuucaagaaccugcgggaguucguguucaagaacaucgauggcuacuucaagaucuacagcaagcacacccccaucaaccuggugcgggaccugccccagggauucagcgugcuggagccucugguggaccugcccaucggcaucaacaucaccagguuccagacccugcuggcccugcaccggagcuaccugacccccggcgacagcagcagcggcuggaccgccggcgccgccgccuacuacgugggcuaccugcagccacggaccuuccugcugaaguacaacgagaacggcaccaucaccgacgcaguggacugcgcccuggacccccugagcgagaccaagugcacccuaaagagcuucaccguggagaagggcaucuaccagaccagcaacuuccgggugcagcccacugagagcaucgugcgguuccccaacauuaccaaccugugucccuucggcgagguguucaacgccacccgguucgccagcguguacgccuggaaccggaagcggaucagcaacugcguggccgacuacagcgugcuguacaacagcgccagcuucagcaccuucaagugcuacggcgugagcccuaccaagcugaacgaccugugcuucaccaacguguacgccgacagcuucgugauccggggcgacgaggugcggcagaucgcucccggccagaccggcaagaucgccgacuacaacuacaagcugcccgacgacuucaccggcugcgugaucgccuggaacagcaacaaccuggacagcaaggugggcggcaacuacaacuaccuguaccggcuguuccguaagagcaaccugaagccauucgagcgggacaucagcaccgagaucuaccaggccggcagcacccccugcaacgguguggagggcuuuaacugcuacuucccccugcagagcuacggcuuccagcccaccaacggcgugggcuaccagcccuaccgggugguggugcugagcuucgagcugcugcacgcccccgccaccgugugcggcccuaaaaagagcaccaaccuggugaagaacaagugcgugaacuucaauuucaacggccugaccggcaccggcgugcugaccgagagcaacaagaaguuccugcccuuccagcaguucggccgggauaucgccgacaccaccgacgccgugcgggacccccagacccuggagauccuggacaucaccccaugcagcuucggcggcgucagcgugaucacccccggcacaaacaccagcaaccagguggcagugcuguaccagggagugaacugcaccgaggugcccguggccauccacgccgaccagcugacccccaccuggcggguguacagcaccggcagcaacguguuccagacccgggccggcugccugaucggcgccgagcacgugaacaacuccuacgagugcgacauccccaucggcgccggcaucugcgcuagcuaccagacccagaccaacagcccccggcgggcccggagcguggccagccagagcaucaucgccuacaccaugagcuuaggcgccgagaacagcguggccuacagcaacaacagcaucgccaucccuaccaacuucaccaucagcgugaccaccgagauacugcccgugagcaugaccaagaccagcguggacuguaccauguacaucugcggcgacagcaccgagugcagcaaccugcugcugcaguacggcagcuucugcacccagcugaaccgggcgcugaccggcaucgccguggagcaggacaagaacacccaagagguguucgcccaggugaagcagaucuacaagacucccccaaucaaggacuucggcggcuucaacuucagccagauccugcccgaccccagcaagcccagcaagcggagcuucaucgaggaccugcuguucaacaaggugacccuggccgacgccggcuucaucaagcaguacggcgacugccugggggauaucgccgcccgggaccugaucugcgcucagaaguucaacggccugaccgugcugcccccucugcugaccgacgagaugaucgcccaguacaccagcgcccugcuugccggcaccaucaccagcggcuggaccuucggcgccggcgccgcacugcagauccccuucgccaugcagauggccuaccgguucaacggcaucggcgugacccagaacgugcuguacgagaaccagaagcugaucgccaaccaguucaacagcgccaucggcaagauccaggacagccugagcagcaccgccagcgcccugggcaagcugcaggacguggugaaccagaacgcccaggcucugaacacccuggugaagcagcugagcagcaacuucggcgccaucagcucagugcugaaugacauccugagcaggcuggaucccccagaggccgaggugcagaucgaccggcugaucaccggccggcugcagagccugcagaccuacgugacccagcagcugauccgggccgccgagauccgggccagcgccaaccuggccgcaaccaagaugagcgagugcgugcugggccagagcaagcggguggacuuuugcggcaagggcuaccaccugaugagcuucccccagagcgcuccccacggcgugguguuccuccacgucacauacgugcccgcccaggagaagaacuucaccaccgcccccgccauuugccacgacggcaaggcccacuucccccgggagggaguguucgugagcaacggcacccacugguucgugacccagcggaacuucuacgagccucagaucaucaccaccgacaacaccuucgugagcggcaacugcgacguggugaucggcaucgugaacaacaccguguacgacccccugcagcccgagcuggacagcuucaaggaggagcuggacaaguacuucaagaaccacaccagcccagacguggaccugggcgacaucagcggcaucaacgccagcguggugaacauccagaaggagaucgaccggcugaacgagguggccaagaaccugaacgagagccugaucgaccugcaggagcugggcaaguacgagcaguacaucaaguggcccugguacaucuggcugggcuucaucgccggccugaucgccaucgugauggugaccaucaugcugugcugcaugaccagcugcuguagcugccugaagggcugcugcagcugcggcagcugcugcaaguucgacgaggacgacagcgagcccgugcugaagggcgugaagcugcacuacaccugaggacuagucccuguucccagagcccacuuuuuuuucuuuuuuugaaauaaaauagccugucuuucagaucucaaaggcucuuuucagagccaccaaaaaaaaaaaaaaaaaaaaaaaaaaaaaaaaaaaaaaaaaaaaaaaaaaaaaaaaaaaaaaaaaaaaaaaaaaaaaaaaaaaaaaaaaaaaaaaaaaaaa

SEQ ID NO: 23574 - RNA, 4094 nt, Artificial Sequence
  SARS-CoV-2/Wuhan/WIV05/2019__EPI_ISL_402128 spike protein mRNA gc (1-1273)(K986P_V987P_N439K_D614G)
aggagagucccgcagucggcguccagcggcucugcuuguucgugugugugucguugcaggccuuauucaagcuuaccauguucguguuccuggugcugcugccccuggugagcagccagugcgugaaccugaccacccggacccagcugcccccugccuacaccaacagcuucacccggggcguguacuaccccgacaagguguuccggagcagcgugcugcacagcacccaggaccuguuccugcccuucuucagcaacgugaccugguuccacgccauccacgugagcggcaccaacggcaccaagcgguucgacaacccagugcugcccuucaacgacggcguguacuucgccagcaccgagaagucaaacaucauccggggcuggaucuucggcaccacccuggacagcaagacacagagccugcugaucgugaacaacgccaccaacguggugaucaaggugugcgaguuucaguucugcaacgaccccuuccugggcguguacuaccacaagaacaacaagagcuggauggagagcgaguuccgggucuacagcagcgcuaacaauugcaccuucgaguacgugagccagcccuuccugauggaccucgagggcaagcagggcaacuucaagaaccugcgggaguucguguucaagaacaucgauggcuacuucaagaucuacagcaagcacacccccaucaaccuggugcgggaccugccccagggauucagcgcccuggagccucugguggaccugcccaucggcaucaacaucaccagguuccagacccugcuggcccugcaccggagcuaccugacccccggcgacagcagcagcggcuggaccgccggcgccgccgcauacuacgugggcuaccugcagccacggaccuuccugcugaaguacaacgagaacggcaccaucaccgacgccguggacugcgcccuggacccccugagcgagaccaagugcacccuaaagagcuucaccguggagaagggcaucuaccagaccagcaacuuccgggugcagcccacugagagcaucgugcgguuccccaacauuaccaaccugugucccuucggcgagguguucaacgccacccgguucgccagcguguacgccuggaaccggaagcggaucagcaacugcguggccgacuacagcgugcuguacaacagcgccagcuucagcaccuucaagugcuacggcgugagcccuaccaagcugaacgaccugugcuucaccaacguguacgcugacagcuucgugauccggggcgacgaggugcggcagaucgcccccggccagaccggcaagaucgccgacuacaacuacaagcugcccgacgacuucaccggcugcgugaucgccuggaacagcaagaaccuggacagcaaggugggcggcaacuacaacuaccuguaccggcuguuccguaagagcaaccugaagccauucgagcgggacaucagcaccgagaucuaccaggccggcagcacccccugcaacgguguggagggcuuuaacugcuacuucccccugcagagcuacggcuuccagcccaccaacggcgugggcuaccagcccuaccgggugguggugcugagcuucgagcugcugcacgcccccgccaccgugugcggcccuaaaaagagcaccaaccuggugaagaacaagugcgugaacuucaacuucaauggccugaccggcaccggcgugcugaccgagagcaacaagaaguuccugcccuuccagcaguucggccgggauaucgccgacaccaccgacgcagugcgggacccccagacccuggagauccuggacaucaccccaugcagcuucggcggcgugagcgucaucacccccggcacaaacaccagcaaccagguggccgugcuguaccagggagugaacugcaccgaggugcccguggccauccacgccgaccagcugacccccaccuggcggguguacagcaccggcagcaacguguuccagacccgggccggcugccugaucggcgccgagcacgugaacaacuccuacgagugcgacauccccaucggcgcuggcaucugcgccagcuaccagacccagaccaacagcccccggcgggcccggagcguggccagccagagcaucaucgccuacaccaugagcuuaggcgccgagaacagcguggccuacagcaacaacagcaucgcgaucccuaccaacuucaccaucagcgugaccaccgagauacugcccgugagcaugaccaagaccagcguggacuguaccauguacaucugcggcgacagcaccgagugcagcaaccugcugcugcaguacggcagcuucugcacccagcugaaccgggcccugaccggcaucgccguggagcaggacaagaacacccaagagguguucgcccaggugaagcagaucuacaagacucccccaaucaaggacuucggcggcuucaacuucagccagauccugcccgaccccagcaagcccagcaagcggagcuucaucgaggaccugcuguucaacaaggugacccuggccgacgccggcuucaucaagcaguacggcgacugccugggggauaucgccgcucgggaccugaucugcgcccagaaguucaacggccugaccgugcugcccccucugcugaccgacgagaugaucgcccaguacaccagcgcccugcuugccggcaccaucaccagcggcuggaccuucggcgccggcgcagcccugcagauccccuucgccaugcagauggccuaccgguucaacggcaucggcgugacccagaacgugcuguacgagaaccagaagcugaucgccaaccaguucaacagcgccaucggcaagauccaggacagccugagcagcaccgccagcgcccugggcaagcugcaggacguggugaaccagaacgcucaggcccugaacacccuggugaagcagcugagcagcaacuucggcgccaucagcucagugcugaacgacauccugagcaggcuggaucccccagaggccgaggugcagaucgaccggcugaucaccggccggcugcagagccugcagaccuacgugacccagcagcugauccgggccgccgagauccgggccagcgccaaucuggcagccaccaagaugagcgagugcgugcugggccagagcaagcggguggacuuuugcggcaagggcuaccaccugaugagcuucccccagagcgcuccccacggcgugguguuccuccacgugacauacguccccgcccaggagaagaacuucaccaccgcccccgccauuugccacgacggcaaggcccacuucccccgggagggaguguucgugagcaacggcacccacugguucgugacccagcggaacuucuacgagccucagaucaucaccaccgacaacaccuucgugagcggcaacugcgacguggugaucggcaucgugaacaacaccguguacgacccccugcagcccgagcuggacagcuucaaggaggagcuggacaaguacuucaagaaccacaccagcccagacguggaccugggcgacaucagcggcaucaacgccagcguggugaacauccagaaggagaucgaccggcugaacgagguggccaagaaccugaacgagagccugaucgaccugcaggagcugggcaaguacgagcaguacaucaaguggcccugguacaucuggcugggcuucaucgccggccugaucgccaucgugauggugaccaucaugcugugcugcaugaccagcugcuguagcugccugaagggcugcugcagcugcggcagcugcugcaaguucgacgaggacgacagcgagcccgugcugaagggcgugaagcugcacuacaccugaggacuagucccuguucccagagcccacuuuuuuuucuuuuuuugaaauaaaauagccugucuuucagaucucaaaggcucuuuucagagccaccaaaaaaaaaaaaaaaaaaaaaaaaaaaaaaaaaaaaaaaaaaaaaaaaaaaaaaaaaaaaaaaaaaaaaaaaaaaaaaaaaaaaaaaaaaaaaaaaaaaaa

SEQ ID NO: 23575 - RNA, 4094 nt, Artificial Sequence
  SARS-CoV-2/Wuhan/WIV05/2019__EPI_ISL_402128 spike protein mRNA gc (1-1273)(K986P_V987P_S477N_D614G)
aggagagucccgcagucggcguccagcggcucugcuuguucgugugugugucguugcaggccuuauucaagcuuaccauguucguguuccuggugcugcugccccuggugagcagccagugcgugaaccugaccacccggacccagcugcccccugccuacaccaacagcuucacccggggcguguacuaccccgacaagguguuccggagcagcgugcugcacagcacccaggaccuguuccugcccuucuucagcaacgugaccugguuccacgccauccacgugagcggcaccaacggcaccaagcgguucgacaacccagugcugcccuucaacgacggcguguacuucgccagcaccgagaagucaaacaucauccggggcuggaucuucggcaccacccuggacagcaagacacagagccugcugaucgugaacaacgccaccaacguggugaucaaggugugcgaguuucaguucugcaacgaccccuuccugggcguguacuaccacaagaacaacaagagcuggauggagagcgaguuccgggucuacagcagcgcuaacaauugcaccuucgaguacgugagccagcccuuccugauggaccucgagggcaagcagggcaacuucaagaaccugcgggaguucguguucaagaacaucgauggcuacuucaagaucuacagcaagcacacccccaucaaccuggugcgggaccugccccagggauucagcgcccuggagccucugguggaccugcccaucggcaucaacaucaccagguuccagacccugcuggcccugcaccggagcuaccugacccccggcgacagcagcagcggcuggaccgccggcgccgccgcauacuacgugggcuaccugcagccacggaccuuccugcugaaguacaacgagaacggcaccaucaccgacgccguggacugcgcccuggacccccugagcgagaccaagugcacccuaaagagcuucaccguggagaagggcaucuaccagaccagcaacuuccgggugcagcccacugagagcaucgugcgguuccccaacauuaccaaccugugucccuucggcgagguguucaacgccacccgguucgccagcguguacgccuggaaccggaagcggaucagcaacugcguggccgacuacagcgugcuguacaacagcgccagcuucagcaccuucaagugcuacggcgugagcccuaccaagcugaacgaccugugcuucaccaacguguacgcugacagcuucgugauccggggcgacgaggugcggcagaucgcccccggccagaccggcaagaucgccgacuacaacuacaagcugcccgacgacuucaccggcugcgugaucgccuggaacagcaacaaccuggacagcaaggugggcggcaacuacaacuaccuguaccggcuguuccguaagagcaaccugaagccauucgagcgggacaucagcaccgagaucuaccaggccggcaacacccccugcaacgguguggagggcuuuaacugcuacuucccccugcagagcuacggcuuccagcccaccaacggcgugggcuaccagcccuaccgggugguggugcugagcuucgagcugcugcacgcccccgccaccgugugcggcccuaaaaagagcaccaaccuggugaagaacaagugcgugaauuucaacuucaacggccugaccggcaccggcgugcugaccgagagcaacaagaaguuccugcccuuccagcaguucggccgggauaucgccgacaccaccgacgcagugcgggacccccagacccuggagauccuggacaucaccccaugcagcuucggcggcgugagcgucaucacccccggcacaaacaccagcaaccagguggccgugcuguaccagggagugaacugcaccgaggugcccguggccauccacgccgaccagcugacccccaccuggcggguguacagcaccggcagcaacguguuccagacccgggccggcugccugaucggcgccgagcacgugaacaacagcuacgagugcgacauccccaucggcgcuggcaucugcgccuccuaccagacccagaccaacagcccccggcgggcccggagcguggccagccagagcaucaucgccuacaccaugagcuuaggcgccgagaacagcguggccuacagcaacaacagcaucgcgaucccuaccaacuucaccaucagcgugaccaccgagauacugcccgugagcaugaccaagaccagcguggacuguaccauguacaucugcggcgacagcaccgagugcagcaaccugcugcugcaguacggcagcuucugcacccagcugaaccgggcccugaccggcaucgccguggagcaggacaagaacacccaagagguguucgcccaggugaagcagaucuacaagacucccccaaucaaggacuucggcggcuucaacuucagccagauccugcccgaccccagcaagcccagcaagcggagcuucaucgaggaccugcuguucaacaaggugacccuggccgacgccggcuucaucaagcaguacggcgacugccugggggauaucgccgcucgggaccugaucugcgcccagaaguucaacggccugaccgugcugcccccucugcugaccgacgagaugaucgcccaguacaccagcgcccugcuugccggcaccaucaccagcggcuggaccuucggcgccggcgcagcccugcagauccccuucgccaugcagauggccuaccgguucaacggcaucggcgugacccagaacgugcuguacgagaaccagaagcugaucgccaaccaguucaacagcgccaucggcaagauccaggacagccugagcagcaccgccagcgcccugggcaagcugcaggacguggugaaccagaacgcucaggcccugaacacccuggugaagcagcugagcagcaauuucggcgccaucagcagcgugcugaacgacauccugucaaggcuggaucccccagaggccgaggugcagaucgaccggcugaucaccggccggcugcagagccugcagaccuacgugacccagcagcugauccgggccgccgagauccgggccagcgccaaccuggcagccaccaagaugagcgagugcgugcugggccagagcaagcggguggacuuuugcggcaagggcuaccaccugaugagcuucccccagagcgcuccccacggcgugguguuccuccacgugacauacguccccgcccaggagaagaacuucaccaccgcccccgccauuugccacgacggcaaggcccacuucccccgggagggaguguucgugagcaacggcacccacugguucgugacccagcggaacuucuacgagccucagaucaucaccaccgacaacaccuucgugagcggcaacugcgacguggugaucggcaucgugaacaacaccguguacgacccccugcagcccgagcuggacagcuucaaggaggagcuggacaaguacuucaagaaccacaccagcccagacguggaccugggcgacaucagcggcaucaacgccagcguggugaacauccagaaggagaucgaccggcugaacgagguggccaagaaccugaacgagagccugaucgaccugcaggagcugggcaaguacgagcaguacaucaaguggcccugguacaucuggcugggcuucaucgccggccugaucgccaucgugauggugaccaucaugcugugcugcaugaccagcugcuguagcugccugaagggcugcugcagcugcggcagcugcugcaaguucgacgaggacgacagcgagcccgugcugaagggcgugaagcugcacuacaccugaggacuagucccuguucccagagcccacuuuuuuuucuuuuuuugaaauaaaauagccugucuuucagaucucaaaggcucuuuucagagccaccaaaaaaaaaaaaaaaaaaaaaaaaaaaaaaaaaaaaaaaaaaaaaaaaaaaaaaaaaaaaaaaaaaaaaaaaaaaaaaaaaaaaaaaaaaaaaaaaaaaaa

SEQ ID NO: 23576 - RNA, 4094 nt, Artificial Sequence
  SARS-CoV-2/Wuhan/WIV05/2019__EPI_ISL_402128 spike protein mRNA gc (1-1273)(K986P_V987P_N501Y_D614G)
aggagagucccgcagucggcguccagcggcucugcuuguucgugugugugucguugcaggccuuauucaagcuuaccauguucguguuccuggugcugcugccccuggugagcagccagugcgugaaccugaccacccggacccagcugcccccugccuacaccaacagcuucacccggggcguguacuaccccgacaagguguuccggagcagcgugcugcacagcacccaggaccuguuccugcccuucuucagcaacgugaccugguuccacgccauccacgugagcggcaccaacggcaccaagcgguucgacaacccagugcugcccuucaacgacggcguguacuucgccagcaccgagaagucaaacaucauccggggcuggaucuucggcaccacccuggacagcaagacacagagccugcugaucgugaacaacgccaccaacguggugaucaaggugugcgaguuucaguucugcaacgaccccuuccugggcguguacuaccacaagaacaacaagagcuggauggagagcgaguuccgggucuacagcagcgcuaacaauugcaccuucgaguacgugagccagcccuuccugauggaccucgagggcaagcagggcaacuucaagaaccugcgggaguucguguucaagaacaucgauggcuacuucaagaucuacagcaagcacacccccaucaaccuggugcgggaccugccccagggauucagcgcccuggagccucugguggaccugcccaucggcaucaacaucaccagguuccagacccugcuggcccugcaccggagcuaccugacccccggcgacagcagcagcggcuggaccgccggcgccgccgcauacuacgugggcuaccugcagccacggaccuuccugcugaaguacaacgagaacggcaccaucaccgacgccguggacugcgcccuggacccccugagcgagaccaagugcacccuaaagagcuucaccguggagaagggcaucuaccagaccagcaacuuccgggugcagcccacugagagcaucgugcgguuccccaacauuaccaaccugugucccuucggcgagguguucaacgccacccgguucgccagcguguacgccuggaaccggaagcggaucagcaacugcguggccgacuacagcgugcuguacaacagcgccagcuucagcaccuucaagugcuacggcgugagcccuaccaagcugaacgaccugugcuucaccaacguguacgcugacagcuucgugauccggggcgacgaggugcggcagaucgcccccggccagaccggcaagaucgccgacuacaacuacaagcugcccgacgacuucaccggcugcgugaucgccuggaacagcaacaaccuggacagcaaggugggcggcaacuacaacuaccuguaccggcuguuccguaagagcaaccugaagccauucgagcgggacaucagcaccgagaucuaccaggccggcagcacccccugcaacgguguggagggcuuuaacugcuacuucccccugcagagcuacggcuuccagcccaccuacggcgugggcuaccagcccuaccgggugguggugcugagcuucgagcugcugcacgcccccgccaccgugugcggcccuaaaaagagcaccaaccuggugaagaacaagugcgugaacuucaacuucaauggccugaccggcaccggcgugcugaccgagagcaacaagaaguuccugcccuuccagcaguucggccgggauaucgccgacaccaccgacgcagugcgggacccccagacccuggagauccuggacaucaccccaugcagcuucggcggcgugagcgucaucacccccggcacaaacaccagcaaccagguggccgugcuguaccagggagugaacugcaccgaggugcccguggccauccacgccgaccagcugacccccaccuggcggguguacagcaccggcagcaacguguuccagacccgggccggcugccugaucggcgccgagcacgugaacaacuccuacgagugcgacauccccaucggcgcuggcaucugcgccagcuaccagacccagaccaacagcccccggcgggcccggagcguggccagccagagcaucaucgccuacaccaugagcuuaggcgccgagaacagcguggccuacagcaacaacagcaucgcgaucccuaccaacuucaccaucagcgugaccaccgagauacugcccgugagcaugaccaagaccagcguggacuguaccauguacaucugcggcgacagcaccgagugcagcaaccugcugcugcaguacggcagcuucugcacccagcugaaccgggcccugaccggcaucgccguggagcaggacaagaacacccaagagguguucgcccaggugaagcagaucuacaagacucccccaaucaaggacuucggcggcuucaacuucagccagauccugcccgaccccagcaagcccagcaagcggagcuucaucgaggaccugcuguucaacaaggugacccuggccgacgccggcuucaucaagcaguacggcgacugccugggggauaucgccgcucgggaccugaucugcgcccagaaguucaacggccugaccgugcugcccccucugcugaccgacgagaugaucgcccaguacaccagcgcccugcuugccggcaccaucaccagcggcuggaccuucggcgccggcgcagcccugcagauccccuucgccaugcagauggccuaccgguucaacggcaucggcgugacccagaacgugcuguacgagaaccagaagcugaucgccaaccaguucaacagcgccaucggcaagauccaggacagccugagcagcaccgccagcgcccugggcaagcugcaggacguggugaaccagaacgcucaggcccugaacacccuggugaagcagcugagcagcaacuucggcgccaucagcucagugcugaacgacauccugagcaggcuggaucccccagaggccgaggugcagaucgaccggcugaucaccggccggcugcagagccugcagaccuacgugacccagcagcugauccgggccgccgagauccgggccagcgccaaucuggcagccaccaagaugagcgagugcgugcugggccagagcaagcggguggacuuuugcggcaagggcuaccaccugaugagcuucccccagagcgcuccccacggcgugguguuccuccacgugacauacguccccgcccaggagaagaacuucaccaccgcccccgccauuugccacgacggcaaggcccacuucccccgggagggaguguucgugagcaacggcacccacugguucgugacccagcggaacuucuacgagccucagaucaucaccaccgacaacaccuucgugagcggcaacugcgacguggugaucggcaucgugaacaacaccguguacgacccccugcagcccgagcuggacagcuucaaggaggagcuggacaaguacuucaagaaccacaccagcccagacguggaccugggcgacaucagcggcaucaacgccagcguggugaacauccagaaggagaucgaccggcugaacgagguggccaagaaccugaacgagagccugaucgaccugcaggagcugggcaaguacgagcaguacaucaaguggcccugguacaucuggcugggcuucaucgccggccugaucgccaucgugauggugaccaucaugcugugcugcaugaccagcugcuguagcugccugaagggcugcugcagcugcggcagcugcugcaaguucgacgaggacgacagcgagcccgugcugaagggcgugaagcugcacuacaccugaggacuagucccuguucccagagcccacuuuuuuuucuuuuuuugaaauaaaauagccugucuuucagaucucaaaggcucuuuucagagccaccaaaaaaaaaaaaaaaaaaaaaaaaaaaaaaaaaaaaaaaaaaaaaaaaaaaaaaaaaaaaaaaaaaaaaaaaaaaaaaaaaaaaaaaaaaaaaaaaaaaaa

SEQ ID NO: 23577 - RNA, 4088 nt, Artificial Sequence
  SARS-CoV-2/Wuhan/WIV05/2019__EPI_ISL_402128 spike protein mRNA gc (1-1273)(K986P_V987P_H69del_V70del_D614G)
aggagagucccgcagucggcguccagcggcucugcuuguucgugugugugucguugcaggccuuauucaagcuuaccauguucguguuccuggugcugcugccccuggugagcagccagugcgugaaccugaccacccggacccagcugcccccugccuacaccaacagcuucacccggggcguguacuaccccgacaagguguuccggagcagcgugcugcacagcacccaggaccuguuccugcccuucuucagcaacgugaccugguuccacgccaucagcggcaccaacggcaccaagcgguucgacaacccagugcugcccuucaacgacggcguguacuucgccagcaccgagaagucaaacaucauccggggcuggaucuucggcaccacccuggacagcaagacacagagccugcugaucgugaacaacgccaccaacguggugaucaaggugugcgaguuucaguucugcaacgaccccuuccugggcguguacuaccacaagaacaacaagagcuggauggagagcgaguuccggguguacagcagcgcuaacaauugcaccuucgaguacgucagccagcccuuccugauggaccucgagggcaagcagggcaacuucaagaaccugcgggaguucguguucaagaacaucgauggcuacuucaagaucuacagcaagcacacccccaucaaccuggugcgggaccugccccagggauucagcgcccuggagccucugguggaccugcccaucggcaucaacaucaccagguuccagacccugcuggcccugcaccggagcuaccugacccccggcgacagcagcagcggcuggaccgccggcgccgccgcauacuacgugggcuaccugcagccacggaccuuccugcugaaguacaacgagaacggcaccaucaccgacgccguggacugcgcccuggacccccugagcgagaccaagugcacccuaaagagcuucaccguggagaagggcaucuaccagaccagcaacuuccgggugcagcccacugagagcaucgugcgguuccccaacauuaccaaccugugucccuucggcgagguguucaacgccacccgguucgccagcguguacgccuggaaccggaagcggaucagcaacugcguggccgacuacagcgugcuguacaacagcgccagcuucagcaccuucaagugcuacggcgugagcccuaccaagcugaacgaccugugcuucaccaacguguacgcugacagcuucgugauccggggcgacgaggugcggcagaucgcccccggccagaccggcaagaucgccgacuacaacuacaagcugcccgacgacuucaccggcugcgugaucgccuggaacagcaacaaccuggacagcaaggugggcggcaacuacaacuaccuguaccggcuguuccguaagagcaaccugaagccauucgagcgggacaucagcaccgagaucuaccaggccggcagcacccccugcaacgguguggagggcuuuaacugcuacuucccccugcagagcuacggcuuccagcccaccaacggcgugggcuaccagcccuaccgggugguggugcugagcuucgagcugcugcacgcccccgccaccgugugcggcccuaaaaagagcaccaaccuggugaagaacaagugcgugaacuucaauuucaacggccugaccggcaccggcgugcugaccgagagcaacaagaaguuccugcccuuccagcaguucggccgggauaucgccgacaccaccgacgcagugcgggacccccagacccuggagauccuggacaucaccccaugcagcuucggcggcgugagcgugaucacccccggcacaaacaccagcaaccaggucgccgugcuguaccagggagugaacugcaccgaggugcccguggccauccacgccgaccagcugacccccaccuggcggguguacagcaccggcagcaacguguuccagacccgggccggcugccugaucggcgccgagcacgugaacaacuccuacgagugcgacauccccaucggcgcuggcaucugcgccagcuaccagacccagaccaacagcccccggcgggcccggagcguggccagccagagcaucaucgccuacaccaugagcuuaggcgccgagaacagcguggccuacagcaacaacagcaucgcgaucccuaccaacuucaccaucagcgugaccaccgagauacugcccgugagcaugaccaagaccagcguggacuguaccauguacaucugcggcgacagcaccgagugcagcaaccugcugcugcaguacggcagcuucugcacccagcugaaccgggcccugaccggcaucgccguggagcaggacaagaacacccaagagguguucgcccaggugaagcagaucuacaagacucccccaaucaaggacuucggcggcuucaacuucagccagauccugcccgaccccagcaagcccagcaagcggagcuucaucgaggaccugcuguucaacaaggugacccuggccgacgccggcuucaucaagcaguacggcgacugccugggggauaucgccgcucgggaccugaucugcgcccagaaguucaacggccugaccgugcugcccccucugcugaccgacgagaugaucgcccaguacaccagcgcccugcuugccggcaccaucaccagcggcuggaccuucggcgccggcgcagcccugcagauccccuucgccaugcagauggccuaccgguucaacggcaucggcgugacccagaacgugcuguacgagaaccagaagcugaucgccaaccaguucaacagcgccaucggcaagauccaggacagccugagcagcaccgccagcgcccugggcaagcugcaggacguggugaaccagaacgcucaggcccugaacacccuggugaagcagcugagcagcaacuucggcgccaucagcucagugcugaaugacauccugagcaggcuggaucccccagaggccgaggugcagaucgaccggcugaucaccggccggcugcagagccugcagaccuacgugacccagcagcugauccgggccgccgagauccgggccagcgccaaccuggcagccaccaagaugagcgagugcgugcugggccagagcaagcggguggacuuuugcggcaagggcuaccaccugaugagcuucccccagagcgcuccccacggcgugguguuccuccacgugacauacgugcccgcccaggagaagaacuucaccaccgcccccgccauuugccacgacggcaaggcccacuucccccgggagggagucuucgugagcaacggcacccacugguucgugacccagcggaacuucuacgagccucagaucaucaccaccgacaacaccuucgugagcggcaacugcgacguggugaucggcaucgugaacaacaccguguacgacccccugcagcccgagcuggacagcuucaaggaggagcuggacaaguacuucaagaaccacaccagcccagacguggaccugggcgacaucagcggcaucaacgccagcguggugaacauccagaaggagaucgaccggcugaacgagguggccaagaaccugaacgagagccugaucgaccugcaggagcugggcaaguacgagcaguacaucaaguggcccugguacaucuggcugggcuucaucgccggccugaucgccaucgugauggugaccaucaugcugugcugcaugaccagcugcuguagcugccugaagggcugcugcagcugcggcagcugcugcaaguucgacgaggacgacagcgagcccgugcugaagggcgugaagcugcacuacaccugaggacuagucccuguucccagagcccacuuuuuuuucuuuuuuugaaauaaaauagccugucuuucagaucucaaaggcucuuuucagagccaccaaaaaaaaaaaaaaaaaaaaaaaaaaaaaaaaaaaaaaaaaaaaaaaaaaaaaaaaaaaaaaaaaaaaaaaaaaaaaaaaaaaaaaaaaaaaaaaaaaaaa

SEQ ID NO: 23578 - RNA, 4094 nt, Artificial Sequence
  SARS-CoV-2/Wuhan/WIV05/2019__EPI_ISL_402128 spike protein mRNA gc (1-1273)(K986P_V987P_Y453F_D614G)
aggagagucccgcagucggcguccagcggcucugcuuguucgugugugugucguugcaggccuuauucaagcuuaccauguucguguuccuggugcugcugccccuggugagcagccagugcgugaaccugaccacccggacccagcugcccccugccuacaccaacagcuucacccggggcguguacuaccccgacaagguguuccggagcagcgugcugcacagcacccaggaccuguuccugcccuucuucagcaacgugaccugguuccacgccauccacgugagcggcaccaacggcaccaagcgguucgacaacccagugcugcccuucaacgacggcguguacuucgccagcaccgagaagucaaacaucauccggggcuggaucuucggcaccacccuggacagcaagacacagagccugcugaucgugaacaacgccaccaacguggugaucaaggugugcgaguuucaguucugcaacgaccccuuccugggcguguacuaccacaagaacaacaagagcuggauggagagcgaguuccgggucuacagcagcgcuaacaauugcaccuucgaguacgugagccagcccuuccugauggaccucgagggcaagcagggcaacuucaagaaccugcgggaguucguguucaagaacaucgauggcuacuucaagaucuacagcaagcacacccccaucaaccuggugcgggaccugccccagggauucagcgcccuggagccucugguggaccugcccaucggcaucaacaucaccagguuccagacccugcuggcccugcaccggagcuaccugacccccggcgacagcagcagcggcuggaccgccggcgccgccgcauacuacgugggcuaccugcagccacggaccuuccugcugaaguacaacgagaacggcaccaucaccgacgccguggacugcgcccuggacccccugagcgagaccaagugcacccuaaagagcuucaccguggagaagggcaucuaccagaccagcaacuuccgggugcagcccacugagagcaucgugcgguuccccaacauuaccaaccugugucccuucggcgagguguucaacgccacccgguucgccagcguguacgccuggaaccggaagcggaucagcaacugcguggccgacuacagcgugcuguacaacagcgccagcuucagcaccuucaagugcuacggcgugagcccuaccaagcugaacgaccugugcuucaccaacguguacgcugacagcuucgugauccggggcgacgaggugcggcagaucgcccccggccagaccggcaagaucgccgacuacaacuacaagcugcccgacgacuucaccggcugcgugaucgccuggaacagcaacaaccuggacagcaaggugggcggcaacuacaacuaccuguuccggcuguuccguaagagcaaccugaagccauuugagcgggacaucagcaccgagaucuaccaggccggcagcacccccugcaacgguguggagggcuucaacugcuacuucccccugcagagcuacggcuuccagcccaccaacggcgugggcuaccagcccuaccgggugguggugcugagcuucgagcugcugcacgcccccgccaccgugugcggcccuaaaaagagcaccaaccuggugaagaacaagugcgugaacuucaauuucaacggccugaccggcaccggcgugcugaccgagagcaacaagaaguuccugcccuuccagcaguucggccgggauaucgccgacaccaccgacgcagugcgggacccccagacccuggagauccuggacaucaccccaugcagcuucggcggcgugagcgucaucacccccggcacaaacaccagcaaccagguggccgugcuguaccagggagugaacugcaccgaggugcccguggccauccacgccgaccagcugacccccaccuggcggguguacagcaccggcagcaacguguuccagacccgggccggcugccugaucggcgccgagcacgugaacaacuccuacgagugcgacauccccaucggcgcuggcaucugcgccagcuaccagacccagaccaacagcccccggcgggcccggagcguggccagccagagcaucaucgccuacaccaugagcuuaggcgccgagaacagcguggccuacagcaacaacagcaucgcgaucccuaccaacuucaccaucagcgugaccaccgagauacugcccgugagcaugaccaagaccagcguggacuguaccauguacaucugcggcgacagcaccgagugcagcaaccugcugcugcaguacggcagcuucugcacccagcugaaccgggcccugaccggcaucgccguggagcaggacaagaacacccaagagguguucgcccaggugaagcagaucuacaagacucccccaaucaaggacuucggcggcuucaacuucagccagauccugcccgaccccagcaagcccagcaagcggagcuucaucgaggaccugcuguucaacaaggugacccuggccgacgccggcuucaucaagcaguacggcgacugccugggggauaucgccgcucgggaccugaucugcgcccagaaguucaacggccugaccgugcugcccccucugcugaccgacgagaugaucgcccaguacaccagcgcccugcuugccggcaccaucaccagcggcuggaccuucggcgccggcgcagcccugcagauccccuucgccaugcagauggccuaccgguucaacggcaucggcgugacccagaacgugcuguacgagaaccagaagcugaucgccaaccaguucaacagcgccaucggcaagauccaggacagccugagcagcaccgccagcgcccugggcaagcugcaggacguggugaaccagaacgcucaggcccugaacacccuggugaagcagcugagcagcaacuuuggcgccaucagcucagugcugaaugacauccugagcaggcuggaucccccagaggccgaggugcagaucgaccggcugaucaccggccggcugcagagccugcagaccuacgugacccagcagcugauccgggccgccgagauccgggccagcgccaaccuggcagccaccaagaugagcgagugcgugcugggccagagcaagcggguggacuucugcggcaagggcuaccaccugaugagcuucccccagagcgcuccccacggcgugguguuccuccacgugacauacguccccgcccaggagaagaacuucaccaccgcccccgccauuugccacgacggcaaggcccacuucccccgggagggaguguucgugagcaacggcacccacugguucgugacccagcggaacuucuacgagccucagaucaucaccaccgacaacaccuucgugagcggcaacugcgacguggugaucggcaucgugaacaacaccguguacgacccccugcagcccgagcuggacagcuucaaggaggagcuggacaaguacuucaagaaccacaccagcccagacguggaccugggcgacaucagcggcaucaacgccagcguggugaacauccagaaggagaucgaccggcugaacgagguggccaagaaccugaacgagagccugaucgaccugcaggagcugggcaaguacgagcaguacaucaaguggcccugguacaucuggcugggcuucaucgccggccugaucgccaucgugauggugaccaucaugcugugcugcaugaccagcugcuguagcugccugaagggcugcugcagcugcggcagcugcugcaaguucgacgaggacgacagcgagcccgugcugaagggcgugaagcugcacuacaccugaggacuagucccuguucccagagcccacuuuuuuuucuuuuuuugaaauaaaauagccugucuuucagaucucaaaggcucuuuucagagccaccaaaaaaaaaaaaaaaaaaaaaaaaaaaaaaaaaaaaaaaaaaaaaaaaaaaaaaaaaaaaaaaaaaaaaaaaaaaaaaaaaaaaaaaaaaaaaaaaaaaaa

SEQ ID NO: 23579 - RNA, 4094 nt, Artificial Sequence
  SARS-CoV-2/Wuhan/WIV05/2019__EPI_ISL_402128 spike protein mRNA gc (1-1273)(K986P_V987P_D614G_I692V)
aggagagucccgcagucggcguccagcggcucugcuuguucgugugugugucguugcaggccuuauucaagcuuaccauguucguguuccuggugcugcugccccuggugagcagccagugcgugaaccugaccacccggacccagcugcccccugccuacaccaacagcuucacccggggcguguacuaccccgacaagguguuccggagcagcgugcugcacagcacccaggaccuguuccugcccuucuucagcaacgugaccugguuccacgccauccacgugagcggcaccaacggcaccaagcgguucgacaacccagugcugcccuucaacgacggcguguacuucgccagcaccgagaagucaaacaucauccggggcuggaucuucggcaccacccuggacagcaagacacagagccugcugaucgugaacaacgccaccaacguggugaucaaggugugcgaguuucaguucugcaacgaccccuuccugggcguguacuaccacaagaacaacaagagcuggauggagagcgaguuccgggucuacagcagcgcuaacaauugcaccuucgaguacgugagccagcccuuccugauggaccucgagggcaagcagggcaacuucaagaaccugcgggaguucguguucaagaacaucgauggcuacuucaagaucuacagcaagcacacccccaucaaccuggugcgggaccugccccagggauucagcgcccuggagccucugguggaccugcccaucggcaucaacaucaccagguuccagacccugcuggcccugcaccggagcuaccugacccccggcgacagcagcagcggcuggaccgccggcgccgccgcauacuacgugggcuaccugcagccacggaccuuccugcugaaguacaacgagaacggcaccaucaccgacgccguggacugcgcccuggacccccugagcgagaccaagugcacccuaaagagcuucaccguggagaagggcaucuaccagaccagcaacuuccgggugcagcccacugagagcaucgugcgguuccccaacauuaccaaccugugucccuucggcgagguguucaacgccacccgguucgccagcguguacgccuggaaccggaagcggaucagcaacugcguggccgacuacagcgugcuguacaacagcgccagcuucagcaccuucaagugcuacggcgugagcccuaccaagcugaacgaccugugcuucaccaacguguacgcugacagcuucgugauccggggcgacgaggugcggcagaucgcccccggccagaccggcaagaucgccgacuacaacuacaagcugcccgacgacuucaccggcugcgugaucgccuggaacagcaacaaccuggacagcaaggugggcggcaacuacaacuaccuguaccggcuguuccguaagagcaaccugaagccauucgagcgggacaucagcaccgagaucuaccaggccggcagcacccccugcaacgguguggagggcuuuaacugcuacuucccccugcagagcuacggcuuccagcccaccaacggcgugggcuaccagcccuaccgggugguggugcugagcuucgagcugcugcacgcccccgccaccgugugcggcccuaaaaagagcaccaaccuggugaagaacaagugcgugaacuucaauuucaacggccugaccggcaccggcgugcugaccgagagcaacaagaaguuccugcccuuccagcaguucggccgggauaucgccgacaccaccgacgcagugcgggacccccagacccuggagauccuggacaucaccccaugcagcuucggcggcgugagcgucaucacccccggcacaaacaccagcaaccagguggccgugcuguaccagggagugaacugcaccgaggugcccguggccauccacgccgaccagcugacccccaccuggcggguguacagcaccggcagcaacguguuccagacccgggccggcugccugaucggcgccgagcacgugaacaacuccuacgagugcgacauccccaucggcgcuggcaucugcgccagcuaccagacccagaccaacagcccccggcgggcccggagcguggccagccagagcgugaucgccuacaccaugagcuuaggcgccgagaacagcguggccuacagcaacaacagcaucgcgaucccuaccaacuucaccaucagcgugaccaccgagauccugcccgugagcaugaccaagaccagcguggacuguaccauguacauaugcggcgacagcaccgagugcagcaaccugcugcugcaguacggcagcuucugcacccagcugaaccgggcccugaccggcaucgccguggagcaggacaagaacacccaagagguguucgcccaggugaagcagaucuacaagacucccccaaucaaggacuucggcggcuucaacuucagccagauccugcccgaccccagcaagcccagcaagcggagcuucaucgaggaccugcuguucaacaaggugacccuggccgacgccggcuucaucaagcaguacggcgacugccugggggauaucgccgcucgggaccugaucugcgcccagaaguucaacggccugaccgugcugcccccucugcugaccgacgagaugaucgcccaguacaccagcgcccugcuugccggcaccaucaccagcggcuggaccuucggcgccggcgcagcccugcagauccccuucgccaugcagauggccuaccgguucaacggcaucggcgugacccagaacgugcuguacgagaaccagaagcugaucgccaaccaguucaacagcgccaucggcaagauccaggacagccugagcagcaccgccagcgcccugggcaagcugcaggacguggugaaccagaacgcucaggcccugaacacccuggugaagcagcugagcagcaacuucggcgccaucagcucagugcugaaugacauccugagcaggcuggaucccccagaggccgaggugcagaucgaccggcugaucaccggccggcugcagagccugcagaccuacgugacccagcagcugauccgggccgccgagauccgggccagcgccaaccuggcagccaccaagaugagcgagugcgugcugggccagagcaagcggguggacuuuugcggcaagggcuaccaccugaugagcuucccccagagcgcuccccacggcgugguguuccuccacgucacauacgugcccgcccaggagaagaacuucaccaccgcccccgccaucugccacgacggcaaggcccacuucccccgggagggaguguucgugagcaacggcacccacugguucgugacccagcggaacuucuacgagccucagauuaucaccaccgacaacaccuucgugagcggcaacugcgacguggugaucggcaucgugaacaacaccguguacgacccccugcagcccgagcuggacagcuucaaggaggagcuggacaaguacuucaagaaccacaccagcccagacguggaccugggcgacaucagcggcaucaacgccagcguggugaacauccagaaggagaucgaccggcugaacgagguggccaagaaccugaacgagagccugaucgaccugcaggagcugggcaaguacgagcaguacaucaaguggcccugguacaucuggcugggcuucaucgccggccugaucgccaucgugauggugaccaucaugcugugcugcaugaccagcugcuguagcugccugaagggcugcugcagcugcggcagcugcugcaaguucgacgaggacgacagcgagcccgugcugaagggcgugaagcugcacuacaccugaggacuagucccuguucccagagcccacuuuuuuuucuuuuuuugaaauaaaauagccugucuuucagaucucaaaggcucuuuucagagccaccaaaaaaaaaaaaaaaaaaaaaaaaaaaaaaaaaaaaaaaaaaaaaaaaaaaaaaaaaaaaaaaaaaaaaaaaaaaaaaaaaaaaaaaaaaaaaaaaaaaaa

SEQ ID NO: 23580 - RNA, 4094 nt, Artificial Sequence
  SARS-CoV-2/Wuhan/WIV05/2019__EPI_ISL_402128 spike protein mRNA gc (1-1273)(K986P_V987P_D614G_M1229I)
aggagagucccgcagucggcguccagcggcucugcuuguucgugugugugucguugcaggccuuauucaagcuuaccauguucguguuccuggugcugcugccccuggugagcagccagugcgugaaccugaccacccggacccagcugcccccugccuacaccaacagcuucacccggggcguguacuaccccgacaagguguuccggagcagcgugcugcacagcacccaggaccuguuccugcccuucuucagcaacgugaccugguuccacgccauccacgugagcggcaccaacggcaccaagcgguucgacaacccagugcugcccuucaacgacggcguguacuucgccagcaccgagaagucaaacaucauccggggcuggaucuucggcaccacccuggacagcaagacacagagccugcugaucgugaacaacgccaccaacguggugaucaaggugugcgaguuucaguucugcaacgaccccuuccugggcguguacuaccacaagaacaacaagagcuggauggagagcgaguuccgggucuacagcagcgcuaacaauugcaccuucgaguacgugagccagcccuuccugauggaccucgagggcaagcagggcaacuucaagaaccugcgggaguucguguucaagaacaucgauggcuacuucaagaucuacagcaagcacacccccaucaaccuggugcgggaccugccccagggauucagcgcccuggagccucugguggaccugcccaucggcaucaacaucaccagguuccagacccugcuggcccugcaccggagcuaccugacccccggcgacagcagcagcggcuggaccgccggcgccgccgcauacuacgugggcuaccugcagccacggaccuuccugcugaaguacaacgagaacggcaccaucaccgacgccguggacugcgcccuggacccccugagcgagaccaagugcacccuaaagagcuucaccguggagaagggcaucuaccagaccagcaacuuccgggugcagcccacugagagcaucgugcgguuccccaacauuaccaaccugugucccuucggcgagguguucaacgccacccgguucgccagcguguacgccuggaaccggaagcggaucagcaacugcguggccgacuacagcgugcuguacaacagcgccagcuucagcaccuucaagugcuacggcgugagcccuaccaagcugaacgaccugugcuucaccaacguguacgcugacagcuucgugauccggggcgacgaggugcggcagaucgcccccggccagaccggcaagaucgccgacuacaacuacaagcugcccgacgacuucaccggcugcgugaucgccuggaacagcaacaaccuggacagcaaggugggcggcaacuacaacuaccuguaccggcuguuccguaagagcaaccugaagccauucgagcgggacaucagcaccgagaucuaccaggccggcagcacccccugcaacgguguggagggcuuuaacugcuacuucccccugcagagcuacggcuuccagcccaccaacggcgugggcuaccagcccuaccgggugguggugcugagcuucgagcugcugcacgcccccgccaccgugugcggcccuaaaaagagcaccaaccuggugaagaacaagugcgugaacuucaauuucaacggccugaccggcaccggcgugcugaccgagagcaacaagaaguuccugcccuuccagcaguucggccgggauaucgccgacaccaccgacgcagugcgggacccccagacccuggagauccuggacaucaccccaugcagcuucggcggcgugagcgucaucacccccggcacaaacaccagcaaccagguggccgugcuguaccagggagugaacugcaccgaggugcccguggccauccacgccgaccagcugacccccaccuggcggguguacagcaccggcagcaacguguuccagacccgggccggcugccugaucggcgccgagcacgugaacaacuccuacgagugcgacauccccaucggcgcuggcaucugcgccagcuaccagacccagaccaacagcccccggcgggcccggagcguggccagccagagcaucaucgccuacaccaugagcuuaggcgccgagaacagcguggccuacagcaacaacagcaucgcgaucccuaccaacuucaccaucagcgugaccaccgagauacugcccgugagcaugaccaagaccagcguggacuguaccauguacaucugcggcgacagcaccgagugcagcaaccugcugcugcaguacggcagcuucugcacccagcugaaccgggcccugaccggcaucgccguggagcaggacaagaacacccaagagguguucgcccaggugaagcagaucuacaagacucccccaaucaaggacuucggcggcuucaacuucagccagauccugcccgaccccagcaagcccagcaagcggagcuucaucgaggaccugcuguucaacaaggugacccuggccgacgccggcuucaucaagcaguacggcgacugccugggggauaucgccgcucgggaccugaucugcgcccagaaguucaacggccugaccgugcugcccccucugcugaccgacgagaugaucgcccaguacaccagcgcccugcuugccggcaccaucaccagcggcuggaccuucggcgccggcgcagcccugcagauccccuucgccaugcagauggccuaccgguucaacggcaucggcgugacccagaacgugcuguacgagaaccagaagcugaucgccaaccaguucaacagcgccaucggcaagauccaggacagccugagcagcaccgccagcgcccugggcaagcugcaggacguggugaaccagaacgcucaggcccugaacacccuggugaagcagcugagcagcaacuucggcgccaucagcucagugcugaaugacauccugagcaggcuggaucccccagaggccgaggugcagaucgaccggcugaucaccggccggcugcagagccugcagaccuacgugacccagcagcugauccgggccgccgagauccgggccagcgccaaccuggcagccaccaagaugagcgagugcgugcugggccagagcaagcggguggacuuuugcggcaagggcuaccaccugaugagcuucccccagagcgcuccccacggcgugguguuccuccacgugacauacguccccgcccaggagaagaacuucaccaccgcccccgccauuugccacgacggcaaggcccacuucccccgggagggaguguucgugagcaacggcacccacugguucgugacccagcggaacuucuacgagccucagaucaucaccaccgacaacaccuucgugagcggcaacugcgacguggugaucggcaucgugaacaacaccguguacgacccccugcagcccgagcuggacagcuucaaggaggagcuggacaaguacuucaagaaccacaccagcccagacguggaccugggcgacaucagcggcaucaacgccagcguggugaacauccagaaggagaucgaccggcugaacgagguggccaagaaccugaacgagagccugaucgaccugcaggagcugggcaaguacgagcaguacaucaaguggcccugguacaucuggcugggcuucaucgccggccugaucgccaucgugaucgugaccaucaugcugugcugcaugaccagcugcuguagcugccugaagggcugcugcagcugcggcagcugcugcaaguucgacgaggacgacagcgagcccgugcugaagggcgugaagcugcacuacaccugaggacuagucccuguucccagagcccacuuuuuuuucuuuuuuugaaauaaaauagccugucuuucagaucucaaaggcucuuuucagagccaccaaaaaaaaaaaaaaaaaaaaaaaaaaaaaaaaaaaaaaaaaaaaaaaaaaaaaaaaaaaaaaaaaaaaaaaaaaaaaaaaaaaaaaaaaaaaaaaaaaaaa

SEQ ID NO: 23581 - RNA, 4088 nt, Artificial Sequence
  SARS-CoV-2/Wuhan/WIV05/2019__EPI_ISL_402128 spike protein mRNA gc (1-1273)(K986P_V987P_H69del_V70del_A222V_Y453F_S477N_D614G_I692V)
aggagagucccgcagucggcguccagcggcucugcuuguucgugugugugucguugcaggccuuauucaagcuuaccauguucguguuccuggugcugcugccccuggugagcagccagugcgugaaccugaccacccggacccagcugcccccugccuacaccaacagcuucacccggggcguguacuaccccgacaagguguuccggagcagcgugcugcacagcacccaggaccuguuccugcccuucuucagcaacgugaccugguuccacgccaucagcggcaccaacggcaccaagcgguucgacaacccagugcugcccuucaacgacggcguguacuucgccagcaccgagaagucaaacaucauccggggcuggaucuucggcaccacccuggacagcaagacacagagccugcugaucgugaacaacgccaccaacguggugaucaaggugugcgaguuucaguucugcaacgaccccuuccugggcguguacuaccacaagaacaacaagagcuggauggagagcgaguuccggguguacagcagcgcuaacaauugcaccuucgaguacgucagccagcccuuccugauggaccucgagggcaagcagggcaacuucaagaaccugcgggaguucguguucaagaacaucgauggcuacuucaagaucuacagcaagcacacccccaucaaccuggugcgggaccugccccagggauucagcgugcuggagccucugguggaccugcccaucggcaucaacaucaccagguuccagacccugcuggcccugcaccggagcuaccugacccccggcgacagcagcagcggcuggaccgccggcgccgccgccuacuacgugggcuaccugcagccacggaccuuccugcugaaguacaacgagaacggcaccaucaccgacgcaguggacugcgcccuggacccccugagcgagaccaagugcacccuaaagagcuucaccguggagaagggcaucuaccagaccagcaacuuccgggugcagcccacugagagcaucgugcgguuccccaacauuaccaaccugugucccuucggcgagguguucaacgccacccgguucgccagcguguacgccuggaaccggaagcggaucagcaacugcguggccgacuacagcgugcuguacaacagcgccagcuucagcaccuucaagugcuacggcgugagcccuaccaagcugaacgaccugugcuucaccaacguguacgccgacagcuucgugauccggggcgacgaggugcggcagaucgcucccggccagaccggcaagaucgccgacuacaacuacaagcugcccgacgacuucaccggcugcgugaucgccuggaacagcaacaaccuggacagcaaggugggcggcaacuacaacuaccuguuccggcuguuccguaagagcaaccugaagccauuugagcgggacaucagcaccgagaucuaccaggccggcaacacccccugcaacgguguggagggcuucaacugcuacuucccccugcagagcuacggcuuccagcccaccaacggcgugggcuaccagcccuaccgggugguggugcugagcuucgagcugcugcacgcccccgccaccgugugcggcccuaaaaagagcaccaaccuggugaagaacaagugcgugaauuucaacuucaacggccugaccggcaccggcgugcugaccgagagcaacaagaaguuccugcccuuccagcaguucggccgggauaucgccgacaccaccgacgccgugcgggacccccagacccuggagauccuggacaucaccccaugcagcuucggcggcgugagcgucaucacccccggcacaaacaccagcaaccagguggcagugcuguaccagggagugaacugcaccgaggugcccguggccauccacgccgaccagcugacccccaccuggcggguguacagcaccggcagcaacguguuccagacccgggccggcugccugaucggcgccgagcacgugaacaacagcuacgagugcgacauccccaucggcgccggcaucugcgcuuccuaccagacccagaccaacagcccccggcgggcccggagcguggccagccagagcgugaucgccuacaccaugagcuuaggcgccgagaacagcguggccuacagcaacaacagcaucgccaucccuaccaacuucaccaucagcgugaccaccgagauccugcccgugagcaugaccaagaccagcguggacuguaccauguacauaugcggcgacagcaccgagugcagcaaccugcugcugcaguacggcagcuucugcacccagcugaaccgggcgcugaccggcaucgccguggagcaggacaagaacacccaagagguguucgcccaggugaagcagaucuacaagacucccccaaucaaggacuucggcggcuucaacuucagccagauccugcccgaccccagcaagcccagcaagcggagcuucaucgaggaccugcuguucaacaaggugacccuggccgacgccggcuucaucaagcaguacggcgacugccugggggauaucgccgcccgggaccugaucugcgcucagaaguucaacggccugaccgugcugcccccucugcugaccgacgagaugaucgcccaguacaccagcgcccugcuugccggcaccaucaccagcggcuggaccuucggcgccggcgccgcacugcagauccccuucgccaugcagauggccuaccgguucaacggcaucggcgugacccagaacgugcuguacgagaaccagaagcugaucgccaaccaguucaacagcgccaucggcaagauccaggacagccugagcagcaccgccagcgcccugggcaagcugcaggacguggugaaccagaacgcccaggcucugaacacccuggugaagcagcugagcagcaauuuuggcgccaucagcagcgugcugaacgacauccugucaaggcuggaucccccagaggccgaggugcagaucgaccggcugaucaccggccggcugcagagccugcagaccuacgugacccagcagcugauccgggccgccgagauccgggccagcgccaaccuggccgcaaccaagaugagcgagugcgugcugggccagagcaagcggguggacuucugcggcaagggcuaccaccugaugagcuucccccagagcgcuccccacggcgugguguuccuccacgucacauacgugcccgcccaggagaagaacuucaccaccgcccccgccaucugccacgacggcaaggcccacuucccccgggagggaguguucgugagcaacggcacccacugguucgugacccagcggaacuucuacgagccucagauuaucaccaccgacaacaccuucgugagcggcaacugcgacguggugaucggcaucgugaacaacaccguguacgacccccugcagcccgagcuggacagcuucaaggaggagcuggacaaguacuucaagaaccacaccagcccagacguggaccugggcgacaucagcggcaucaacgccagcguggugaacauccagaaggagaucgaccggcugaacgagguggccaagaaccugaacgagagccugaucgaccugcaggagcugggcaaguacgagcaguacaucaaguggcccugguacaucuggcugggcuucaucgccggccugaucgccaucgugauggugaccaucaugcugugcugcaugaccagcugcuguagcugccugaagggcugcugcagcugcggcagcugcugcaaguucgacgaggacgacagcgagcccgugcugaagggcgugaagcugcacuacaccugaggacuagucccuguucccagagcccacuuuuuuuucuuuuuuugaaauaaaauagccugucuuucagaucucaaaggcucuuuucagagccaccaaaaaaaaaaaaaaaaaaaaaaaaaaaaaaaaaaaaaaaaaaaaaaaaaaaaaaaaaaaaaaaaaaaaaaaaaaaaaaaaaaaaaaaaaaaaaaaaaaaaa

SEQ ID NO: 23582 - RNA, 4088 nt, Artificial Sequence
  SARS-CoV-2/Wuhan/WIV05/2019__EPI_ISL_402128 spike protein mRNA gc (1-1273)(K986P_V987P_H69del_V70del_Y453F_D614G_I692V_M1229I)
aggagagucccgcagucggcguccagcggcucugcuuguucgugugugugucguugcaggccuuauucaagcuuaccauguucguguuccuggugcugcugccccuggugagcagccagugcgugaaccugaccacccggacccagcugcccccugccuacaccaacagcuucacccggggcguguacuaccccgacaagguguuccggagcagcgugcugcacagcacccaggaccuguuccugcccuucuucagcaacgugaccugguuccacgccaucagcggcaccaacggcaccaagcgguucgacaacccagugcugcccuucaacgacggcguguacuucgccagcaccgagaagucaaacaucauccggggcuggaucuucggcaccacccuggacagcaagacacagagccugcugaucgugaacaacgccaccaacguggugaucaaggugugcgaguuucaguucugcaacgaccccuuccugggcguguacuaccacaagaacaacaagagcuggauggagagcgaguuccggguguacagcagcgcuaacaauugcaccuucgaguacgucagccagcccuuccugauggaccucgagggcaagcagggcaacuucaagaaccugcgggaguucguguucaagaacaucgauggcuacuucaagaucuacagcaagcacacccccaucaaccuggugcgggaccugccccagggauucagcgcccuggagccucugguggaccugcccaucggcaucaacaucaccagguuccagacccugcuggcccugcaccggagcuaccugacccccggcgacagcagcagcggcuggaccgccggcgccgccgcauacuacgugggcuaccugcagccacggaccuuccugcugaaguacaacgagaacggcaccaucaccgacgccguggacugcgcccuggacccccugagcgagaccaagugcacccuaaagagcuucaccguggagaagggcaucuaccagaccagcaacuuccgggugcagcccacugagagcaucgugcgguuccccaacauuaccaaccugugucccuucggcgagguguucaacgccacccgguucgccagcguguacgccuggaaccggaagcggaucagcaacugcguggccgacuacagcgugcuguacaacagcgccagcuucagcaccuucaagugcuacggcgugagcccuaccaagcugaacgaccugugcuucaccaacguguacgcugacagcuucgugauccggggcgacgaggugcggcagaucgcccccggccagaccggcaagaucgccgacuacaacuacaagcugcccgacgacuucaccggcugcgugaucgccuggaacagcaacaaccuggacagcaaggugggcggcaacuacaacuaccuguuccggcuguuccguaagagcaaccugaagccauuugagcgggacaucagcaccgagaucuaccaggccggcagcacccccugcaacgguguggagggcuucaacugcuacuucccccugcagagcuacggcuuccagcccaccaacggcgugggcuaccagcccuaccgggugguggugcugagcuucgagcugcugcacgcccccgccaccgugugcggcccuaaaaagagcaccaaccuggugaagaacaagugcgugaacuucaauuucaacggccugaccggcaccggcgugcugaccgagagcaacaagaaguuccugcccuuccagcaguucggccgggauaucgccgacaccaccgacgcagugcgggacccccagacccuggagauccuggacaucaccccaugcagcuucggcggcgugagcgugaucacccccggcacaaacaccagcaaccaggucgccgugcuguaccagggagugaacugcaccgaggugcccguggccauccacgccgaccagcugacccccaccuggcggguguacagcaccggcagcaacguguuccagacccgggccggcugccugaucggcgccgagcacgugaacaacuccuacgagugcgacauccccaucggcgcuggcaucugcgccagcuaccagacccagaccaacagcccccggcgggcccggagcguggccagccagagcgugaucgccuacaccaugagcuuaggcgccgagaacagcguggccuacagcaacaacagcaucgcgaucccuaccaacuucaccaucagcgugaccaccgagauccugcccgugagcaugaccaagaccagcguggacuguaccauguacauaugcggcgacagcaccgagugcagcaaccugcugcugcaguacggcagcuucugcacccagcugaaccgggcccugaccggcaucgccguggagcaggacaagaacacccaagagguguucgcccaggugaagcagaucuacaagacucccccaaucaaggacuucggcggcuucaacuucagccagauccugcccgaccccagcaagcccagcaagcggagcuucaucgaggaccugcuguucaacaaggugacccuggccgacgccggcuucaucaagcaguacggcgacugccugggggauaucgccgcucgggaccugaucugcgcccagaaguucaacggccugaccgugcugcccccucugcugaccgacgagaugaucgcccaguacaccagcgcccugcuugccggcaccaucaccagcggcuggaccuucggcgccggcgcagcccugcagauccccuucgccaugcagauggccuaccgguucaacggcaucggcgugacccagaacgugcuguacgagaaccagaagcugaucgccaaccaguucaacagcgccaucggcaagauccaggacagccugagcagcaccgccagcgcccugggcaagcugcaggacguggugaaccagaacgcucaggcccugaacacccuggugaagcagcugagcagcaacuuuggcgccaucagcucagugcugaaugacauccugagcaggcuggaucccccagaggccgaggugcagaucgaccggcugaucaccggccggcugcagagccugcagaccuacgugacccagcagcugauccgggccgccgagauccgggccagcgccaaccuggcagccaccaagaugagcgagugcgugcugggccagagcaagcggguggacuucugcggcaagggcuaccaccugaugagcuucccccagagcgcuccccacggcgugguguuccuccacgugacauacguccccgcccaggagaagaacuucaccaccgcccccgccaucugccacgacggcaaggcccacuucccccgggagggaguguucgugagcaacggcacccacugguucgugacccagcggaacuucuacgagccucagauuaucaccaccgacaacaccuucgugagcggcaacugcgacguggugaucggcaucgugaacaacaccguguacgacccccugcagcccgagcuggacagcuucaaggaggagcuggacaaguacuucaagaaccacaccagcccagacguggaccugggcgacaucagcggcaucaacgccagcguggugaacauccagaaggagaucgaccggcugaacgagguggccaagaaccugaacgagagccugaucgaccugcaggagcugggcaaguacgagcaguacaucaaguggcccugguacaucuggcugggcuucaucgccggccugaucgccaucgugaucgugaccaucaugcugugcugcaugaccagcugcuguagcugccugaagggcugcugcagcugcggcagcugcugcaaguucgacgaggacgacagcgagcccgugcugaagggcgugaagcugcacuacaccugaggacuagucccuguucccagagcccacuuuuuuuucuuuuuuugaaauaaaauagccugucuuucagaucucaaaggcucuuuucagagccaccaaaaaaaaaaaaaaaaaaaaaaaaaaaaaaaaaaaaaaaaaaaaaaaaaaaaaaaaaaaaaaaaaaaaaaaaaaaaaaaaaaaaaaaaaaaaaaaaaaaaa

SEQ ID NO: 23583 - RNA, 4085 nt, Artificial Sequence
  SARS-CoV-2/Wuhan/WIV05/2019__EPI_ISL_402128 spike protein mRNA gc (1-1273)(K986P_V987P_K986P_V987P_H69del_V70del_Y144del_N501Y_A570 D_D614G_P681H_T716I_S982A_D1118H)
aggagagucccgcagucggcguccagcggcucugcuuguucgugugugugucguugcaggccuuauucaagcuuaccauguucguguuccuggugcugcugccccuggugagcagccagugcgugaaccugaccacccggacccagcugcccccugccuacaccaacagcuucacccggggcguguacuaccccgacaagguguuccggagcagcgugcugcacagcacccaggaccuguuccugcccuucuucagcaacgugaccugguuccacgccaucagcggcaccaacggcaccaagcgguucgacaacccagugcugcccuucaacgacggcguguacuucgccagcaccgagaagucaaacaucauccggggcuggaucuucggcaccacccuggacagcaagacacagagccugcugaucgugaacaacgccaccaacguggugaucaaggugugcgaguuucaguucugcaacgaccccuuccugggcguguaccacaagaacaacaagagcuggauggagagcgaguuccggguguacagcagcgcuaacaauugcaccuucgaguacgucagccagcccuuccugauggaccucgagggcaagcagggcaacuucaagaaccugcgggaguucguguucaagaacaucgauggcuacuucaagaucuacagcaagcacacccccaucaaccuggugcgggaccugccccagggauucagcgcccuggagccucugguggaccugcccaucggcaucaacaucaccagguuccagacccugcuggcccugcaccggagcuaccugacccccggcgacagcagcagcggcuggaccgccggcgccgccgcauacuacgugggcuaccugcagccacggaccuuccugcugaaguacaacgagaacggcaccaucaccgacgccguggacugcgcccuggacccccugagcgagaccaagugcacccuaaagagcuucaccguggagaagggcaucuaccagaccagcaacuuccgggugcagcccacugagagcaucgugcgguuccccaacauuaccaaccugugucccuucggcgagguguucaacgccacccgguucgccagcguguacgccuggaaccggaagcggaucagcaacugcguggccgacuacagcgugcuguacaacagcgccagcuucagcaccuucaagugcuacggcgugagcccuaccaagcugaacgaccugugcuucaccaacguguacgcugacagcuucgugauccggggcgacgaggugcggcagaucgcccccggccagaccggcaagaucgccgacuacaacuacaagcugcccgacgacuucaccggcugcgugaucgccuggaacagcaacaaccuggacagcaaggugggcggcaacuacaacuaccuguaccggcuguuccguaagagcaaccugaagccauucgagcgggacaucagcaccgagaucuaccaggccggcagcacccccugcaacgguguggagggcuuuaacugcuacuucccccugcagagcuacggcuuccagcccaccuacggcgugggcuaccagcccuaccgggugguggugcugagcuucgagcugcugcacgcccccgccaccgugugcggcccuaaaaagagcaccaaccuggugaagaacaagugcgugaacuucaacuucaauggccugaccggcaccggcgugcugaccgagagcaacaagaaguuccugcccuuccagcaguucggccgggauaucgacgacaccaccgacgccgugcgggacccccagacccuggagauccuggacaucaccccaugcagcuucggcggcgugagcgugaucacccccggcacaaacaccagcaaccaggucgcagugcuguaccagggagugaacugcaccgaggugcccguggccauccacgccgaccagcugacccccaccuggcggguguacagcaccggcagcaacguguuccagacccgggccggcugccugaucggcgccgagcacgugaacaacuccuacgagugcgacauccccaucggcgccggcaucugcgcuagcuaccagacccagaccaacagccaccggcgggcccggagcguggccagccagagcaucaucgccuacaccaugagcuuaggcgccgagaacagcguggccuacagcaacaacagcaucgccauccccaucaacuucaccauaagcgugaccaccgagauccugccugugagcaugaccaagaccagcguggacuguaccauguacaucugcggcgacagcaccgagugcagcaaccugcugcugcaguacggcagcuucugcacccagcugaaccgggcgcugaccggcaucgccguggagcaggacaagaacacccaagagguguucgcccaggugaagcagaucuacaagaccccacccaucaaggacuucggcggcuucaacuucagccagauccugcccgaccccagcaagcccagcaagcggagcuucaucgaggaccugcuguucaacaaggugacucuggccgacgccggcuucaucaagcaguacggcgauugccugggggacaucgccgcccgggaccugaucugcgcucagaaguucaacggccugaccgugcugccuccccugcugaccgacgagaugaucgcccaguacaccagcgcccugcuugccggcaccaucaccagcggcuggaccuucggcgccggcgccgcacugcagauccccuucgccaugcagauggccuaccgguucaacggcaucggcgugacccagaacgugcuguacgagaaccagaagcugaucgccaaccaguucaacagcgccaucggcaagauccaggacagccugagcagcaccgccagcgcccugggcaagcugcaggacguggugaaccagaacgcccaggcucugaacacccuggugaagcagcugagcagcaacuucggcgccaucagcucagugcugaacgacauccuggccaggcuggacccacccgaggccgaggugcagaucgaccggcugaucaccggccggcugcagagccugcagaccuacgugacccagcagcugauccgggccgccgagauucgggccagcgccaaucuggcagccaccaagaugagcgagugcgugcugggccagagcaagcggguggacuuuugcggcaagggcuaccaccugaugagcuucccccagagcgcuccccacggcgugguguuccuccacgugaccuacgugcccgcccaggagaagaacuucacaaccgcccccgccaucugccacgacggcaaggcccacuucccccgggagggagucuucgugagcaacggcacccacugguucgugacccagcggaacuucuacgagccccagaucaucaccacccacaacaccuucgugagcggcaacugcgacguggugaucggcaucgugaacaacaccguguacgacccucugcagcccgagcuggacagcuucaaggaggagcuggacaaguacuucaagaaccacaccagccccgacguggaucugggcgacaucagcggcaucaacgccagcguggugaacauccagaaggagaucgaccggcugaacgagguggccaagaaccugaacgagagccugaucgaccugcaggagcugggcaaguacgagcaguacaucaaguggccaugguacaucuggcugggcuucaucgccggccugaucgccaucgugauggugaccaucaugcugugcugcaugaccagcugcuguagcugccugaagggcugcugcagcugcggcagcugcugcaaguucgacgaggacgacagcgagcccgugcugaagggcgugaagcugcacuacaccugaggacuagucccuguucccagagcccacuuuuuuuucuuuuuuugaaauaaaauagccugucuuucagaucucaaaggcucuuuucagagccaccaaaaaaaaaaaaaaaaaaaaaaaaaaaaaaaaaaaaaaaaaaaaaaaaaaaaaaaaaaaaaaaaaaaaaaaaaaaaaaaaaaaaaaaaaaaaaaaaaaaaa

SEQ ID NO: 23584 - RNA, 4094 nt, Artificial Sequence
  SARS-CoV-2/Wuhan/WIV05/2019__EPI_ISL_402128 spike protein mRNA gc (1-1273)(K986P_V987P_K986P_V987P_K417N_E484K_N501Y_D614G)
aggagagucccgcagucggcguccagcggcucugcuuguucgugugugugucguugcaggccuuauucaagcuuaccauguucguguuccuggugcugcugccccuggugagcagccagugcgugaaccugaccacccggacccagcugcccccugccuacaccaacagcuucacccggggcguguacuaccccgacaagguguuccggagcagcgugcugcacagcacccaggaccuguuccugcccuucuucagcaacgugaccugguuccacgccauccacgugagcggcaccaacggcaccaagcgguucgacaacccagugcugcccuucaacgacggcguguacuucgccagcaccgagaagucaaacaucauccggggcuggaucuucggcaccacccuggacagcaagacacagagccugcugaucgugaacaacgccaccaacguggugaucaaggugugcgaguuucaguucugcaacgaccccuuccugggcguguacuaccacaagaacaacaagagcuggauggagagcgaguuccgggucuacagcagcgcuaacaauugcaccuucgaguacgugagccagcccuuccugauggaccucgagggcaagcagggcaacuucaagaaccugcgggaguucguguucaagaacaucgauggcuacuucaagaucuacagcaagcacacccccaucaaccuggugcgggaccugccccagggauucagcgcccuggagccucugguggaccugcccaucggcaucaacaucaccagguuccagacccugcuggcccugcaccggagcuaccugacccccggcgacagcagcagcggcuggaccgccggcgccgccgcauacuacgugggcuaccugcagccacggaccuuccugcugaaguacaacgagaacggcaccaucaccgacgccguggacugcgcccuggacccccugagcgagaccaagugcacccuaaagagcuucaccguggagaagggcaucuaccagaccagcaacuuccgggugcagcccacugagagcaucgugcgguuccccaacauuaccaaccugugucccuucggcgagguguucaacgccacccgguucgccagcguguacgccuggaaccggaagcggaucagcaacugcguggccgacuacagcgugcuguacaacagcgccagcuucagcaccuucaagugcuacggcgugagcccuaccaagcugaacgaccugugcuucaccaacguguacgcugacagcuucgugauccggggcgacgaggugcggcagaucgcccccggccagaccggcaacaucgccgacuacaacuacaagcugcccgacgacuucaccggcugcgugaucgccuggaacagcaacaaccuggacagcaaggugggcggcaacuacaacuaccuguaccggcuguuccguaagagcaaccugaagccauucgagcgggacaucagcaccgagaucuaccaggccggcagcacccccugcaacggugugaagggcuuuaacugcuacuucccccugcagagcuacggcuuccagcccaccuacggcgugggcuaccagcccuaccgggugguggugcugagcuucgagcugcugcacgcccccgccaccgugugcggcccuaaaaagagcaccaaccuggugaagaacaagugcgugaacuucaauuucaacggccugaccggcaccggcgugcugaccgagagcaacaagaaguuccugcccuuccagcaguucggccgggauaucgccgacaccaccgacgcagugcgggacccccagacccuggagauccuggacaucaccccaugcagcuucggcggcgugagcgucaucacccccggcacaaacaccagcaaccagguggccgugcuguaccagggagugaacugcaccgaggugcccguggccauccacgccgaccagcugacccccaccuggcggguguacagcaccggcagcaacguguuccagacccgggccggcugccugaucggcgccgagcacgugaacaacuccuacgagugcgacauccccaucggcgcuggcaucugcgccagcuaccagacccagaccaacagcccccggcgggcccggagcguggccagccagagcaucaucgccuacaccaugagcuuaggcgccgagaacagcguggccuacagcaacaacagcaucgcgaucccuaccaacuucaccaucagcgugaccaccgagauacugcccgugagcaugaccaagaccagcguggacuguaccauguacaucugcggcgacagcaccgagugcagcaaccugcugcugcaguacggcagcuucugcacccagcugaaccgggcccugaccggcaucgccguggagcaggacaagaacacccaagagguguucgcccaggugaagcagaucuacaagacucccccaaucaaggacuucggcggcuucaacuucagccagauccugcccgaccccagcaagcccagcaagcggagcuucaucgaggaccugcuguucaacaaggugacccuggccgacgccggcuucaucaagcaguacggcgacugccugggggauaucgccgcucgggaccugaucugcgcccagaaguucaacggccugaccgugcugcccccucugcugaccgacgagaugaucgcccaguacaccagcgcccugcuugccggcaccaucaccagcggcuggaccuucggcgccggcgcagcccugcagauccccuucgccaugcagauggccuaccgguucaacggcaucggcgugacccagaacgugcuguacgagaaccagaagcugaucgccaaccaguucaacagcgccaucggcaagauccaggacagccugagcagcaccgccagcgcccugggcaagcugcaggacguggugaaccagaacgcucaggcccugaacacccuggugaagcagcugagcagcaacuucggcgccaucagcucagugcugaaugacauccugagcaggcuggaucccccagaggccgaggugcagaucgaccggcugaucaccggccggcugcagagccugcagaccuacgugacccagcagcugauccgggccgccgagauccgggccagcgccaaccuggcagccaccaagaugagcgagugcgugcugggccagagcaagcggguggacuuuugcggcaagggcuaccaccugaugagcuucccccagagcgcuccccacggcgugguguuccuccacgugacauacguccccgcccaggagaagaacuucaccaccgcccccgccauuugccacgacggcaaggcccacuucccccgggagggaguguucgugagcaacggcacccacugguucgugacccagcggaacuucuacgagccucagaucaucaccaccgacaacaccuucgugagcggcaacugcgacguggugaucggcaucgugaacaacaccguguacgacccccugcagcccgagcuggacagcuucaaggaggagcuggacaaguacuucaagaaccacaccagcccagacguggaccugggcgacaucagcggcaucaacgccagcguggugaacauccagaaggagaucgaccggcugaacgagguggccaagaaccugaacgagagccugaucgaccugcaggagcugggcaaguacgagcaguacaucaaguggcccugguacaucuggcugggcuucaucgccggccugaucgccaucgugauggugaccaucaugcugugcugcaugaccagcugcuguagcugccugaagggcugcugcagcugcggcagcugcugcaaguucgacgaggacgacagcgagcccgugcugaagggcgugaagcugcacuacaccugaggacuagucccuguucccagagcccacuuuuuuuucuuuuuuugaaauaaaauagccugucuuucagaucucaaaggcucuuuucagagccaccaaaaaaaaaaaaaaaaaaaaaaaaaaaaaaaaaaaaaaaaaaaaaaaaaaaaaaaaaaaaaaaaaaaaaaaaaaaaaaaaaaaaaaaaaaaaaaaaaaaaa

SEQ ID NO: 23585 - RNA, 4085 nt, Artificial Sequence
  SARS-CoV-2/Wuhan/WIV05/2019__EPI_ISL_402128 spike protein mRNA gc (1-1273)(K986P_V987P_K986P_V987P_L18F_D80A_D215G_L242del_A243del_ L244del_R246I_K417N_E484K_N501Y_D614G_A701V)
aggagagucccgcagucggcguccagcggcucugcuuguucgugugugugucguugcaggccuuauucaagcuuaccauguucguguuccuggugcugcugccccuggugagcagccagugcgugaacuucaccacccggacccagcugcccccugccuacaccaacagcuucacccggggcguguacuaccccgacaagguguuccggagcagcgugcugcacagcacccaggaccuguuccugcccuucuucagcaacgugaccugguuccacgccauccacgugagcggcaccaacggcaccaagcgguucgccaacccagugcugcccuucaacgacggcguguacuucgccagcaccgagaagucaaacaucauccggggcuggaucuuuggcaccacccuggacagcaagacacagagccugcugaucgugaacaacgcuaccaacguggugaucaaggugugcgaguuccaguucugcaacgaccccuuccugggcguguacuaccacaagaacaacaagagcuggauggagagcgaguuccgggucuacagcagcgccaacaauugcaccuucgaguacgugagccagcccuuccugauggaccuggagggcaagcagggcaacuucaagaaccuccgggaguucguguucaagaacaucgacggcuacuucaagaucuacagcaagcacacccccaucaaccuggugcggggacugccccagggcuucagcgcccuggagccucugguggaucugcccaucggcaucaacaucaccagguuccagacccugcacaucagcuaccugacccccggcgacagcagcagcggcuggaccgccggcgccgccgcauacuacgugggcuaccugcagccacggaccuuccugcugaaguacaacgagaacggcaccaucaccgacgccguggacugcgcccuggacccccugagcgagaccaagugcacccuuaagagcuucaccguggagaagggcaucuaccagaccagcaacuuccgggugcagcccacugagagcauugugcgguuccccaacaucaccaaccugugucccuucggcgagguguucaacgccacccgguucgccagcguguacgccuggaaccggaagcggaucagcaacugcguggccgacuacagcgugcuguacaacagcgccagcuucagcaccuucaagugcuacggcgugagcccuaccaagcugaacgaccugugcuucaccaacguguacgcugacagcuucgugauccggggcgacgaggugcggcagaucgcccccggccagaccggcaacaucgccgacuacaacuacaagcugcccgacgacuucaccggcugcgugaucgccuggaacagcaacaaccuggacagcaaggugggcggcaacuacaacuaccuguaccggcuauuccguaagagcaaccugaagccauuugagcgggacaucagcaccgagaucuaccaggccgguagcacccccugcaacggcgugaagggcuucaacugcuacuucccccugcagagcuacggcuuccagcccaccuacggcgugggcuaccagcccuaccgggugguggugcugagcuucgagcugcugcacgcccccgccaccgugugcggcccuaaaaagagcaccaaccuggugaagaacaagugcgugaacuucaauuucaacggccugaccggcaccggcgugcugaccgagagcaacaagaaguuccugcccuuccagcaguucggccgggacaucgccgacaccaccgaugcagugcgggacccccagacccuggagauccuggacaucaccccaugcagcuucggcggcgugagcgucaucacccccggaacaaacaccagcaaccagguggccgugcuguaccagggcgugaacugcaccgaggugcccguggccauccacgccgaccagcugacccccaccuggcggguguacagcaccggcagcaacguguuccagacccgggccggcugccugaucggcgccgagcacgugaacaacuccuacgagugcgacauccccaucggcgcuggcaucugcgccagcuaccagacccagaccaacagcccccggcgggcccggagcguggccagccagagcaucaucgccuacaccaugagccugggcguggagaacagcguggccuacagcaacaacagcaucgccaucccuaccaacuucaccauaagcgugaccaccgagauccugcccgugagcaugaccaagaccagcguggacuguaccauguacaucugcggcgacagcaccgagugcagcaaccuguuacugcaguacggcagcuucugcacccagcugaaccgggcgcugaccggcaucgccguggagcaggacaagaacacccaagagguguucgcccaggugaagcagaucuacaagacucccccaaucaaggacuucggcggcuucaacuucagccagauccugcccgaccccagcaagcccagcaagcggagcuucaucgaggaccugcuguucaacaaggugacccuggccgacgccggcuucaucaagcaguacggggacugccugggcgacaucgccgcccgggaccugaucugcgcucagaaguucaacggccugaccgugcugcccccucugcugaccgaugagaugaucgcccaguacaccagcgcccugcuggccggcaccaucaccagcggcuggaccuucggcgccggcgccgcacugcagauccccuucgccaugcagauggccuaccgguucaacggcaucggcgugacccagaacgugcuguacgagaaccagaagcugaucgccaaccaguucaacagcgccaucggcaagauccaggacagccugagcagcaccgccagcgcccugggcaagcugcaggacguggugaaccagaacgcccaggcucugaacacccuggugaagcagcugagcagcaacuuuggcgccaucagcucagugcugaaugacauccugagccggcuggaucccccagaggccgaggugcagaucgacaggcugaucaccggccggcugcagagccugcagaccuacgugacccagcagcugauccgggccgccgagauucgggccagcgccaaccuggccgcaaccaagaugagcgagugcgugcugggccagagcaagcggguggacuucugcggcaagggcuaccaccugaugagcuucccccagagcgcuccccacggcgugguguuccugcacgucacauacgugcccgcccaggagaagaacuucaccaccgcccccgccaucugccacgacggaaaggcccacuucccccgggagggcguguucgugagcaacggcacccacugguucgugacccagcggaacuucuacgagccucagaucaucaccaccgacaacaccuucgugagcggcaacugcgacguggugaucggcaucgugaacaacaccguguacgacccccugcagcccgagcuggacagcuucaaggaggagcucgacaaguacuucaagaaccacaccagcccagacguggaccugggcgacaucagcggcaucaacgccagcguggugaacauccagaaggagaucgaccggcugaacgagguggccaagaaccugaacgagagccugaucgaccugcaggagcugggcaaguacgagcaguacaucaaguggcccugguacaucuggcugggcuucaucgccggccugaucgccaucgugauggugaccaucaugcugugcugcaugaccagcugcuguagcugccugaagggcugcugcagcugcggcagcugcugcaaguucgacgaggacgacagcgagcccgugcugaagggcgugaagcugcacuacaccugaggacuagucccuguucccagagcccacuuuuuuuucuuuuuuugaaauaaaauagccugucuuucagaucucaaaggcucuuuucagagccaccaaaaaaaaaaaaaaaaaaaaaaaaaaaaaaaaaaaaaaaaaaaaaaaaaaaaaaaaaaaaaaaaaaaaaaaaaaaaaaaaaaaaaaaaaaaaaaaaaaaaa

SEQ ID NO: 23586 - RNA, 4094 nt, Artificial Sequence
  SARS-CoV-2/Wuhan/WIV05/2019__EPI_ISL_402128 spike protein mRNA gc (1-1273)(K986P_V987P_K986P_V987P_E484K_D614G)
aggagagucccgcagucggcguccagcggcucugcuuguucgugugugugucguugcaggccuuauucaagcuuaccauguucguguuccuggugcugcugccccuggugagcagccagugcgugaaccugaccacccggacccagcugcccccugccuacaccaacagcuucacccggggcguguacuaccccgacaagguguuccggagcagcgugcugcacagcacccaggaccuguuccugcccuucuucagcaacgugaccugguuccacgccauccacgugagcggcaccaacggcaccaagcgguucgacaacccagugcugcccuucaacgacggcguguacuucgccagcaccgagaagucaaacaucauccggggcuggaucuucggcaccacccuggacagcaagacacagagccugcugaucgugaacaacgccaccaacguggugaucaaggugugcgaguuucaguucugcaacgaccccuuccugggcguguacuaccacaagaacaacaagagcuggauggagagcgaguuccgggucuacagcagcgcuaacaauugcaccuucgaguacgugagccagcccuuccugauggaccucgagggcaagcagggcaacuucaagaaccugcgggaguucguguucaagaacaucgauggcuacuucaagaucuacagcaagcacacccccaucaaccuggugcgggaccugccccagggauucagcgcccuggagccucugguggaccugcccaucggcaucaacaucaccagguuccagacccugcuggcccugcaccggagcuaccugacccccggcgacagcagcagcggcuggaccgccggcgccgccgcauacuacgugggcuaccugcagccacggaccuuccugcugaaguacaacgagaacggcaccaucaccgacgccguggacugcgcccuggacccccugagcgagaccaagugcacccuaaagagcuucaccguggagaagggcaucuaccagaccagcaacuuccgggugcagcccacugagagcaucgugcgguuccccaacauuaccaaccugugucccuucggcgagguguucaacgccacccgguucgccagcguguacgccuggaaccggaagcggaucagcaacugcguggccgacuacagcgugcuguacaacagcgccagcuucagcaccuucaagugcuacggcgugagcccuaccaagcugaacgaccugugcuucaccaacguguacgcugacagcuucgugauccggggcgacgaggugcggcagaucgcccccggccagaccggcaagaucgccgacuacaacuacaagcugcccgacgacuucaccggcugcgugaucgccuggaacagcaacaaccuggacagcaaggugggcggcaacuacaacuaccuguaccggcuguuccguaagagcaaccugaagccauucgagcgggacaucagcaccgagaucuaccaggccggcagcacccccugcaacggugugaagggcuuuaacugcuacuucccccugcagagcuacggcuuccagcccaccaacggcgugggcuaccagcccuaccgggugguggugcugagcuucgagcugcugcacgcccccgccaccgugugcggcccuaaaaagagcaccaaccuggugaagaacaagugcgugaacuucaauuucaacggccugaccggcaccggcgugcugaccgagagcaacaagaaguuccugcccuuccagcaguucggccgggauaucgccgacaccaccgacgcagugcgggacccccagacccuggagauccuggacaucaccccaugcagcuucggcggcgugagcgucaucacccccggcacaaacaccagcaaccagguggccgugcuguaccagggagugaacugcaccgaggugcccguggccauccacgccgaccagcugacccccaccuggcggguguacagcaccggcagcaacguguuccagacccgggccggcugccugaucggcgccgagcacgugaacaacuccuacgagugcgacauccccaucggcgcuggcaucugcgccagcuaccagacccagaccaacagcccccggcgggcccggagcguggccagccagagcaucaucgccuacaccaugagcuuaggcgccgagaacagcguggccuacagcaacaacagcaucgcgaucccuaccaacuucaccaucagcgugaccaccgagauacugcccgugagcaugaccaagaccagcguggacuguaccauguacaucugcggcgacagcaccgagugcagcaaccugcugcugcaguacggcagcuucugcacccagcugaaccgggcccugaccggcaucgccguggagcaggacaagaacacccaagagguguucgcccaggugaagcagaucuacaagacucccccaaucaaggacuucggcggcuucaacuucagccagauccugcccgaccccagcaagcccagcaagcggagcuucaucgaggaccugcuguucaacaaggugacccuggccgacgccggcuucaucaagcaguacggcgacugccugggggauaucgccgcucgggaccugaucugcgcccagaaguucaacggccugaccgugcugcccccucugcugaccgacgagaugaucgcccaguacaccagcgcccugcuugccggcaccaucaccagcggcuggaccuucggcgccggcgcagcccugcagauccccuucgccaugcagauggccuaccgguucaacggcaucggcgugacccagaacgugcuguacgagaaccagaagcugaucgccaaccaguucaacagcgccaucggcaagauccaggacagccugagcagcaccgccagcgcccugggcaagcugcaggacguggugaaccagaacgcucaggcccugaacacccuggugaagcagcugagcagcaacuucggcgccaucagcucagugcugaaugacauccugagcaggcuggaucccccagaggccgaggugcagaucgaccggcugaucaccggccggcugcagagccugcagaccuacgugacccagcagcugauccgggccgccgagauccgggccagcgccaaccuggcagccaccaagaugagcgagugcgugcugggccagagcaagcggguggacuuuugcggcaagggcuaccaccugaugagcuucccccagagcgcuccccacggcgugguguuccuccacgugacauacguccccgcccaggagaagaacuucaccaccgcccccgccauuugccacgacggcaaggcccacuucccccgggagggaguguucgugagcaacggcacccacugguucgugacccagcggaacuucuacgagccucagaucaucaccaccgacaacaccuucgugagcggcaacugcgacguggugaucggcaucgugaacaacaccguguacgacccccugcagcccgagcuggacagcuucaaggaggagcuggacaaguacuucaagaaccacaccagcccagacguggaccugggcgacaucagcggcaucaacgccagcguggugaacauccagaaggagaucgaccggcugaacgagguggccaagaaccugaacgagagccugaucgaccugcaggagcugggcaaguacgagcaguacaucaaguggcccugguacaucuggcugggcuucaucgccggccugaucgccaucgugauggugaccaucaugcugugcugcaugaccagcugcuguagcugccugaagggcugcugcagcugcggcagcugcugcaaguucgacgaggacgacagcgagcccgugcugaagggcgugaagcugcacuacaccugaggacuagucccuguucccagagcccacuuuuuuuucuuuuuuugaaauaaaauagccugucuuucagaucucaaaggcucuuuucagagccaccaaaaaaaaaaaaaaaaaaaaaaaaaaaaaaaaaaaaaaaaaaaaaaaaaaaaaaaaaaaaaaaaaaaaaaaaaaaaaaaaaaaaaaaaaaaaaaaaaaaaa

SEQ ID NO: 23587 - RNA, 4094 nt, Artificial Sequence
  SARS-CoV-2/Wuhan/WIV05/2019__EPI_ISL_402128 spike protein mRNA gc (1-1273)(K986P_V987P_K986P_V987P_L18F_T20N_P26S_D138Y_R190S_K417T _E484K_N501Y_D614G_H655Y_T1027I)
aggagagucccgcagucggcguccagcggcucugcuuguucgugugugugucguugcaggccuuauucaagcuuaccauguucguguuccuggugcugcugccccuggugagcagccagugcgugaacuucaccaaccggacccagcugcccagcgccuacaccaacagcuucacccggggcguguacuacccugacaagguguuccggagcagcgugcugcacagcacccaggaccuguuccugcccuucuucagcaacgugaccugguuccacgccauccacgugagcggcaccaacggcaccaagcgguucgacaaccccgugcugccauucaacgacggcguguacuucgccagcaccgagaagucaaacaucauccggggcuggaucuuuggcaccacccuggacagcaagacccagagccugcugaucgugaacaacgccacaaacguggugaucaaggugugcgaguuccaguucugcaacuaccccuuccugggcguguacuaccacaagaacaacaagagcuggauggagagcgaguuccgggucuacagcagcgcuaauaacugcaccuucgaguacgugagccagcccuuccugauggaccuggagggcaagcagggcaacuucaagaaccucagcgaguucguguucaagaacaucgacggcuacuucaagaucuacagcaagcacacccccaucaaccuggugcgggaucugccccagggauucagcgcccuggagccccugguggaccugccuaucggcaucaacaucacccgguuccagacccugcuggcccugcacaggagcuaccugacccccggcgacagcagcagcggcuggaccgccggcgccgccgcauacuacgugggcuaccugcagccccggaccuuccugcugaaguacaacgagaacggcaccaucaccgacgccguggacugcgcccuggacccacugagcgagaccaagugcacccuaaagagcuucaccguggagaagggcaucuaccagaccagcaacuuccgggugcagcccaccgagagcaucgugcgguuccccaacauuacuaaccugugucccuucggcgagguguucaacgccacccgguucgccagcguguacgccuggaaccggaagcggaucagcaacugcguggccgacuacagcgugcuguacaacagcgccagcuucagcaccuucaagugcuacggcgugagccccaccaagcugaacgaccugugcuucaccaacguguacgcugacagcuucgugauccggggcgacgaggugcggcagaucgccccuggccagaccggcaccaucgccgacuacaacuacaagcugcccgacgacuucaccggcugcgugaucgccuggaacagcaacaaccuggacagcaaggugggcggcaacuacaacuaccuguaccggcuguuccguaagagcaaccugaagcccuuugagcgggacaucagcaccgagaucuaccaggccggcagcaccccaugcaacggugugaagggcuucaacugcuacuucccccugcagagcuacggcuuccagcccaccuacggcgugggcuaccagcccuaccgggugguggugcugagcuucgagcugcugcacgcccccgccaccgugugcggccccaaaaagagcaccaaccuggugaagaacaagugcgugaacuucaauuucaacggccugaccggcaccggcgugcugaccgagagcaacaagaaguuccugccuuuccagcaguucggccgggacaucgccgauaccaccgacgcagugcgggacccccagacccuggagauccuggacaucacccccugcagcuucggcggcgugagcgucaucaccccaggcacaaacaccagcaaccagguggccgugcuguaccagggagugaacugcaccgaggugcccguggccauccacgccgaccagcugacccccaccuggcggguguacuccaccggcagcaacguguuccagacccgggccggcugccugaucggcgccgaguacgugaacaacagcuacgagugcgacauccccaucggcgcuggcaucugcgccagcuaccagacccagaccaacagcccccggcgggcccggagcguggccagccagagcaucaucgccuacaccaugagccugggcgccgagaacagcguggccuacagcaacaacagcaucgcgauccccaccaacuucaccaucagcgugaccaccgagauauuaccugugagcaugaccaagaccagcguggacuguaccauguacaucugcggcgacagcaccgagugcagcaaccugcugcugcaguacggcagcuucugcacccagcugaaccgggcccugaccggcaucgccguggagcaggacaagaacacccaagagguguucgcccaggugaagcagaucuacaagacuccacccaucaaggacuucggcggcuucaacuucagccagauccugcccgaccccagcaagcccagcaagcggagcuucaucgaggaccugcuguucaacaaggugacccuggccgacgccggcuucaucaagcaguacggcgacugccugggggacaucgccgcucgggaucugaucugcgcccagaaguucaacggccugaccgugcugccuccccugcugaccgacgagaugaucgcccaguacaccagcgcccugcuggccggcaccaucaccagcggcuggaccuucggcgccggcgcagcccuucagauccccuucgccaugcagauggccuaccgguucaacggcaucggcgugacccagaacgugcuguacgagaaccagaagcugaucgccaaccaguucaacagcgccaucggcaagauccaggacagccugagcagcaccgccagcgcccugggcaagcugcaggacguggugaaccagaacgcucaggcccugaacacccuggugaagcagcugagcucaaacuuuggcgccaucagcagcgugcugaaugacauccugagccggcuggacccacccgaggccgaggugcagaucgacaggcugaucaccggccggcugcagagccugcagaccuacgugacccagcagcugauccgggccgccgagauccgggccagcgccaaccuggcagccauuaagaugagcgagugcgugcugggccagagcaagcggguggacuucugcggcaagggcuaccaccugaugagcuucccccagagcgcuccccacggcgugguguuccugcacgugaccuacguccccgcccaggagaagaacuucacaaccgcccccgccaucugccacgacggcaaggcccacuucccccgggagggaguguucgugagcaacggcacccacugguucgugacccagcggaacuucuacgagccccagaucaucaccaccgacaacaccuucgugagcggcaacugcgacguggugaucggcaucgugaacaacaccguguacgacccucuccagcccgagcuggacagcuucaaggaggagcuggacaaguacuucaagaaccacaccagccccgacguggaccugggcgauaucagcggcaucaacgccagcguggugaacauccagaaggagaucgaccggcugaacgagguggccaagaaccugaacgagagccugaucgaccugcaggagcugggcaaguacgagcaguacaucaaguggccaugguacaucuggcugggcuucaucgccggccugaucgccaucgugauggugaccaucaugcugugcugcaugaccagcugcuguagcugccugaagggcugcugcagcugcggcagcugcugcaaguucgacgaggacgacagcgagcccgugcugaagggcgugaagcugcacuacaccugaggacuagucccuguucccagagcccacuuuuuuuucuuuuuuugaaauaaaauagccugucuuucagaucucaaaggcucuuuucagagccaccaaaaaaaaaaaaaaaaaaaaaaaaaaaaaaaaaaaaaaaaaaaaaaaaaaaaaaaaaaaaaaaaaaaaaaaaaaaaaaaaaaaaaaaaaaaaaaaaaaaaa

SEQ ID NO: 23588 - RNA, 4094 nt, Artificial Sequence
  SARS-CoV-2/Wuhan/WIV05/2019__EPI_ISL_402128 spike protein mRNA gc (1-1273)(K986P_V987P_K986P_V987P_S13I_W152C_L452R_D614G)
aggagagucccgcagucggcguccagcggcucugcuuguucgugugugugucguugcaggccuuauucaagcuuaccauguucguguuccuggugcugcugccccuggugagcauccagugcgugaaccugaccacccggacccagcugcccccugccuacaccaacagcuucacccggggcguguacuaccccgacaagguguuccggagcagcgugcugcacagcacccaggaccuguuccugcccuucuucagcaacgugaccugguuccacgccauccacgugagcggcaccaacggcaccaagcgguucgacaacccagugcugcccuucaacgacggcguguacuucgccagcaccgagaagucaaacaucauccggggcuggaucuucggcaccacccuggacagcaagacacagagccugcugaucgugaacaacgccaccaacguggugaucaaggugugcgaguuucaguucugcaacgaccccuuccugggcguguacuaccacaagaacaacaagagcugcauggagagcgaguuccgggucuacagcagcgcuaacaauugcaccuucgaguacgugagccagcccuuccugauggaccucgagggcaagcagggcaacuucaagaaccugcgggaguucguguucaagaacaucgauggcuacuucaagaucuacagcaagcacacccccaucaaccuggugcgggaccugccccagggauucagcgcccuggagccucugguggaccugcccaucggcaucaacaucaccagguuccagacccugcuggcccugcaccggagcuaccugacccccggcgacagcagcagcggcuggaccgccggcgccgccgcauacuacgugggcuaccugcagccacggaccuuccugcugaaguacaacgagaacggcaccaucaccgacgccguggacugcgcccuggacccccugagcgagaccaaguguacccuaaagagcuucaccguggagaagggcaucuaccagaccagcaacuuccgggugcagcccacugagagcauugugcgguuccccaacaucaccaaccugugccccuucggcgagguguucaacgccacccgguucgccagcguguacgccuggaaccggaagcggaucagcaacugcguggccgacuacagcgugcuguacaacagcgccagcuucagcaccuucaagugcuacggcgugagcccuaccaagcugaacgaccugugcuucaccaacguguacgcugacagcuucgugauccggggcgacgaggugcggcagaucgcccccggccagaccggcaagaucgccgacuacaacuacaagcugcccgacgacuucaccggcugcgugaucgccuggaacagcaacaaccuggacagcaaggugggcggcaacuacaacuaccgguaccggcuguuccguaagagcaaccugaagccauucgagcgggacaucagcaccgagaucuaccaggccggcagcacccccugcaacgguguggagggcuuuaacugcuacuucccccugcagagcuacggcuuccagcccaccaacggcgugggcuaccagcccuaccgggugguggugcugagcuucgagcugcugcacgcccccgccaccgugugcggcccuaaaaagagcaccaaccuggugaagaacaagugcgugaacuucaauuucaacggccugaccggcaccggcgugcugaccgagagcaacaagaaguuccugcccuuccagcaguucggccgggauaucgccgacaccaccgacgcagugcgggacccccagacccuggagauccuggacaucaccccaugcagcuucggcggcgugagcgucaucacccccggcacaaacaccagcaaccagguggccgugcuguaccagggagugaacugcaccgaggugcccguggccauccacgccgaccagcugacccccaccuggcggguguacagcaccggcagcaacguguuccagacccgggccggcugccugaucggcgccgagcacgugaacaacagcuacgagugcgacauccccaucggcgcuggcaucugugccuccuaccagacccagaccaacagcccccggcgggcccggagcguggccagccagagcaucaucgccuacaccaugagccugggcgccgagaacagcguggccuacagcaacaacagcaucgcgaucccuaccaacuucaccauaagcgugaccaccgagaucuuacccgugagcaugaccaagaccagcguggacugcaccauguacaucugcggcgacagcaccgagugcagcaaccugcugcugcaguacggcagcuucugcacccagcugaaccgggcccugaccggcaucgccguggagcaggacaagaacacccaagagguguucgcccaggugaagcagaucuacaagacucccccaaucaaggacuucggcggcuucaacuucagccagauccugcccgaccccagcaagcccagcaagcggagcuucaucgaggaccugcuguucaacaaggugacccuggccgacgccggcuucaucaagcaguacggcgacugccugggggauaucgccgcucgggaccugaucugcgcccagaaguucaacggccugaccgugcugcccccucugcugaccgacgagaugaucgcccaguacaccagcgcccugcuggccggcaccaucaccagcggcuggaccuucggcgccggcgcagcccuucagauccccuucgccaugcagauggccuacagguucaacggcaucggcgugacccagaacgugcuguacgagaaccagaagcugaucgccaaccaguucaacagcgccaucggcaagauccaggacagccugagcagcaccgccagcgcccugggcaagcugcaggacguggugaaccagaacgcucaggcccugaacacccuggugaagcagcugagcagcaacuucggcgccaucagcagcgugcugaaugacauccugucacggcuggaucccccagaggccgaggugcagaucgaccggcugaucaccggccggcugcagagccugcagaccuacgugacccagcagcugauccgggccgccgagauucgggccagcgccaaccuggcagccaccaagaugagcgagugcgugcugggccagagcaagcggguggacuuuugcggcaagggcuaccaccugaugagcuucccccagagcgcuccccacggcgugguguuccugcacgugacauacguccccgcccaggagaagaacuucaccaccgcccccgccaucugccacgacggcaaggcccacuucccccgggagggaguguucgugagcaacggcacccacugguucgugacccagcggaacuucuacgagccucagaucaucaccaccgacaacaccuucgugagcggcaacugcgacguggugaucggcaucgugaacaacaccguguacgacccccuccagcccgagcuggacagcuucaaggaggagcuggacaaguacuucaagaaccacaccagcccagacguggaccugggcgacaucagcggcaucaacgccagcguggugaacauccagaaggagaucgaccggcugaacgagguggccaagaaccugaacgagagccugaucgaccugcaggagcugggcaaguacgagcaguacaucaaguggcccugguacaucuggcugggcuucaucgccggccugaucgccaucgugauggugaccaucaugcugugcugcaugaccagcuguugcagcugccugaagggcugcugcagcugcggcagcugcugcaaguucgacgaggacgacagcgagcccgugcugaagggcgugaagcugcacuacaccugaggacuagucccuguucccagagcccacuuuuuuuucuuuuuuugaaauaaaauagccugucuuucagaucucaaaggcucuuuucagagccaccaaaaaaaaaaaaaaaaaaaaaaaaaaaaaaaaaaaaaaaaaaaaaaaaaaaaaaaaaaaaaaaaaaaaaaaaaaaaaaaaaaaaaaaaaaaaaaaaaaaaa

SEQ ID NO: 23589 - RNA, 4094 nt, Artificial Sequence; identical to SEQ ID NO: 151
  SARS-CoV-2/Wuhan/WIV05/2019__EPI_ISL_402128 spike protein mRNA gc mod (1-1273)(K986P_V987P) R10162

SEQ ID NO: 23590 - RNA, 4094 nt, Artificial Sequence
  SARS-CoV-2/Wuhan/WIV05/2019__EPI_ISL_402128 spike protein mRNA gc mod (1-1273)(K986P_V987P_ D614G)
aggagagucccgcagucggcguccagcggcucugcuuguucgugugugugucguugcaggccuuauucaagcuuaccauguucguguuucuggugcugcugccccugguguccagccagugugugaaccugaccaccagaacacagcugccuccagccuacaccaacagcuucaccagaggcguguacuaccccgacaagguguucagauccagcgugcugcacucuacccaggaccuguuccugccuuucuucagcaacgugaccugguuccacgccauccacguguccggcaccaauggcaccaagagauucgacaaccccgugcugcccuucaacgacgggguguacuuugccagcaccgagaaguccaacaucaucagaggcuggaucuucggcaccacacuggacagcaagacccagagccugcugaucgugaacaacgccaccaacguggucaucaaagugugcgaguuccaguucugcaacgaccccuuccugggcgucuacuaccacaagaacaacaagagcuggauggaaagcgaguuccggguguacagcagcgccaacaacugcaccuucgaguacgugucccagccuuuccugauggaccuggaaggcaagcagggcaacuucaagaaccugcgcgaguucguguucaagaacaucgacggcuacuucaaaaucuacagcaagcacaccccuaucaaccucgugcgggaucugccucagggcuucucugcucuggaaccccugguggaucugcccaucggcaucaacaucacccgguuucagacacugcuggcccugcacagaagcuaccugacaccuggcgauagcagcagcggauggacagcuggugccgccgcuuacuaugugggcuaccugcagccuagaaccuuccugcugaaguacaacgagaacggcaccaucaccgacgccguggauugugcucuggauccucugagcgagacaaagugcacccugaaguccuucaccguggaaaagggcaucuaccagaccagcaacuuccgggugcagcccaccgaauccaucgugcgguuccccaauaucaccaaucugugccccuucggcgagguguucaaugccaccagauucgccucuguguacgccuggaaccggaagcggaucagcaauugcguggccgacuacuccgugcuguacaacuccgccagcuucagcaccuucaagugcuacggcguguccccuaccaagcugaacgaccugugcuucacaaacguguacgccgacagcuucgugauccggggagaugaagugcggcagauugccccuggacagacaggcaagaucgccgacuacaacuacaagcugcccgacgacuucaccggcugugugauugccuggaacagcaacaaccuggacuccaaagucggcggcaacuacaauuaccuguaccggcuguuccggaaguccaaucugaagcccuucgagcgggacaucagcaccgaaaucuaucaggccggcagcaccccuugcaacggcguggaaggcuucaacugcuacuucccacugcaguccuacggcuuucagcccacaaauggcgugggcuaucagcccuacagagugguggugcugagcuucgaacugcugcaugcuccugccacagugugcggcccuaagaaaagcaccaaucucgugaagaacaaaugcgugaacuucaacuucaacggccugaccggcaccggcgugcugacagagagcaacaagaaguuccugccauuccagcaguuuggccgggauaucgccgauaccacagacgccguuagagauccccagacacuggaaauccuggacaucaccccaugcagcuucggcggagugucugugaucaccccuggcaccaacaccagcaaucagguggcagugcuguaccagggcgugaacuguaccgaagugcccguggccauucacgccgaucagcugacaccuacauggcggguguacuccaccggcagcaauguguuucagaccagagccggcugucugaucggagccgagcacgugaacaauagcuacgagugcgacauccccaucggcgcuggcaucugugccagcuaccagacacagacaaacagccccagacgggcuagaagcguggccagccagagcaucauugccuacacaaugucucugggcgccgagaacagcguggccuacuccaacaacucuaucgcuauccccaccaacuucaccaucagcgugaccaccgagauccugccuguguccaugaccaagaccagcguggacugcaccauguacaucugcggcgauuccaccgagugcuccaaccugcugcugcaguacggcagcuucugcacccagcugaauagagcccugacagggaucgccguggaacaggacaagaacacccaagagguguucgcccaagugaagcaaaucuacaagaccccuccuaucaaggacuucggcggcuucaauuucagccagauucugcccgauccuagcaagcccagcaagcggagcuucaucgaggaccugcuguucaacaaagugacacuggccgacgccggcuucaucaagcaguauggcgauugucugggcgacauugccgccagggaucugauuugcgcccagaaguuuaacggacugacagugcugccuccucugcugaccgaugagaugaucgcccaguacacaucugcccugcuggccggcacaaucacaagcggcuggacauuuggagcuggcgccgcucugcagauccccuuugcuaugcagauggccuaccgguucaacggcaucggagugacccagaaugugcuguacgagaaccagaagcugaucgccaaccaguucaacagcgccaucggcaagauccaggacagccugagcagcacagcaagcgcccugggaaagcugcaggacguggucaaccagaaugcccaggcacugaacacccuggucaagcagcuguccuccaacuucggcgccaucagcucugugcugaacgauauccugagcagacuggacccuccugaggccgaggugcagaucgacagacugaucacaggcagacugcagagccuccagacauacgugacccagcagcugaucagagccgccgagauuagagccucugccaaucuggccgccaccaagaugucugagugugugcugggccagagcaagagaguggacuuuugcggcaagggcuaccaccugaugagcuucccucagucugccccucacggcgugguguuucugcacgugacauaugugcccgcucaagagaagaauuucaccaccgcuccagccaucugccacgacggcaaagcccacuuuccuagagaaggcguguucguguccaacggcacccauugguucgugacacagcggaacuucuacgagccccagaucaucaccaccgacaacaccuucgugucuggcaacugcgacguugugaucggcauugugaacaauaccguguacgacccucugcagcccgagcuggacagcuucaaagaggaacuggacaaguacuuuaagaaccacacaagccccgacguggaccugggcgauaucagcggaaucaaugccagcgucgugaacauccagaaagagaucgaccggcugaacgagguggccaagaaucugaacgagagccugaucgaccugcaagaacuggggaaguacgagcaguacaucaaguggcccugguacaucuggcugggcuuuaucgccggacugauugccaucgugauggucacaaucaugcuguguugcaugaccagcugcuguagcugccugaagggcuguuguagcuguggcagcugcugcaaguucgacgaggacgauucugagcccgugcugaagggcgugaaacugcacuacaccugaggacuagucccuguucccagagcccacuuuuuuuucuuuuuuugaaauaaaauagccugucuuucagaucucaaaggcucuuuucagagccaccaaaaaaaaaaaaaaaaaaaaaaaaaaaaaaaaaaaaaaaaaaaaaaaaaaaaaaaaaaaaaaaaaaaaaaaaaaaaaaaaaaaaaaaaaaaaaaaaaaaaa

SEQ ID NO: 23591 - RNA, 4094 nt, Artificial Sequence
  SARS-CoV-2/Wuhan/WIV05/2019__EPI_ISL_402128 spike protein mRNA gc mod (1-1273)(K986P_V987P_A222V_D614G)
aggagagucccgcagucggcguccagcggcucugcuuguucgugugugugucguugcaggccuuauucaagcuuaccauguucguguuucuggugcugcugccccugguguccagccagugugugaaccugaccaccagaacacagcugccuccagccuacaccaacagcuucaccagaggcguguacuaccccgacaagguguucagauccagcgugcugcacucuacccaggaccuguuccugccuuucuucagcaacgugaccugguuccacgccauccacguguccggcaccaauggcaccaagagauucgacaaccccgugcugcccuucaacgacgggguguacuuugccagcaccgagaaguccaacaucaucagaggcuggaucuucggcaccacacuggacagcaagacccagagccugcugaucgugaacaacgccaccaacguggucaucaaagugugcgaguuccaguucugcaacgaccccuuccugggcgucuacuaccacaagaacaacaagagcuggauggaaagcgaguuccggguguacagcagcgccaacaacugcaccuucgaguacgugucccagccuuuccugauggaccuggaaggcaagcagggcaacuucaagaaccugcgcgaguucguguucaagaacaucgacggcuacuucaaaaucuacagcaagcacaccccuaucaaccucgugcgggaucugccucagggcuucucugugcuggaaccccugguggaucugcccaucggcaucaacaucacccgguuucagacacugcuggcccugcacagaagcuaccugacaccuggcgauagcagcagcggauggacagcuggugccgccgcuuacuaugugggcuaccugcagccuagaaccuuccugcugaaguacaacgagaacggcaccaucaccgacgccguggauugugcucuggauccucugagcgagacaaagugcacccugaaguccuucaccguggaaaagggcaucuaccagaccagcaacuuccgggugcagcccaccgaauccaucgugcgguuccccaauaucaccaaucugugccccuucggcgagguguucaaugccaccagauucgccucuguguacgccuggaaccggaagcggaucagcaauugcguggccgacuacuccgugcuguacaacuccgccagcuucagcaccuucaagugcuacggcguguccccuaccaagcugaacgaccugugcuucacaaacguguacgccgacagcuucgugauccggggagaugaagugcggcagauugccccuggacagacaggcaagaucgccgacuacaacuacaagcugcccgacgacuucaccggcugugugauugccuggaacagcaacaaccuggacuccaaagucggcggcaacuacaauuaccuguaccggcuguuccggaaguccaaucugaagcccuucgagcgggacaucagcaccgaaaucuaucaggccggcagcaccccuugcaacggcguggaaggcuucaacugcuacuucccacugcaguccuacggcuuucagcccacaaauggcgugggcuaucagcccuacagagugguggugcugagcuucgaacugcugcaugcuccugccacagugugcggcccuaagaaaagcaccaaucucgugaagaacaaaugcgugaacuucaacuucaacggccugaccggcaccggcgugcugacagagagcaacaagaaguuccugccauuccagcaguuuggccgggauaucgccgauaccacagacgccguuagagauccccagacacuggaaauccuggacaucaccccaugcagcuucggcggagugucugugaucaccccuggcaccaacaccagcaaucagguggcagugcuguaccagggcgugaacuguaccgaagugcccguggccauucacgccgaucagcugacaccuacauggcggguguacuccaccggcagcaauguguuucagaccagagccggcugucugaucggagccgagcacgugaacaauagcuacgagugcgacauccccaucggcgcuggcaucugugccagcuaccagacacagacaaacagccccagacgggcuagaagcguggccagccagagcaucauugccuacacaaugucucugggcgccgagaacagcguggccuacuccaacaacucuaucgcuauccccaccaacuucaccaucagcgugaccaccgagauccugccuguguccaugaccaagaccagcguggacugcaccauguacaucugcggcgauuccaccgagugcuccaaccugcugcugcaguacggcagcuucugcacccagcugaauagagcccugacagggaucgccguggaacaggacaagaacacccaagagguguucgcccaagugaagcaaaucuacaagaccccuccuaucaaggacuucggcggcuucaauuucagccagauucugcccgauccuagcaagcccagcaagcggagcuucaucgaggaccugcuguucaacaaagugacacuggccgacgccggcuucaucaagcaguauggcgauugucugggcgacauugccgccagggaucugauuugcgcccagaaguuuaacggacugacagugcugccuccucugcugaccgaugagaugaucgcccaguacacaucugcccugcuggccggcacaaucacaagcggcuggacauuuggagcuggcgccgcucugcagauccccuuugcuaugcagauggccuaccgguucaacggcaucggagugacccagaaugugcuguacgagaaccagaagcugaucgccaaccaguucaacagcgccaucggcaagauccaggacagccugagcagcacagcaagcgcccugggaaagcugcaggacguggucaaccagaaugcccaggcacugaacacccuggucaagcagcuguccuccaacuucggcgccaucagcucugugcugaacgauauccugagcagacuggacccuccugaggccgaggugcagaucgacagacugaucacaggcagacugcagagccuccagacauacgugacccagcagcugaucagagccgccgagauuagagccucugccaaucuggccgccaccaagaugucugagugugugcugggccagagcaagagaguggacuuuugcggcaagggcuaccaccugaugagcuucccucagucugccccucacggcgugguguuucugcacgugacauaugugcccgcucaagagaagaauuucaccaccgcuccagccaucugccacgacggcaaagcccacuuuccuagagaaggcguguucguguccaacggcacccauugguucgugacacagcggaacuucuacgagccccagaucaucaccaccgacaacaccuucgugucuggcaacugcgacguugugaucggcauugugaacaauaccguguacgacccucugcagcccgagcuggacagcuucaaagaggaacuggacaaguacuuuaagaaccacacaagccccgacguggaccugggcgauaucagcggaaucaaugccagcgucgugaacauccagaaagagaucgaccggcugaacgagguggccaagaaucugaacgagagccugaucgaccugcaagaacuggggaaguacgagcaguacaucaaguggcccugguacaucuggcugggcuuuaucgccggacugauugccaucgugauggucacaaucaugcuguguugcaugaccagcugcuguagcugccugaagggcuguuguagcuguggcagcugcugcaaguucgacgaggacgauucugagcccgugcugaagggcgugaaacugcacuacaccugaggacuagucccuguucccagagcccacuuuuuuuucuuuuuuugaaauaaaauagccugucuuucagaucucaaaggcucuuuucagagccaccaaaaaaaaaaaaaaaaaaaaaaaaaaaaaaaaaaaaaaaaaaaaaaaaaaaaaaaaaaaaaaaaaaaaaaaaaaaaaaaaaaaaaaaaaaaaaaaaaaaaa

SEQ ID NO: 23592 - RNA, 4094 nt, Artificial Sequence
  SARS-CoV-2/Wuhan/WIV05/2019__EPI_ISL_402128 spike protein mRNA gc mod (1-1273)(K986P_V987P_N439K_D614G)
aggagagucccgcagucggcguccagcggcucugcuuguucgugugugugucguugcaggccuuauucaagcuuaccauguucguguuucuggugcugcugccccugguguccagccagugugugaaccugaccaccagaacacagcugccuccagccuacaccaacagcuucaccagaggcguguacuaccccgacaagguguucagauccagcgugcugcacucuacccaggaccuguuccugccuuucuucagcaacgugaccugguuccacgccauccacguguccggcaccaauggcaccaagagauucgacaaccccgugcugcccuucaacgacgggguguacuuugccagcaccgagaaguccaacaucaucagaggcuggaucuucggcaccacacuggacagcaagacccagagccugcugaucgugaacaacgccaccaacguggucaucaaagugugcgaguuccaguucugcaacgaccccuuccugggcgucuacuaccacaagaacaacaagagcuggauggaaagcgaguuccggguguacagcagcgccaacaacugcaccuucgaguacgugucccagccuuuccugauggaccuggaaggcaagcagggcaacuucaagaaccugcgcgaguucguguucaagaacaucgacggcuacuucaaaaucuacagcaagcacaccccuaucaaccucgugcgggaucugccucagggcuucucugcucuggaaccccugguggaucugcccaucggcaucaacaucacccgguuucagacacugcuggcccugcacagaagcuaccugacaccuggcgauagcagcagcggauggacagcuggugccgccgcuuacuaugugggcuaccugcagccuagaaccuuccugcugaaguacaacgagaacggcaccaucaccgacgccguggauugugcucuggauccucugagcgagacaaagugcacccugaaguccuucaccguggaaaagggcaucuaccagaccagcaacuuccgggugcagcccaccgaauccaucgugcgguuccccaauaucaccaaucugugccccuucggcgagguguucaaugccaccagauucgccucuguguacgccuggaaccggaagcggaucagcaauugcguggccgacuacuccgugcuguacaacuccgccagcuucagcaccuucaagugcuacggcguguccccuaccaagcugaacgaccugugcuucacaaacguguacgccgacagcuucgugauccggggagaugaagugcggcagauugccccuggacagacaggcaagaucgccgacuacaacuacaagcugcccgacgacuucaccggcugugugauugccuggaacagcaagaaccuggacuccaaagucggcggcaacuacaauuaccuguaccggcuguuccggaaguccaaucugaagcccuucgagcgggacaucagcaccgaaaucuaucaggccggcagcaccccuugcaacggcguggaaggcuucaacugcuacuucccacugcaguccuacggcuuucagcccacaaauggcgugggcuaucagcccuacagagugguggugcugagcuucgaacugcugcaugcuccugccacagugugcggcccuaagaaaagcaccaaucucgugaagaacaaaugcgugaacuucaacuucaacggccugaccggcaccggcgugcugacagagagcaacaagaaguuccugccauuccagcaguuuggccgggauaucgccgauaccacagacgccguuagagauccccagacacuggaaauccuggacaucaccccaugcagcuucggcggagugucugugaucaccccuggcaccaacaccagcaaucagguggcagugcuguaccagggcgugaacuguaccgaagugcccguggccauucacgccgaucagcugacaccuacauggcggguguacuccaccggcagcaauguguuucagaccagagccggcugucugaucggagccgagcacgugaacaauagcuacgagugcgacauccccaucggcgcuggcaucugugccagcuaccagacacagacaaacagccccagacgggcuagaagcguggccagccagagcaucauugccuacacaaugucucugggcgccgagaacagcguggccuacuccaacaacucuaucgcuauccccaccaacuucaccaucagcgugaccaccgagauccugccuguguccaugaccaagaccagcguggacugcaccauguacaucugcggcgauuccaccgagugcuccaaccugcugcugcaguacggcagcuucugcacccagcugaauagagcccugacagggaucgccguggaacaggacaagaacacccaagagguguucgcccaagugaagcaaaucuacaagaccccuccuaucaaggacuucggcggcuucaauuucagccagauucugcccgauccuagcaagcccagcaagcggagcuucaucgaggaccugcuguucaacaaagugacacuggccgacgccggcuucaucaagcaguauggcgauugucugggcgacauugccgccagggaucugauuugcgcccagaaguuuaacggacugacagugcugccuccucugcugaccgaugagaugaucgcccaguacacaucugcccugcuggccggcacaaucacaagcggcuggacauuuggagcuggcgccgcucugcagauccccuuugcuaugcagauggccuaccgguucaacggcaucggagugacccagaaugugcuguacgagaaccagaagcugaucgccaaccaguucaacagcgccaucggcaagauccaggacagccugagcagcacagcaagcgcccugggaaagcugcaggacguggucaaccagaaugcccaggcacugaacacccuggucaagcagcuguccuccaacuucggcgccaucagcucugugcugaacgauauccugagcagacuggacccuccugaggccgaggugcagaucgacagacugaucacaggcagacugcagagccuccagacauacgugacccagcagcugaucagagccgccgagauuagagccucugccaaucuggccgccaccaagaugucugagugugugcugggccagagcaagagaguggacuuuugcggcaagggcuaccaccugaugagcuucccucagucugccccucacggcgugguguuucugcacgugacauaugugcccgcucaagagaagaauuucaccaccgcuccagccaucugccacgacggcaaagcccacuuuccuagagaaggcguguucguguccaacggcacccauugguucgugacacagcggaacuucuacgagccccagaucaucaccaccgacaacaccuucgugucuggcaacugcgacguugugaucggcauugugaacaauaccguguacgacccucugcagcccgagcuggacagcuucaaagaggaacuggacaaguacuuuaagaaccacacaagccccgacguggaccugggcgauaucagcggaaucaaugccagcgucgugaacauccagaaagagaucgaccggcugaacgagguggccaagaaucugaacgagagccugaucgaccugcaagaacuggggaaguacgagcaguacaucaaguggcccugguacaucuggcugggcuuuaucgccggacugauugccaucgugauggucacaaucaugcuguguugcaugaccagcugcuguagcugccugaagggcuguuguagcuguggcagcugcugcaaguucgacgaggacgauucugagcccgugcugaagggcgugaaacugcacuacaccugaggacuagucccuguucccagagcccacuuuuuuuucuuuuuuugaaauaaaauagccugucuuucagaucucaaaggcucuuuucagagccaccaaaaaaaaaaaaaaaaaaaaaaaaaaaaaaaaaaaaaaaaaaaaaaaaaaaaaaaaaaaaaaaaaaaaaaaaaaaaaaaaaaaaaaaaaaaaaaaaaaaaa

SEQ ID NO: 23593 - RNA, 4094 nt, Artificial Sequence
  SARS-CoV-2/Wuhan/WIV05/2019__EPI_ISL_402128 spike protein mRNA gc mod (1-1273)(K986P_V987P_S477N_D614G)
aggagagucccgcagucggcguccagcggcucugcuuguucgugugugugucguugcaggccuuauucaagcuuaccauguucguguuucuggugcugcugccccugguguccagccagugugugaaccugaccaccagaacacagcugccuccagccuacaccaacagcuucaccagaggcguguacuaccccgacaagguguucagauccagcgugcugcacucuacccaggaccuguuccugccuuucuucagcaacgugaccugguuccacgccauccacguguccggcaccaauggcaccaagagauucgacaaccccgugcugcccuucaacgacgggguguacuuugccagcaccgagaaguccaacaucaucagaggcuggaucuucggcaccacacuggacagcaagacccagagccugcugaucgugaacaacgccaccaacguggucaucaaagugugcgaguuccaguucugcaacgaccccuuccugggcgucuacuaccacaagaacaacaagagcuggauggaaagcgaguuccggguguacagcagcgccaacaacugcaccuucgaguacgugucccagccuuuccugauggaccuggaaggcaagcagggcaacuucaagaaccugcgcgaguucguguucaagaacaucgacggcuacuucaaaaucuacagcaagcacaccccuaucaaccucgugcgggaucugccucagggcuucucugcucuggaaccccugguggaucugcccaucggcaucaacaucacccgguuucagacacugcuggcccugcacagaagcuaccugacaccuggcgauagcagcagcggauggacagcuggugccgccgcuuacuaugugggcuaccugcagccuagaaccuuccugcugaaguacaacgagaacggcaccaucaccgacgccguggauugugcucuggauccucugagcgagacaaagugcacccugaaguccuucaccguggaaaagggcaucuaccagaccagcaacuuccgggugcagcccaccgaauccaucgugcgguuccccaauaucaccaaucugugccccuucggcgagguguucaaugccaccagauucgccucuguguacgccuggaaccggaagcggaucagcaauugcguggccgacuacuccgugcuguacaacuccgccagcuucagcaccuucaagugcuacggcguguccccuaccaagcugaacgaccugugcuucacaaacguguacgccgacagcuucgugauccggggagaugaagugcggcagauugccccuggacagacaggcaagaucgccgacuacaacuacaagcugcccgacgacuucaccggcugugugauugccuggaacagcaacaaccuggacuccaaagucggcggcaacuacaauuaccuguaccggcuguuccggaaguccaaucugaagcccuucgagcgggacaucagcaccgaaaucuaucaggccggcaacaccccuugcaacggcguggaaggcuucaacugcuacuucccacugcaguccuacggcuuucagcccacaaauggcgugggcuaucagcccuacagagugguggugcugagcuucgaacugcugcaugcuccugccacagugugcggcccuaagaaaagcaccaaucucgugaagaacaaaugcgugaacuucaacuucaacggccugaccggcaccggcgugcugacagagagcaacaagaaguuccugccauuccagcaguuuggccgggauaucgccgauaccacagacgccguuagagauccccagacacuggaaauccuggacaucaccccaugcagcuucggcggagugucugugaucaccccuggcaccaacaccagcaaucagguggcagugcuguaccagggcgugaacuguaccgaagugcccguggccauucacgccgaucagcugacaccuacauggcggguguacuccaccggcagcaauguguuucagaccagagccggcugucugaucggagccgagcacgugaacaauagcuacgagugcgacauccccaucggcgcuggcaucugugccagcuaccagacacagacaaacagccccagacgggcuagaagcguggccagccagagcaucauugccuacacaaugucucugggcgccgagaacagcguggccuacuccaacaacucuaucgcuauccccaccaacuucaccaucagcgugaccaccgagauccugccuguguccaugaccaagaccagcguggacugcaccauguacaucugcggcgauuccaccgagugcuccaaccugcugcugcaguacggcagcuucugcacccagcugaauagagcccugacagggaucgccguggaacaggacaagaacacccaagagguguucgcccaagugaagcaaaucuacaagaccccuccuaucaaggacuucggcggcuucaauuucagccagauucugcccgauccuagcaagcccagcaagcggagcuucaucgaggaccugcuguucaacaaagugacacuggccgacgccggcuucaucaagcaguauggcgauugucugggcgacauugccgccagggaucugauuugcgcccagaaguuuaacggacugacagugcugccuccucugcugaccgaugagaugaucgcccaguacacaucugcccugcuggccggcacaaucacaagcggcuggacauuuggagcuggcgccgcucugcagauccccuuugcuaugcagauggccuaccgguucaacggcaucggagugacccagaaugugcuguacgagaaccagaagcugaucgccaaccaguucaacagcgccaucggcaagauccaggacagccugagcagcacagcaagcgcccugggaaagcugcaggacguggucaaccagaaugcccaggcacugaacacccuggucaagcagcuguccuccaacuucggcgccaucagcucugugcugaacgauauccugagcagacuggacccuccugaggccgaggugcagaucgacagacugaucacaggcagacugcagagccuccagacauacgugacccagcagcugaucagagccgccgagauuagagccucugccaaucuggccgccaccaagaugucugagugugugcugggccagagcaagagaguggacuuuugcggcaagggcuaccaccugaugagcuucccucagucugccccucacggcgugguguuucugcacgugacauaugugcccgcucaagagaagaauuucaccaccgcuccagccaucugccacgacggcaaagcccacuuuccuagagaaggcguguucguguccaacggcacccauugguucgugacacagcggaacuucuacgagccccagaucaucaccaccgacaacaccuucgugucuggcaacugcgacguugugaucggcauugugaacaauaccguguacgacccucugcagcccgagcuggacagcuucaaagaggaacuggacaaguacuuuaagaaccacacaagccccgacguggaccugggcgauaucagcggaaucaaugccagcgucgugaacauccagaaagagaucgaccggcugaacgagguggccaagaaucugaacgagagccugaucgaccugcaagaacuggggaaguacgagcaguacaucaaguggcccugguacaucuggcugggcuuuaucgccggacugauugccaucgugauggucacaaucaugcuguguugcaugaccagcugcuguagcugccugaagggcuguuguagcuguggcagcugcugcaaguucgacgaggacgauucugagcccgugcugaagggcgugaaacugcacuacaccugaggacuagucccuguucccagagcccacuuuuuuuucuuuuuuugaaauaaaauagccugucuuucagaucucaaaggcucuuuucagagccaccaaaaaaaaaaaaaaaaaaaaaaaaaaaaaaaaaaaaaaaaaaaaaaaaaaaaaaaaaaaaaaaaaaaaaaaaaaaaaaaaaaaaaaaaaaaaaaaaaaaaa

SEQ ID NO: 23594 - RNA, 4094 nt, Artificial Sequence
  SARS-CoV-2/Wuhan/WIV05/2019__EPI_ISL_402128 spike protein mRNA gc mod (1-1273)(K986P_V987P_N501Y_D614G)
aggagagucccgcagucggcguccagcggcucugcuuguucgugugugugucguugcaggccuuauucaagcuuaccauguucguguuucuggugcugcugccccugguguccagccagugugugaaccugaccaccagaacacagcugccuccagccuacaccaacagcuucaccagaggcguguacuaccccgacaagguguucagauccagcgugcugcacucuacccaggaccuguuccugccuuucuucagcaacgugaccugguuccacgccauccacguguccggcaccaauggcaccaagagauucgacaaccccgugcugcccuucaacgacgggguguacuuugccagcaccgagaaguccaacaucaucagaggcuggaucuucggcaccacacuggacagcaagacccagagccugcugaucgugaacaacgccaccaacguggucaucaaagugugcgaguuccaguucugcaacgaccccuuccugggcgucuacuaccacaagaacaacaagagcuggauggaaagcgaguuccggguguacagcagcgccaacaacugcaccuucgaguacgugucccagccuuuccugauggaccuggaaggcaagcagggcaacuucaagaaccugcgcgaguucguguucaagaacaucgacggcuacuucaaaaucuacagcaagcacaccccuaucaaccucgugcgggaucugccucagggcuucucugcucuggaaccccugguggaucugcccaucggcaucaacaucacccgguuucagacacugcuggcccugcacagaagcuaccugacaccuggcgauagcagcagcggauggacagcuggugccgccgcuuacuaugugggcuaccugcagccuagaaccuuccugcugaaguacaacgagaacggcaccaucaccgacgccguggauugugcucuggauccucugagcgagacaaagugcacccugaaguccuucaccguggaaaagggcaucuaccagaccagcaacuuccgggugcagcccaccgaauccaucgugcgguuccccaauaucaccaaucugugccccuucggcgagguguucaaugccaccagauucgccucuguguacgccuggaaccggaagcggaucagcaauugcguggccgacuacuccgugcuguacaacuccgccagcuucagcaccuucaagugcuacggcguguccccuaccaagcugaacgaccugugcuucacaaacguguacgccgacagcuucgugauccggggagaugaagugcggcagauugccccuggacagacaggcaagaucgccgacuacaacuacaagcugcccgacgacuucaccggcugugugauugccuggaacagcaacaaccuggacuccaaagucggcggcaacuacaauuaccuguaccggcuguuccggaaguccaaucugaagcccuucgagcgggacaucagcaccgaaaucuaucaggccggcagcaccccuugcaacggcguggaaggcuucaacugcuacuucccacugcaguccuacggcuuucagcccacauacggcgugggcuaucagcccuacagagugguggugcugagcuucgaacugcugcaugcuccugccacagugugcggcccuaagaaaagcaccaaucucgugaagaacaaaugcgugaacuucaacuucaacggccugaccggcaccggcgugcugacagagagcaacaagaaguuccugccauuccagcaguuuggccgggauaucgccgauaccacagacgccguuagagauccccagacacuggaaauccuggacaucaccccaugcagcuucggcggagugucugugaucaccccuggcaccaacaccagcaaucagguggcagugcuguaccagggcgugaacuguaccgaagugcccguggccauucacgccgaucagcugacaccuacauggcggguguacuccaccggcagcaauguguuucagaccagagccggcugucugaucggagccgagcacgugaacaauagcuacgagugcgacauccccaucggcgcuggcaucugugccagcuaccagacacagacaaacagccccagacgggcuagaagcguggccagccagagcaucauugccuacacaaugucucugggcgccgagaacagcguggccuacuccaacaacucuaucgcuauccccaccaacuucaccaucagcgugaccaccgagauccugccuguguccaugaccaagaccagcguggacugcaccauguacaucugcggcgauuccaccgagugcuccaaccugcugcugcaguacggcagcuucugcacccagcugaauagagcccugacagggaucgccguggaacaggacaagaacacccaagagguguucgcccaagugaagcaaaucuacaagaccccuccuaucaaggacuucggcggcuucaauuucagccagauucugcccgauccuagcaagcccagcaagcggagcuucaucgaggaccugcuguucaacaaagugacacuggccgacgccggcuucaucaagcaguauggcgauugucugggcgacauugccgccagggaucugauuugcgcccagaaguuuaacggacugacagugcugccuccucugcugaccgaugagaugaucgcccaguacacaucugcccugcuggccggcacaaucacaagcggcuggacauuuggagcuggcgccgcucugcagauccccuuugcuaugcagauggccuaccgguucaacggcaucggagugacccagaaugugcuguacgagaaccagaagcugaucgccaaccaguucaacagcgccaucggcaagauccaggacagccugagcagcacagcaagcgcccugggaaagcugcaggacguggucaaccagaaugcccaggcacugaacacccuggucaagcagcuguccuccaacuucggcgccaucagcucugugcugaacgauauccugagcagacuggacccuccugaggccgaggugcagaucgacagacugaucacaggcagacugcagagccuccagacauacgugacccagcagcugaucagagccgccgagauuagagccucugccaaucuggccgccaccaagaugucugagugugugcugggccagagcaagagaguggacuuuugcggcaagggcuaccaccugaugagcuucccucagucugccccucacggcgugguguuucugcacgugacauaugugcccgcucaagagaagaauuucaccaccgcuccagccaucugccacgacggcaaagcccacuuuccuagagaaggcguguucguguccaacggcacccauugguucgugacacagcggaacuucuacgagccccagaucaucaccaccgacaacaccuucgugucuggcaacugcgacguugugaucggcauugugaacaauaccguguacgacccucugcagcccgagcuggacagcuucaaagaggaacuggacaaguacuuuaagaaccacacaagccccgacguggaccugggcgauaucagcggaaucaaugccagcgucgugaacauccagaaagagaucgaccggcugaacgagguggccaagaaucugaacgagagccugaucgaccugcaagaacuggggaaguacgagcaguacaucaaguggcccugguacaucuggcugggcuuuaucgccggacugauugccaucgugauggucacaaucaugcuguguugcaugaccagcugcuguagcugccugaagggcuguuguagcuguggcagcugcugcaaguucgacgaggacgauucugagcccgugcugaagggcgugaaacugcacuacaccugaggacuagucccuguucccagagcccacuuuuuuuucuuuuuuugaaauaaaauagccugucuuucagaucucaaaggcucuuuucagagccaccaaaaaaaaaaaaaaaaaaaaaaaaaaaaaaaaaaaaaaaaaaaaaaaaaaaaaaaaaaaaaaaaaaaaaaaaaaaaaaaaaaaaaaaaaaaaaaaaaaaaa

SEQ ID NO: 23595 - RNA, 4088 nt, Artificial Sequence
  SARS-CoV-2/Wuhan/WIV05/2019__EPI_ISL_402128 spike protein mRNA gc mod (1-1273)(K986P_V987P_H69del_V70del_D614G)
aggagagucccgcagucggcguccagcggcucugcuuguucgugugugugucguugcaggccuuauucaagcuuaccauguucguguuucuggugcugcugccccugguguccagccagugugugaaccugaccaccagaacacagcugccuccagccuacaccaacagcuucaccagaggcguguacuaccccgacaagguguucagauccagcgugcugcacucuacccaggaccuguuccugccuuucuucagcaacgugaccugguuccacgccaucuccggcaccaauggcaccaagagauucgacaaccccgugcugcccuucaacgacgggguguacuuugccagcaccgagaaguccaacaucaucagaggcuggaucuucggcaccacacuggacagcaagacccagagccugcugaucgugaacaacgccaccaacguggucaucaaagugugcgaguuccaguucugcaacgaccccuuccugggcgucuacuaccacaagaacaacaagagcuggauggaaagcgaguuccggguguacagcagcgccaacaacugcaccuucgaguacgugucccagccuuuccugauggaccuggaaggcaagcagggcaacuucaagaaccugcgcgaguucguguucaagaacaucgacggcuacuucaaaaucuacagcaagcacaccccuaucaaccucgugcgggaucugccucagggcuucucugcucuggaaccccugguggaucugcccaucggcaucaacaucacccgguuucagacacugcuggcccugcacagaagcuaccugacaccuggcgauagcagcagcggauggacagcuggugccgccgcuuacuaugugggcuaccugcagccuagaaccuuccugcugaaguacaacgagaacggcaccaucaccgacgccguggauugugcucuggauccucugagcgagacaaagugcacccugaaguccuucaccguggaaaagggcaucuaccagaccagcaacuuccgggugcagcccaccgaauccaucgugcgguuccccaauaucaccaaucugugccccuucggcgagguguucaaugccaccagauucgccucuguguacgccuggaaccggaagcggaucagcaauugcguggccgacuacuccgugcuguacaacuccgccagcuucagcaccuucaagugcuacggcguguccccuaccaagcugaacgaccugugcuucacaaacguguacgccgacagcuucgugauccggggagaugaagugcggcagauugccccuggacagacaggcaagaucgccgacuacaacuacaagcugcccgacgacuucaccggcugugugauugccuggaacagcaacaaccuggacuccaaagucggcggcaacuacaauuaccuguaccggcuguuccggaaguccaaucugaagcccuucgagcgggacaucagcaccgaaaucuaucaggccggcagcaccccuugcaacggcguggaaggcuucaacugcuacuucccacugcaguccuacggcuuucagcccacaaauggcgugggcuaucagcccuacagagugguggugcugagcuucgaacugcugcaugcuccugccacagugugcggcccuaagaaaagcaccaaucucgugaagaacaaaugcgugaacuucaacuucaacggccugaccggcaccggcgugcugacagagagcaacaagaaguuccugccauuccagcaguuuggccgggauaucgccgauaccacagacgccguuagagauccccagacacuggaaauccuggacaucaccccaugcagcuucggcggagugucugugaucaccccuggcaccaacaccagcaaucagguggcagugcuguaccagggcgugaacuguaccgaagugcccguggccauucacgccgaucagcugacaccuacauggcggguguacuccaccggcagcaauguguuucagaccagagccggcugucugaucggagccgagcacgugaacaauagcuacgagugcgacauccccaucggcgcuggcaucugugccagcuaccagacacagacaaacagccccagacgggcuagaagcguggccagccagagcaucauugccuacacaaugucucugggcgccgagaacagcguggccuacuccaacaacucuaucgcuauccccaccaacuucaccaucagcgugaccaccgagauccugccuguguccaugaccaagaccagcguggacugcaccauguacaucugcggcgauuccaccgagugcuccaaccugcugcugcaguacggcagcuucugcacccagcugaauagagcccugacagggaucgccguggaacaggacaagaacacccaagagguguucgcccaagugaagcaaaucuacaagaccccuccuaucaaggacuucggcggcuucaauuucagccagauucugcccgauccuagcaagcccagcaagcggagcuucaucgaggaccugcuguucaacaaagugacacuggccgacgccggcuucaucaagcaguauggcgauugucugggcgacauugccgccagggaucugauuugcgcccagaaguuuaacggacugacagugcugccuccucugcugaccgaugagaugaucgcccaguacacaucugcccugcuggccggcacaaucacaagcggcuggacauuuggagcuggcgccgcucugcagauccccuuugcuaugcagauggccuaccgguucaacggcaucggagugacccagaaugugcuguacgagaaccagaagcugaucgccaaccaguucaacagcgccaucggcaagauccaggacagccugagcagcacagcaagcgcccugggaaagcugcaggacguggucaaccagaaugcccaggcacugaacacccuggucaagcagcuguccuccaacuucggcgccaucagcucugugcugaacgauauccugagcagacuggacccuccugaggccgaggugcagaucgacagacugaucacaggcagacugcagagccuccagacauacgugacccagcagcugaucagagccgccgagauuagagccucugccaaucuggccgccaccaagaugucugagugugugcugggccagagcaagagaguggacuuuugcggcaagggcuaccaccugaugagcuucccucagucugccccucacggcgugguguuucugcacgugacauaugugcccgcucaagagaagaauuucaccaccgcuccagccaucugccacgacggcaaagcccacuuuccuagagaaggcguguucguguccaacggcacccauugguucgugacacagcggaacuucuacgagccccagaucaucaccaccgacaacaccuucgugucuggcaacugcgacguugugaucggcauugugaacaauaccguguacgacccucugcagcccgagcuggacagcuucaaagaggaacuggacaaguacuuuaagaaccacacaagccccgacguggaccugggcgauaucagcggaaucaaugccagcgucgugaacauccagaaagagaucgaccggcugaacgagguggccaagaaucugaacgagagccugaucgaccugcaagaacuggggaaguacgagcaguacaucaaguggcccugguacaucuggcugggcuuuaucgccggacugauugccaucgugauggucacaaucaugcuguguugcaugaccagcugcuguagcugccugaagggcuguuguagcuguggcagcugcugcaaguucgacgaggacgauucugagcccgugcugaagggcgugaaacugcacuacaccugaggacuagucccuguucccagagcccacuuuuuuuucuuuuuuugaaauaaaauagccugucuuucagaucucaaaggcucuuuucagagccaccaaaaaaaaaaaaaaaaaaaaaaaaaaaaaaaaaaaaaaaaaaaaaaaaaaaaaaaaaaaaaaaaaaaaaaaaaaaaaaaaaaaaaaaaaaaaaaaaaaaaa

SEQ ID NO: 23596 - RNA, 4094 nt, Artificial Sequence
  SARS-CoV-2/Wuhan/WIV05/2019__EPI_ISL_402128 spike protein mRNA gc mod (1-1273)(K986P_V987P_Y453F_D614G)
aggagagucccgcagucggcguccagcggcucugcuuguucgugugugugucguugcaggccuuauucaagcuuaccauguucguguuucuggugcugcugccccugguguccagccagugugugaaccugaccaccagaacacagcugccuccagccuacaccaacagcuucaccagaggcguguacuaccccgacaagguguucagauccagcgugcugcacucuacccaggaccuguuccugccuuucuucagcaacgugaccugguuccacgccauccacguguccggcaccaauggcaccaagagauucgacaaccccgugcugcccuucaacgacgggguguacuuugccagcaccgagaaguccaacaucaucagaggcuggaucuucggcaccacacuggacagcaagacccagagccugcugaucgugaacaacgccaccaacguggucaucaaagugugcgaguuccaguucugcaacgaccccuuccugggcgucuacuaccacaagaacaacaagagcuggauggaaagcgaguuccggguguacagcagcgccaacaacugcaccuucgaguacgugucccagccuuuccugauggaccuggaaggcaagcagggcaacuucaagaaccugcgcgaguucguguucaagaacaucgacggcuacuucaaaaucuacagcaagcacaccccuaucaaccucgugcgggaucugccucagggcuucucugcucuggaaccccugguggaucugcccaucggcaucaacaucacccgguuucagacacugcuggcccugcacagaagcuaccugacaccuggcgauagcagcagcggauggacagcuggugccgccgcuuacuaugugggcuaccugcagccuagaaccuuccugcugaaguacaacgagaacggcaccaucaccgacgccguggauugugcucuggauccucugagcgagacaaagugcacccugaaguccuucaccguggaaaagggcaucuaccagaccagcaacuuccgggugcagcccaccgaauccaucgugcgguuccccaauaucaccaaucugugccccuucggcgagguguucaaugccaccagauucgccucuguguacgccuggaaccggaagcggaucagcaauugcguggccgacuacuccgugcuguacaacuccgccagcuucagcaccuucaagugcuacggcguguccccuaccaagcugaacgaccugugcuucacaaacguguacgccgacagcuucgugauccggggagaugaagugcggcagauugccccuggacagacaggcaagaucgccgacuacaacuacaagcugcccgacgacuucaccggcugugugauugccuggaacagcaacaaccuggacuccaaagucggcggcaacuacaauuaccuguuccggcuguuccggaaguccaaucugaagcccuucgagcgggacaucagcaccgaaaucuaucaggccggcagcaccccuugcaacggcguggaaggcuucaacugcuacuucccacugcaguccuacggcuuucagcccacaaauggcgugggcuaucagcccuacagagugguggugcugagcuucgaacugcugcaugcuccugccacagugugcggcccuaagaaaagcaccaaucucgugaagaacaaaugcgugaacuucaacuucaacggccugaccggcaccggcgugcugacagagagcaacaagaaguuccugccauuccagcaguuuggccgggauaucgccgauaccacagacgccguuagagauccccagacacuggaaauccuggacaucaccccaugcagcuucggcggagugucugugaucaccccuggcaccaacaccagcaaucagguggcagugcuguaccagggcgugaacuguaccgaagugcccguggccauucacgccgaucagcugacaccuacauggcggguguacuccaccggcagcaauguguuucagaccagagccggcugucugaucggagccgagcacgugaacaauagcuacgagugcgacauccccaucggcgcuggcaucugugccagcuaccagacacagacaaacagccccagacgggcuagaagcguggccagccagagcaucauugccuacacaaugucucugggcgccgagaacagcguggccuacuccaacaacucuaucgcuauccccaccaacuucaccaucagcgugaccaccgagauccugccuguguccaugaccaagaccagcguggacugcaccauguacaucugcggcgauuccaccgagugcuccaaccugcugcugcaguacggcagcuucugcacccagcugaauagagcccugacagggaucgccguggaacaggacaagaacacccaagagguguucgcccaagugaagcaaaucuacaagaccccuccuaucaaggacuucggcggcuucaauuucagccagauucugcccgauccuagcaagcccagcaagcggagcuucaucgaggaccugcuguucaacaaagugacacuggccgacgccggcuucaucaagcaguauggcgauugucugggcgacauugccgccagggaucugauuugcgcccagaaguuuaacggacugacagugcugccuccucugcugaccgaugagaugaucgcccaguacacaucugcccugcuggccggcacaaucacaagcggcuggacauuuggagcuggcgccgcucugcagauccccuuugcuaugcagauggccuaccgguucaacggcaucggagugacccagaaugugcuguacgagaaccagaagcugaucgccaaccaguucaacagcgccaucggcaagauccaggacagccugagcagcacagcaagcgcccugggaaagcugcaggacguggucaaccagaaugcccaggcacugaacacccuggucaagcagcuguccuccaacuucggcgccaucagcucugugcugaacgauauccugagcagacuggacccuccugaggccgaggugcagaucgacagacugaucacaggcagacugcagagccuccagacauacgugacccagcagcugaucagagccgccgagauuagagccucugccaaucuggccgccaccaagaugucugagugugugcugggccagagcaagagaguggacuuuugcggcaagggcuaccaccugaugagcuucccucagucugccccucacggcgugguguuucugcacgugacauaugugcccgcucaagagaagaauuucaccaccgcuccagccaucugccacgacggcaaagcccacuuuccuagagaaggcguguucguguccaacggcacccauugguucgugacacagcggaacuucuacgagccccagaucaucaccaccgacaacaccuucgugucuggcaacugcgacguugugaucggcauugugaacaauaccguguacgacccucugcagcccgagcuggacagcuucaaagaggaacuggacaaguacuuuaagaaccacacaagccccgacguggaccugggcgauaucagcggaaucaaugccagcgucgugaacauccagaaagagaucgaccggcugaacgagguggccaagaaucugaacgagagccugaucgaccugcaagaacuggggaaguacgagcaguacaucaaguggcccugguacaucuggcugggcuuuaucgccggacugauugccaucgugauggucacaaucaugcuguguugcaugaccagcugcuguagcugccugaagggcuguuguagcuguggcagcugcugcaaguucgacgaggacgauucugagcccgugcugaagggcgugaaacugcacuacaccugaggacuagucccuguucccagagcccacuuuuuuuucuuuuuuugaaauaaaauagccugucuuucagaucucaaaggcucuuuucagagccaccaaaaaaaaaaaaaaaaaaaaaaaaaaaaaaaaaaaaaaaaaaaaaaaaaaaaaaaaaaaaaaaaaaaaaaaaaaaaaaaaaaaaaaaaaaaaaaaaaaaaa

SEQ ID NO: 23597 - RNA, 4094 nt, Artificial Sequence
  SARS-CoV-2/Wuhan/WIV05/2019__EPI_ISL_402128 spike protein mRNA gc mod (1-1273)(K986P_V987P_D614G_I692V)
aggagagucccgcagucggcguccagcggcucugcuuguucgugugugugucguugcaggccuuauucaagcuuaccauguucguguuucuggugcugcugccccugguguccagccagugugugaaccugaccaccagaacacagcugccuccagccuacaccaacagcuucaccagaggcguguacuaccccgacaagguguucagauccagcgugcugcacucuacccaggaccuguuccugccuuucuucagcaacgugaccugguuccacgccauccacguguccggcaccaauggcaccaagagauucgacaaccccgugcugcccuucaacgacgggguguacuuugccagcaccgagaaguccaacaucaucagaggcuggaucuucggcaccacacuggacagcaagacccagagccugcugaucgugaacaacgccaccaacguggucaucaaagugugcgaguuccaguucugcaacgaccccuuccugggcgucuacuaccacaagaacaacaagagcuggauggaaagcgaguuccggguguacagcagcgccaacaacugcaccuucgaguacgugucccagccuuuccugauggaccuggaaggcaagcagggcaacuucaagaaccugcgcgaguucguguucaagaacaucgacggcuacuucaaaaucuacagcaagcacaccccuaucaaccucgugcgggaucugccucagggcuucucugcucuggaaccccugguggaucugcccaucggcaucaacaucacccgguuucagacacugcuggcccugcacagaagcuaccugacaccuggcgauagcagcagcggauggacagcuggugccgccgcuuacuaugugggcuaccugcagccuagaaccuuccugcugaaguacaacgagaacggcaccaucaccgacgccguggauugugcucuggauccucugagcgagacaaagugcacccugaaguccuucaccguggaaaagggcaucuaccagaccagcaacuuccgggugcagcccaccgaauccaucgugcgguuccccaauaucaccaaucugugccccuucggcgagguguucaaugccaccagauucgccucuguguacgccuggaaccggaagcggaucagcaauugcguggccgacuacuccgugcuguacaacuccgccagcuucagcaccuucaagugcuacggcguguccccuaccaagcugaacgaccugugcuucacaaacguguacgccgacagcuucgugauccggggagaugaagugcggcagauugccccuggacagacaggcaagaucgccgacuacaacuacaagcugcccgacgacuucaccggcugugugauugccuggaacagcaacaaccuggacuccaaagucggcggcaacuacaauuaccuguaccggcuguuccggaaguccaaucugaagcccuucgagcgggacaucagcaccgaaaucuaucaggccggcagcaccccuugcaacggcguggaaggcuucaacugcuacuucccacugcaguccuacggcuuucagcccacaaauggcgugggcuaucagcccuacagagugguggugcugagcuucgaacugcugcaugcuccugccacagugugcggcccuaagaaaagcaccaaucucgugaagaacaaaugcgugaacuucaacuucaacggccugaccggcaccggcgugcugacagagagcaacaagaaguuccugccauuccagcaguuuggccgggauaucgccgauaccacagacgccguuagagauccccagacacuggaaauccuggacaucaccccaugcagcuucggcggagugucugugaucaccccuggcaccaacaccagcaaucagguggcagugcuguaccagggcgugaacuguaccgaagugcccguggccauucacgccgaucagcugacaccuacauggcggguguacuccaccggcagcaauguguuucagaccagagccggcugucugaucggagccgagcacgugaacaauagcuacgagugcgacauccccaucggcgcuggcaucugugccagcuaccagacacagacaaacagccccagacgggcuagaagcguggccagccagagcgugauugccuacacaaugucucugggcgccgagaacagcguggccuacuccaacaacucuaucgcuauccccaccaacuucaccaucagcgugaccaccgagauccugccuguguccaugaccaagaccagcguggacugcaccauguacaucugcggcgauuccaccgagugcuccaaccugcugcugcaguacggcagcuucugcacccagcugaauagagcccugacagggaucgccguggaacaggacaagaacacccaagagguguucgcccaagugaagcaaaucuacaagaccccuccuaucaaggacuucggcggcuucaauuucagccagauucugcccgauccuagcaagcccagcaagcggagcuucaucgaggaccugcuguucaacaaagugacacuggccgacgccggcuucaucaagcaguauggcgauugucugggcgacauugccgccagggaucugauuugcgcccagaaguuuaacggacugacagugcugccuccucugcugaccgaugagaugaucgcccaguacacaucugcccugcuggccggcacaaucacaagcggcuggacauuuggagcuggcgccgcucugcagauccccuuugcuaugcagauggccuaccgguucaacggcaucggagugacccagaaugugcuguacgagaaccagaagcugaucgccaaccaguucaacagcgccaucggcaagauccaggacagccugagcagcacagcaagcgcccugggaaagcugcaggacguggucaaccagaaugcccaggcacugaacacccuggucaagcagcuguccuccaacuucggcgccaucagcucugugcugaacgauauccugagcagacuggacccuccugaggccgaggugcagaucgacagacugaucacaggcagacugcagagccuccagacauacgugacccagcagcugaucagagccgccgagauuagagccucugccaaucuggccgccaccaagaugucugagugugugcugggccagagcaagagaguggacuuuugcggcaagggcuaccaccugaugagcuucccucagucugccccucacggcgugguguuucugcacgugacauaugugcccgcucaagagaagaauuucaccaccgcuccagccaucugccacgacggcaaagcccacuuuccuagagaaggcguguucguguccaacggcacccauugguucgugacacagcggaacuucuacgagccccagaucaucaccaccgacaacaccuucgugucuggcaacugcgacguugugaucggcauugugaacaauaccguguacgacccucugcagcccgagcuggacagcuucaaagaggaacuggacaaguacuuuaagaaccacacaagccccgacguggaccugggcgauaucagcggaaucaaugccagcgucgugaacauccagaaagagaucgaccggcugaacgagguggccaagaaucugaacgagagccugaucgaccugcaagaacuggggaaguacgagcaguacaucaaguggcccugguacaucuggcugggcuuuaucgccggacugauugccaucgugauggucacaaucaugcuguguugcaugaccagcugcuguagcugccugaagggcuguuguagcuguggcagcugcugcaaguucgacgaggacgauucugagcccgugcugaagggcgugaaacugcacuacaccugaggacuagucccuguucccagagcccacuuuuuuuucuuuuuuugaaauaaaauagccugucuuucagaucucaaaggcucuuuucagagccaccaaaaaaaaaaaaaaaaaaaaaaaaaaaaaaaaaaaaaaaaaaaaaaaaaaaaaaaaaaaaaaaaaaaaaaaaaaaaaaaaaaaaaaaaaaaaaaaaaaaaa

SEQ ID NO: 23598 - RNA, 4094 nt, Artificial Sequence
  SARS-CoV-2/Wuhan/WIV05/2019__EPI_ISL_402128 spike protein mRNA gc mod (1-1273)(K986P_V987P_D614G_M1229I)
aggagagucccgcagucggcguccagcggcucugcuuguucgugugugugucguugcaggccuuauucaagcuuaccauguucguguuucuggugcugcugccccugguguccagccagugugugaaccugaccaccagaacacagcugccuccagccuacaccaacagcuucaccagaggcguguacuaccccgacaagguguucagauccagcgugcugcacucuacccaggaccuguuccugccuuucuucagcaacgugaccugguuccacgccauccacguguccggcaccaauggcaccaagagauucgacaaccccgugcugcccuucaacgacgggguguacuuugccagcaccgagaaguccaacaucaucagaggcuggaucuucggcaccacacuggacagcaagacccagagccugcugaucgugaacaacgccaccaacguggucaucaaagugugcgaguuccaguucugcaacgaccccuuccugggcgucuacuaccacaagaacaacaagagcuggauggaaagcgaguuccggguguacagcagcgccaacaacugcaccuucgaguacgugucccagccuuuccugauggaccuggaaggcaagcagggcaacuucaagaaccugcgcgaguucguguucaagaacaucgacggcuacuucaaaaucuacagcaagcacaccccuaucaaccucgugcgggaucugccucagggcuucucugcucuggaaccccugguggaucugcccaucggcaucaacaucacccgguuucagacacugcuggcccugcacagaagcuaccugacaccuggcgauagcagcagcggauggacagcuggugccgccgcuuacuaugugggcuaccugcagccuagaaccuuccugcugaaguacaacgagaacggcaccaucaccgacgccguggauugugcucuggauccucugagcgagacaaagugcacccugaaguccuucaccguggaaaagggcaucuaccagaccagcaacuuccgggugcagcccaccgaauccaucgugcgguuccccaauaucaccaaucugugccccuucggcgagguguucaaugccaccagauucgccucuguguacgccuggaaccggaagcggaucagcaauugcguggccgacuacuccgugcuguacaacuccgccagcuucagcaccuucaagugcuacggcguguccccuaccaagcugaacgaccugugcuucacaaacguguacgccgacagcuucgugauccggggagaugaagugcggcagauugccccuggacagacaggcaagaucgccgacuacaacuacaagcugcccgacgacuucaccggcugugugauugccuggaacagcaacaaccuggacuccaaagucggcggcaacuacaauuaccuguaccggcuguuccggaaguccaaucugaagcccuucgagcgggacaucagcaccgaaaucuaucaggccggcagcaccccuugcaacggcguggaaggcuucaacugcuacuucccacugcaguccuacggcuuucagcccacaaauggcgugggcuaucagcccuacagagugguggugcugagcuucgaacugcugcaugcuccugccacagugugcggcccuaagaaaagcaccaaucucgugaagaacaaaugcgugaacuucaacuucaacggccugaccggcaccggcgugcugacagagagcaacaagaaguuccugccauuccagcaguuuggccgggauaucgccgauaccacagacgccguuagagauccccagacacuggaaauccuggacaucaccccaugcagcuucggcggagugucugugaucaccccuggcaccaacaccagcaaucagguggcagugcuguaccagggcgugaacuguaccgaagugcccguggccauucacgccgaucagcugacaccuacauggcggguguacuccaccggcagcaauguguuucagaccagagccggcugucugaucggagccgagcacgugaacaauagcuacgagugcgacauccccaucggcgcuggcaucugugccagcuaccagacacagacaaacagccccagacgggcuagaagcguggccagccagagcaucauugccuacacaaugucucugggcgccgagaacagcguggccuacuccaacaacucuaucgcuauccccaccaacuucaccaucagcgugaccaccgagauccugccuguguccaugaccaagaccagcguggacugcaccauguacaucugcggcgauuccaccgagugcuccaaccugcugcugcaguacggcagcuucugcacccagcugaauagagcccugacagggaucgccguggaacaggacaagaacacccaagagguguucgcccaagugaagcaaaucuacaagaccccuccuaucaaggacuucggcggcuucaauuucagccagauucugcccgauccuagcaagcccagcaagcggagcuucaucgaggaccugcuguucaacaaagugacacuggccgacgccggcuucaucaagcaguauggcgauugucugggcgacauugccgccagggaucugauuugcgcccagaaguuuaacggacugacagugcugccuccucugcugaccgaugagaugaucgcccaguacacaucugcccugcuggccggcacaaucacaagcggcuggacauuuggagcuggcgccgcucugcagauccccuuugcuaugcagauggccuaccgguucaacggcaucggagugacccagaaugugcuguacgagaaccagaagcugaucgccaaccaguucaacagcgccaucggcaagauccaggacagccugagcagcacagcaagcgcccugggaaagcugcaggacguggucaaccagaaugcccaggcacugaacacccuggucaagcagcuguccuccaacuucggcgccaucagcucugugcugaacgauauccugagcagacuggacccuccugaggccgaggugcagaucgacagacugaucacaggcagacugcagagccuccagacauacgugacccagcagcugaucagagccgccgagauuagagccucugccaaucuggccgccaccaagaugucugagugugugcugggccagagcaagagaguggacuuuugcggcaagggcuaccaccugaugagcuucccucagucugccccucacggcgugguguuucugcacgugacauaugugcccgcucaagagaagaauuucaccaccgcuccagccaucugccacgacggcaaagcccacuuuccuagagaaggcguguucguguccaacggcacccauugguucgugacacagcggaacuucuacgagccccagaucaucaccaccgacaacaccuucgugucuggcaacugcgacguugugaucggcauugugaacaauaccguguacgacccucugcagcccgagcuggacagcuucaaagaggaacuggacaaguacuuuaagaaccacacaagccccgacguggaccugggcgauaucagcggaaucaaugccagcgucgugaacauccagaaagagaucgaccggcugaacgagguggccaagaaucugaacgagagccugaucgaccugcaagaacuggggaaguacgagcaguacaucaaguggcccugguacaucuggcugggcuuuaucgccggacugauugccaucgugaucgucacaaucaugcuguguugcaugaccagcugcuguagcugccugaagggcuguuguagcuguggcagcugcugcaaguucgacgaggacgauucugagcccgugcugaagggcgugaaacugcacuacaccugaggacuagucccuguucccagagcccacuuuuuuuucuuuuuuugaaauaaaauagccugucuuucagaucucaaaggcucuuuucagagccaccaaaaaaaaaaaaaaaaaaaaaaaaaaaaaaaaaaaaaaaaaaaaaaaaaaaaaaaaaaaaaaaaaaaaaaaaaaaaaaaaaaaaaaaaaaaaaaaaaaaaa

SEQ ID NO: 23599 - RNA, 4088 nt, Artificial Sequence
  SARS-CoV-2/Wuhan/WIV05/2019__EPI_ISL_402128 spike protein mRNA gc mod (1-1273)(K986P_V987P_H69del_V70del_A222V_Y453F_S477N_D614G_I692V)
aggagagucccgcagucggcguccagcggcucugcuuguucgugugugugucguugcaggccuuauucaagcuuaccauguucguguuucuggugcugcugccccugguguccagccagugugugaaccugaccaccagaacacagcugccuccagccuacaccaacagcuucaccagaggcguguacuaccccgacaagguguucagauccagcgugcugcacucuacccaggaccuguuccugccuuucuucagcaacgugaccugguuccacgccaucuccggcaccaauggcaccaagagauucgacaaccccgugcugcccuucaacgacgggguguacuuugccagcaccgagaaguccaacaucaucagaggcuggaucuucggcaccacacuggacagcaagacccagagccugcugaucgugaacaacgccaccaacguggucaucaaagugugcgaguuccaguucugcaacgaccccuuccugggcgucuacuaccacaagaacaacaagagcuggauggaaagcgaguuccggguguacagcagcgccaacaacugcaccuucgaguacgugucccagccuuuccugauggaccuggaaggcaagcagggcaacuucaagaaccugcgcgaguucguguucaagaacaucgacggcuacuucaaaaucuacagcaagcacaccccuaucaaccucgugcgggaucugccucagggcuucucugugcuggaaccccugguggaucugcccaucggcaucaacaucacccgguuucagacacugcuggcccugcacagaagcuaccugacaccuggcgauagcagcagcggauggacagcuggugccgccgcuuacuaugugggcuaccugcagccuagaaccuuccugcugaaguacaacgagaacggcaccaucaccgacgccguggauugugcucuggauccucugagcgagacaaagugcacccugaaguccuucaccguggaaaagggcaucuaccagaccagcaacuuccgggugcagcccaccgaauccaucgugcgguuccccaauaucaccaaucugugccccuucggcgagguguucaaugccaccagauucgccucuguguacgccuggaaccggaagcggaucagcaauugcguggccgacuacuccgugcuguacaacuccgccagcuucagcaccuucaagugcuacggcguguccccuaccaagcugaacgaccugugcuucacaaacguguacgccgacagcuucgugauccggggagaugaagugcggcagauugccccuggacagacaggcaagaucgccgacuacaacuacaagcugcccgacgacuucaccggcugugugauugccuggaacagcaacaaccuggacuccaaagucggcggcaacuacaauuaccuguuccggcuguuccggaaguccaaucugaagcccuucgagcgggacaucagcaccgaaaucuaucaggccggcaacaccccuugcaacggcguggaaggcuucaacugcuacuucccacugcaguccuacggcuuucagcccacaaauggcgugggcuaucagcccuacagagugguggugcugagcuucgaacugcugcaugcuccugccacagugugcggcccuaagaaaagcaccaaucucgugaagaacaaaugcgugaacuucaacuucaacggccugaccggcaccggcgugcugacagagagcaacaagaaguuccugccauuccagcaguuuggccgggauaucgccgauaccacagacgccguuagagauccccagacacuggaaauccuggacaucaccccaugcagcuucggcggagugucugugaucaccccuggcaccaacaccagcaaucagguggcagugcuguaccagggcgugaacuguaccgaagugcccguggccauucacgccgaucagcugacaccuacauggcggguguacuccaccggcagcaauguguuucagaccagagccggcugucugaucggagccgagcacgugaacaauagcuacgagugcgacauccccaucggcgcuggcaucugugccagcuaccagacacagacaaacagccccagacgggcuagaagcguggccagccagagcgugauugccuacacaaugucucugggcgccgagaacagcguggccuacuccaacaacucuaucgcuauccccaccaacuucaccaucagcgugaccaccgagauccugccuguguccaugaccaagaccagcguggacugcaccauguacaucugcggcgauuccaccgagugcuccaaccugcugcugcaguacggcagcuucugcacccagcugaauagagcccugacagggaucgccguggaacaggacaagaacacccaagagguguucgcccaagugaagcaaaucuacaagaccccuccuaucaaggacuucggcggcuucaauuucagccagauucugcccgauccuagcaagcccagcaagcggagcuucaucgaggaccugcuguucaacaaagugacacuggccgacgccggcuucaucaagcaguauggcgauugucugggcgacauugccgccagggaucugauuugcgcccagaaguuuaacggacugacagugcugccuccucugcugaccgaugagaugaucgcccaguacacaucugcccugcuggccggcacaaucacaagcggcuggacauuuggagcuggcgccgcucugcagauccccuuugcuaugcagauggccuaccgguucaacggcaucggagugacccagaaugugcuguacgagaaccagaagcugaucgccaaccaguucaacagcgccaucggcaagauccaggacagccugagcagcacagcaagcgcccugggaaagcugcaggacguggucaaccagaaugcccaggcacugaacacccuggucaagcagcuguccuccaacuucggcgccaucagcucugugcugaacgauauccugagcagacuggacccuccugaggccgaggugcagaucgacagacugaucacaggcagacugcagagccuccagacauacgugacccagcagcugaucagagccgccgagauuagagccucugccaaucuggccgccaccaagaugucugagugugugcugggccagagcaagagaguggacuuuugcggcaagggcuaccaccugaugagcuucccucagucugccccucacggcgugguguuucugcacgugacauaugugcccgcucaagagaagaauuucaccaccgcuccagccaucugccacgacggcaaagcccacuuuccuagagaaggcguguucguguccaacggcacccauugguucgugacacagcggaacuucuacgagccccagaucaucaccaccgacaacaccuucgugucuggcaacugcgacguugugaucggcauugugaacaauaccguguacgacccucugcagcccgagcuggacagcuucaaagaggaacuggacaaguacuuuaagaaccacacaagccccgacguggaccugggcgauaucagcggaaucaaugccagcgucgugaacauccagaaagagaucgaccggcugaacgagguggccaagaaucugaacgagagccugaucgaccugcaagaacuggggaaguacgagcaguacaucaaguggcccugguacaucuggcugggcuuuaucgccggacugauugccaucgugauggucacaaucaugcuguguugcaugaccagcugcuguagcugccugaagggcuguuguagcuguggcagcugcugcaaguucgacgaggacgauucugagcccgugcugaagggcgugaaacugcacuacaccugaggacuagucccuguucccagagcccacuuuuuuuucuuuuuuugaaauaaaauagccugucuuucagaucucaaaggcucuuuucagagccaccaaaaaaaaaaaaaaaaaaaaaaaaaaaaaaaaaaaaaaaaaaaaaaaaaaaaaaaaaaaaaaaaaaaaaaaaaaaaaaaaaaaaaaaaaaaaaaaaaaaaa

SEQ ID NO: 23600 - RNA, 4088 nt, Artificial Sequence
  SARS-CoV-2/Wuhan/WIV05/2019__EPI_ISL_402128 spike protein mRNA gc mod (1-1273)(K986P_V987P_H69del_V70del_Y453F_D614G_I692V_M1229I)
aggagagucccgcagucggcguccagcggcucugcuuguucgugugugugucguugcaggccuuauucaagcuuaccauguucguguuucuggugcugcugccccugguguccagccagugugugaaccugaccaccagaacacagcugccuccagccuacaccaacagcuucaccagaggcguguacuaccccgacaagguguucagauccagcgugcugcacucuacccaggaccuguuccugccuuucuucagcaacgugaccugguuccacgccaucuccggcaccaauggcaccaagagauucgacaaccccgugcugcccuucaacgacgggguguacuuugccagcaccgagaaguccaacaucaucagaggcuggaucuucggcaccacacuggacagcaagacccagagccugcugaucgugaacaacgccaccaacguggucaucaaagugugcgaguuccaguucugcaacgaccccuuccugggcgucuacuaccacaagaacaacaagagcuggauggaaagcgaguuccggguguacagcagcgccaacaacugcaccuucgaguacgugucccagccuuuccugauggaccuggaaggcaagcagggcaacuucaagaaccugcgcgaguucguguucaagaacaucgacggcuacuucaaaaucuacagcaagcacaccccuaucaaccucgugcgggaucugccucagggcuucucugcucuggaaccccugguggaucugcccaucggcaucaacaucacccgguuucagacacugcuggcccugcacagaagcuaccugacaccuggcgauagcagcagcggauggacagcuggugccgccgcuuacuaugugggcuaccugcagccuagaaccuuccugcugaaguacaacgagaacggcaccaucaccgacgccguggauugugcucuggauccucugagcgagacaaagugcacccugaaguccuucaccguggaaaagggcaucuaccagaccagcaacuuccgggugcagcccaccgaauccaucgugcgguuccccaauaucaccaaucugugccccuucggcgagguguucaaugccaccagauucgccucuguguacgccuggaaccggaagcggaucagcaauugcguggccgacuacuccgugcuguacaacuccgccagcuucagcaccuucaagugcuacggcguguccccuaccaagcugaacgaccugugcuucacaaacguguacgccgacagcuucgugauccggggagaugaagugcggcagauugccccuggacagacaggcaagaucgccgacuacaacuacaagcugcccgacgacuucaccggcugugugauugccuggaacagcaacaaccuggacuccaaagucggcggcaacuacaauuaccuguuccggcuguuccggaaguccaaucugaagcccuucgagcgggacaucagcaccgaaaucuaucaggccggcagcaccccuugcaacggcguggaaggcuucaacugcuacuucccacugcaguccuacggcuuucagcccacaaauggcgugggcuaucagcccuacagagugguggugcugagcuucgaacugcugcaugcuccugccacagugugcggcccuaagaaaagcaccaaucucgugaagaacaaaugcgugaacuucaacuucaacggccugaccggcaccggcgugcugacagagagcaacaagaaguuccugccauuccagcaguuuggccgggauaucgccgauaccacagacgccguuagagauccccagacacuggaaauccuggacaucaccccaugcagcuucggcggagugucugugaucaccccuggcaccaacaccagcaaucagguggcagugcuguaccagggcgugaacuguaccgaagugcccguggccauucacgccgaucagcugacaccuacauggcggguguacuccaccggcagcaauguguuucagaccagagccggcugucugaucggagccgagcacgugaacaauagcuacgagugcgacauccccaucggcgcuggcaucugugccagcuaccagacacagacaaacagccccagacgggcuagaagcguggccagccagagcgugauugccuacacaaugucucugggcgccgagaacagcguggccuacuccaacaacucuaucgcuauccccaccaacuucaccaucagcgugaccaccgagauccugccuguguccaugaccaagaccagcguggacugcaccauguacaucugcggcgauuccaccgagugcuccaaccugcugcugcaguacggcagcuucugcacccagcugaauagagcccugacagggaucgccguggaacaggacaagaacacccaagagguguucgcccaagugaagcaaaucuacaagaccccuccuaucaaggacuucggcggcuucaauuucagccagauucugcccgauccuagcaagcccagcaagcggagcuucaucgaggaccugcuguucaacaaagugacacuggccgacgccggcuucaucaagcaguauggcgauugucugggcgacauugccgccagggaucugauuugcgcccagaaguuuaacggacugacagugcugccuccucugcugaccgaugagaugaucgcccaguacacaucugcccugcuggccggcacaaucacaagcggcuggacauuuggagcuggcgccgcucugcagauccccuuugcuaugcagauggccuaccgguucaacggcaucggagugacccagaaugugcuguacgagaaccagaagcugaucgccaaccaguucaacagcgccaucggcaagauccaggacagccugagcagcacagcaagcgcccugggaaagcugcaggacguggucaaccagaaugcccaggcacugaacacccuggucaagcagcuguccuccaacuucggcgccaucagcucugugcugaacgauauccugagcagacuggacccuccugaggccgaggugcagaucgacagacugaucacaggcagacugcagagccuccagacauacgugacccagcagcugaucagagccgccgagauuagagccucugccaaucuggccgccaccaagaugucugagugugugcugggccagagcaagagaguggacuuuugcggcaagggcuaccaccugaugagcuucccucagucugccccucacggcgugguguuucugcacgugacauaugugcccgcucaagagaagaauuucaccaccgcuccagccaucugccacgacggcaaagcccacuuuccuagagaaggcguguucguguccaacggcacccauugguucgugacacagcggaacuucuacgagccccagaucaucaccaccgacaacaccuucgugucuggcaacugcgacguugugaucggcauugugaacaauaccguguacgacccucugcagcccgagcuggacagcuucaaagaggaacuggacaaguacuuuaagaaccacacaagccccgacguggaccugggcgauaucagcggaaucaaugccagcgucgugaacauccagaaagagaucgaccggcugaacgagguggccaagaaucugaacgagagccugaucgaccugcaagaacuggggaaguacgagcaguacaucaaguggcccugguacaucuggcugggcuuuaucgccggacugauugccaucgugaucgucacaaucaugcuguguugcaugaccagcugcuguagcugccugaagggcuguuguagcuguggcagcugcugcaaguucgacgaggacgauucugagcccgugcugaagggcgugaaacugcacuacaccugaggacuagucccuguucccagagcccacuuuuuuuucuuuuuuugaaauaaaauagccugucuuucagaucucaaaggcucuuuucagagccaccaaaaaaaaaaaaaaaaaaaaaaaaaaaaaaaaaaaaaaaaaaaaaaaaaaaaaaaaaaaaaaaaaaaaaaaaaaaaaaaaaaaaaaaaaaaaaaaaaaaaa

SEQ ID NO: 23601 - RNA, 4085 nt, Artificial Sequence
  SARS-CoV-2/Wuhan/WIV05/2019__EPI_ISL_402128 spike protein mRNA gc mod (1-1273)(K986P_V987P_K986P_V987P_H69del_V70del_Y144del_N501Y_A570 D_D614G_P681H_T716I_S982A_D1118H)
aggagagucccgcagucggcguccagcggcucugcuuguucgugugugugucguugcaggccuuauucaagcuuaccauguucguguuucuggugcugcugccccugguguccagccagugugugaaccugaccaccagaacacagcugccuccagccuacaccaacagcuucaccagaggcguguacuaccccgacaagguguucagauccagcgugcugcacucuacccaggaccuguuccugccuuucuucagcaacgugaccugguuccacgccaucuccggcaccaauggcaccaagagauucgacaaccccgugcugcccuucaacgacgggguguacuuugccagcaccgagaaguccaacaucaucagaggcuggaucuucggcaccacacuggacagcaagacccagagccugcugaucgugaacaacgccaccaacguggucaucaaagugugcgaguuccaguucugcaacgaccccuuccugggcgucuaccacaagaacaacaagagcuggauggaaagcgaguuccggguguacagcagcgccaacaacugcaccuucgaguacgugucccagccuuuccugauggaccuggaaggcaagcagggcaacuucaagaaccugcgcgaguucguguucaagaacaucgacggcuacuucaaaaucuacagcaagcacaccccuaucaaccucgugcgggaucugccucagggcuucucugcucuggaaccccugguggaucugcccaucggcaucaacaucacccgguuucagacacugcuggcccugcacagaagcuaccugacaccuggcgauagcagcagcggauggacagcuggugccgccgcuuacuaugugggcuaccugcagccuagaaccuuccugcugaaguacaacgagaacggcaccaucaccgacgccguggauugugcucuggauccucugagcgagacaaagugcacccugaaguccuucaccguggaaaagggcaucuaccagaccagcaacuuccgggugcagcccaccgaauccaucgugcgguuccccaauaucaccaaucugugccccuucggcgagguguucaaugccaccagauucgccucuguguacgccuggaaccggaagcggaucagcaauugcguggccgacuacuccgugcuguacaacuccgccagcuucagcaccuucaagugcuacggcguguccccuaccaagcugaacgaccugugcuucacaaacguguacgccgacagcuucgugauccggggagaugaagugcggcagauugccccuggacagacaggcaagaucgccgacuacaacuacaagcugcccgacgacuucaccggcugugugauugccuggaacagcaacaaccuggacuccaaagucggcggcaacuacaauuaccuguaccggcuguuccggaaguccaaucugaagcccuucgagcgggacaucagcaccgaaaucuaucaggccggcagcaccccuugcaacggcguggaaggcuucaacugcuacuucccacugcaguccuacggcuuucagcccacauacggcgugggcuaucagcccuacagagugguggugcugagcuucgaacugcugcaugcuccugccacagugugcggcccuaagaaaagcaccaaucucgugaagaacaaaugcgugaacuucaacuucaacggccugaccggcaccggcgugcugacagagagcaacaagaaguuccugccauuccagcaguuuggccgggauaucgacgauaccacagacgccguuagagauccccagacacuggaaauccuggacaucaccccaugcagcuucggcggagugucugugaucaccccuggcaccaacaccagcaaucagguggcagugcuguaccagggcgugaacuguaccgaagugcccguggccauucacgccgaucagcugacaccuacauggcggguguacuccaccggcagcaauguguuucagaccagagccggcugucugaucggagccgagcacgugaacaauagcuacgagugcgacauccccaucggcgcuggcaucugugccagcuaccagacacagacaaacagccacagacgggcuagaagcguggccagccagagcaucauugccuacacaaugucucugggcgccgagaacagcguggccuacuccaacaacucuaucgcuauccccaucaacuucaccaucagcgugaccaccgagauccugccuguguccaugaccaagaccagcguggacugcaccauguacaucugcggcgauuccaccgagugcuccaaccugcugcugcaguacggcagcuucugcacccagcugaauagagcccugacagggaucgccguggaacaggacaagaacacccaagagguguucgcccaagugaagcaaaucuacaagaccccuccuaucaaggacuucggcggcuucaauuucagccagauucugcccgauccuagcaagcccagcaagcggagcuucaucgaggaccugcuguucaacaaagugacacuggccgacgccggcuucaucaagcaguauggcgauugucugggcgacauugccgccagggaucugauuugcgcccagaaguuuaacggacugacagugcugccuccucugcugaccgaugagaugaucgcccaguacacaucugcccugcuggccggcacaaucacaagcggcuggacauuuggagcuggcgccgcucugcagauccccuuugcuaugcagauggccuaccgguucaacggcaucggagugacccagaaugugcuguacgagaaccagaagcugaucgccaaccaguucaacagcgccaucggcaagauccaggacagccugagcagcacagcaagcgcccugggaaagcugcaggacguggucaaccagaaugcccaggcacugaacacccuggucaagcagcuguccuccaacuucggcgccaucagcucugugcugaacgauauccuggccagacuggacccuccugaggccgaggugcagaucgacagacugaucacaggcagacugcagagccuccagacauacgugacccagcagcugaucagagccgccgagauuagagccucugccaaucuggccgccaccaagaugucugagugugugcugggccagagcaagagaguggacuuuugcggcaagggcuaccaccugaugagcuucccucagucugccccucacggcgugguguuucugcacgugacauaugugcccgcucaagagaagaauuucaccaccgcuccagccaucugccacgacggcaaagcccacuuuccuagagaaggcguguucguguccaacggcacccauugguucgugacacagcggaacuucuacgagccccagaucaucaccacccacaacaccuucgugucuggcaacugcgacguugugaucggcauugugaacaauaccguguacgacccucugcagcccgagcuggacagcuucaaagaggaacuggacaaguacuuuaagaaccacacaagccccgacguggaccugggcgauaucagcggaaucaaugccagcgucgugaacauccagaaagagaucgaccggcugaacgagguggccaagaaucugaacgagagccugaucgaccugcaagaacuggggaaguacgagcaguacaucaaguggcccugguacaucuggcugggcuuuaucgccggacugauugccaucgugauggucacaaucaugcuguguugcaugaccagcugcuguagcugccugaagggcuguuguagcuguggcagcugcugcaaguucgacgaggacgauucugagcccgugcugaagggcgugaaacugcacuacaccugaggacuagucccuguucccagagcccacuuuuuuuucuuuuuuugaaauaaaauagccugucuuucagaucucaaaggcucuuuucagagccaccaaaaaaaaaaaaaaaaaaaaaaaaaaaaaaaaaaaaaaaaaaaaaaaaaaaaaaaaaaaaaaaaaaaaaaaaaaaaaaaaaaaaaaaaaaaaaaaaaaaaa

SEQ ID NO: 23602 - RNA, 4094 nt, Artificial Sequence
  SARS-CoV-2/Wuhan/WIV05/2019__EPI_ISL_402128 spike protein mRNA gc mod (1-1273)(K986P_V987P_K986P_V987P_K417N_E484K_N501Y_D614G)
aggagagucccgcagucggcguccagcggcucugcuuguucgugugugugucguugcaggccuuauucaagcuuaccauguucguguuucuggugcugcugccccugguguccagccagugugugaaccugaccaccagaacacagcugccuccagccuacaccaacagcuucaccagaggcguguacuaccccgacaagguguucagauccagcgugcugcacucuacccaggaccuguuccugccuuucuucagcaacgugaccugguuccacgccauccacguguccggcaccaauggcaccaagagauucgacaaccccgugcugcccuucaacgacgggguguacuuugccagcaccgagaaguccaacaucaucagaggcuggaucuucggcaccacacuggacagcaagacccagagccugcugaucgugaacaacgccaccaacguggucaucaaagugugcgaguuccaguucugcaacgaccccuuccugggcgucuacuaccacaagaacaacaagagcuggauggaaagcgaguuccggguguacagcagcgccaacaacugcaccuucgaguacgugucccagccuuuccugauggaccuggaaggcaagcagggcaacuucaagaaccugcgcgaguucguguucaagaacaucgacggcuacuucaaaaucuacagcaagcacaccccuaucaaccucgugcgggaucugccucagggcuucucugcucuggaaccccugguggaucugcccaucggcaucaacaucacccgguuucagacacugcuggcccugcacagaagcuaccugacaccuggcgauagcagcagcggauggacagcuggugccgccgcuuacuaugugggcuaccugcagccuagaaccuuccugcugaaguacaacgagaacggcaccaucaccgacgccguggauugugcucuggauccucugagcgagacaaagugcacccugaaguccuucaccguggaaaagggcaucuaccagaccagcaacuuccgggugcagcccaccgaauccaucgugcgguuccccaauaucaccaaucugugccccuucggcgagguguucaaugccaccagauucgccucuguguacgccuggaaccggaagcggaucagcaauugcguggccgacuacuccgugcuguacaacuccgccagcuucagcaccuucaagugcuacggcguguccccuaccaagcugaacgaccugugcuucacaaacguguacgccgacagcuucgugauccggggagaugaagugcggcagauugccccuggacagacaggcaacaucgccgacuacaacuacaagcugcccgacgacuucaccggcugugugauugccuggaacagcaacaaccuggacuccaaagucggcggcaacuacaauuaccuguaccggcuguuccggaaguccaaucugaagcccuucgagcgggacaucagcaccgaaaucuaucaggccggcagcaccccuugcaacggcgugaagggcuucaacugcuacuucccacugcaguccuacggcuuucagcccacauacggcgugggcuaucagcccuacagagugguggugcugagcuucgaacugcugcaugcuccugccacagugugcggcccuaagaaaagcaccaaucucgugaagaacaaaugcgugaacuucaacuucaacggccugaccggcaccggcgugcugacagagagcaacaagaaguuccugccauuccagcaguuuggccgggauaucgccgauaccacagacgccguuagagauccccagacacuggaaauccuggacaucaccccaugcagcuucggcggagugucugugaucaccccuggcaccaacaccagcaaucagguggcagugcuguaccagggcgugaacuguaccgaagugcccguggccauucacgccgaucagcugacaccuacauggcggguguacuccaccggcagcaauguguuucagaccagagccggcugucugaucggagccgagcacgugaacaauagcuacgagugcgacauccccaucggcgcuggcaucugugccagcuaccagacacagacaaacagccccagacgggcuagaagcguggccagccagagcaucauugccuacacaaugucucugggcgccgagaacagcguggccuacuccaacaacucuaucgcuauccccaccaacuucaccaucagcgugaccaccgagauccugccuguguccaugaccaagaccagcguggacugcaccauguacaucugcggcgauuccaccgagugcuccaaccugcugcugcaguacggcagcuucugcacccagcugaauagagcccugacagggaucgccguggaacaggacaagaacacccaagagguguucgcccaagugaagcaaaucuacaagaccccuccuaucaaggacuucggcggcuucaauuucagccagauucugcccgauccuagcaagcccagcaagcggagcuucaucgaggaccugcuguucaacaaagugacacuggccgacgccggcuucaucaagcaguauggcgauugucugggcgacauugccgccagggaucugauuugcgcccagaaguuuaacggacugacagugcugccuccucugcugaccgaugagaugaucgcccaguacacaucugcccugcuggccggcacaaucacaagcggcuggacauuuggagcuggcgccgcucugcagauccccuuugcuaugcagauggccuaccgguucaacggcaucggagugacccagaaugugcuguacgagaaccagaagcugaucgccaaccaguucaacagcgccaucggcaagauccaggacagccugagcagcacagcaagcgcccugggaaagcugcaggacguggucaaccagaaugcccaggcacugaacacccuggucaagcagcuguccuccaacuucggcgccaucagcucugugcugaacgauauccugagcagacuggacccuccugaggccgaggugcagaucgacagacugaucacaggcagacugcagagccuccagacauacgugacccagcagcugaucagagccgccgagauuagagccucugccaaucuggccgccaccaagaugucugagugugugcugggccagagcaagagaguggacuuuugcggcaagggcuaccaccugaugagcuucccucagucugccccucacggcgugguguuucugcacgugacauaugugcccgcucaagagaagaauuucaccaccgcuccagccaucugccacgacggcaaagcccacuuuccuagagaaggcguguucguguccaacggcacccauugguucgugacacagcggaacuucuacgagccccagaucaucaccaccgacaacaccuucgugucuggcaacugcgacguugugaucggcauugugaacaauaccguguacgacccucugcagcccgagcuggacagcuucaaagaggaacuggacaaguacuuuaagaaccacacaagccccgacguggaccugggcgauaucagcggaaucaaugccagcgucgugaacauccagaaagagaucgaccggcugaacgagguggccaagaaucugaacgagagccugaucgaccugcaagaacuggggaaguacgagcaguacaucaaguggcccugguacaucuggcugggcuuuaucgccggacugauugccaucgugauggucacaaucaugcuguguugcaugaccagcugcuguagcugccugaagggcuguuguagcuguggcagcugcugcaaguucgacgaggacgauucugagcccgugcugaagggcgugaaacugcacuacaccugaggacuagucccuguucccagagcccacuuuuuuuucuuuuuuugaaauaaaauagccugucuuucagaucucaaaggcucuuuucagagccaccaaaaaaaaaaaaaaaaaaaaaaaaaaaaaaaaaaaaaaaaaaaaaaaaaaaaaaaaaaaaaaaaaaaaaaaaaaaaaaaaaaaaaaaaaaaaaaaaaaaaa

SEQ ID NO: 23603 - RNA, 4085 nt, Artificial Sequence
  SARS-CoV-2/Wuhan/WIV05/2019__EPI_ISL_402128 spike protein mRNA gc mod (1-1273)(K986P_V987P_K986P_V987P_L18F_D80A_D215G_L242del_A243del_ L244del_R246I_K417N_E484K_N501Y_D614G_A701V)
aggagagucccgcagucggcguccagcggcucugcuuguucgugugugugucguugcaggccuuauucaagcuuaccauguucguguuucuggugcugcugccccugguguccagccagugugugaacuucaccaccagaacacagcugccuccagccuacaccaacagcuucaccagaggcguguacuaccccgacaagguguucagauccagcgugcugcacucuacccaggaccuguuccugccuuucuucagcaacgugaccugguuccacgccauccacguguccggcaccaauggcaccaagagauucgccaaccccgugcugcccuucaacgacgggguguacuuugccagcaccgagaaguccaacaucaucagaggcuggaucuucggcaccacacuggacagcaagacccagagccugcugaucgugaacaacgccaccaacguggucaucaaagugugcgaguuccaguucugcaacgaccccuuccugggcgucuacuaccacaagaacaacaagagcuggauggaaagcgaguuccggguguacagcagcgccaacaacugcaccuucgaguacgugucccagccuuuccugauggaccuggaaggcaagcagggcaacuucaagaaccugcgcgaguucguguucaagaacaucgacggcuacuucaaaaucuacagcaagcacaccccuaucaaccucgugcggggccugccucagggcuucucugcucuggaaccccugguggaucugcccaucggcaucaacaucacccgguuucagacacugcacaucagcuaccugacaccuggcgauagcagcagcggauggacagcuggugccgccgcuuacuaugugggcuaccugcagccuagaaccuuccugcugaaguacaacgagaacggcaccaucaccgacgccguggauugugcucuggauccucugagcgagacaaagugcacccugaaguccuucaccguggaaaagggcaucuaccagaccagcaacuuccgggugcagcccaccgaauccaucgugcgguuccccaauaucaccaaucugugccccuucggcgagguguucaaugccaccagauucgccucuguguacgccuggaaccggaagcggaucagcaauugcguggccgacuacuccgugcuguacaacuccgccagcuucagcaccuucaagugcuacggcguguccccuaccaagcugaacgaccugugcuucacaaacguguacgccgacagcuucgugauccggggagaugaagugcggcagauugccccuggacagacaggcaacaucgccgacuacaacuacaagcugcccgacgacuucaccggcugugugauugccuggaacagcaacaaccuggacuccaaagucggcggcaacuacaauuaccuguaccggcuguuccggaaguccaaucugaagcccuucgagcgggacaucagcaccgaaaucuaucaggccggcagcaccccuugcaacggcgugaagggcuucaacugcuacuucccacugcaguccuacggcuuucagcccacauacggcgugggcuaucagcccuacagagugguggugcugagcuucgaacugcugcaugcuccugccacagugugcggcccuaagaaaagcaccaaucucgugaagaacaaaugcgugaacuucaacuucaacggccugaccggcaccggcgugcugacagagagcaacaagaaguuccugccauuccagcaguuuggccgggauaucgccgauaccacagacgccguuagagauccccagacacuggaaauccuggacaucaccccaugcagcuucggcggagugucugugaucaccccuggcaccaacaccagcaaucagguggcagugcuguaccagggcgugaacuguaccgaagugcccguggccauucacgccgaucagcugacaccuacauggcggguguacuccaccggcagcaauguguuucagaccagagccggcugucugaucggagccgagcacgugaacaauagcuacgagugcgacauccccaucggcgcuggcaucugugccagcuaccagacacagacaaacagccccagacgggcuagaagcguggccagccagagcaucauugccuacacaaugucucugggcguggagaacagcguggccuacuccaacaacucuaucgcuauccccaccaacuucaccaucagcgugaccaccgagauccugccuguguccaugaccaagaccagcguggacugcaccauguacaucugcggcgauuccaccgagugcuccaaccugcugcugcaguacggcagcuucugcacccagcugaauagagcccugacagggaucgccguggaacaggacaagaacacccaagagguguucgcccaagugaagcaaaucuacaagaccccuccuaucaaggacuucggcggcuucaauuucagccagauucugcccgauccuagcaagcccagcaagcggagcuucaucgaggaccugcuguucaacaaagugacacuggccgacgccggcuucaucaagcaguauggcgauugucugggcgacauugccgccagggaucugauuugcgcccagaaguuuaacggacugacagugcugccuccucugcugaccgaugagaugaucgcccaguacacaucugcccugcuggccggcacaaucacaagcggcuggacauuuggagcuggcgccgcucugcagauccccuuugcuaugcagauggccuaccgguucaacggcaucggagugacccagaaugugcuguacgagaaccagaagcugaucgccaaccaguucaacagcgccaucggcaagauccaggacagccugagcagcacagcaagcgcccugggaaagcugcaggacguggucaaccagaaugcccaggcacugaacacccuggucaagcagcuguccuccaacuucggcgccaucagcucugugcugaacgauauccugagcagacuggacccuccugaggccgaggugcagaucgacagacugaucacaggcagacugcagagccuccagacauacgugacccagcagcugaucagagccgccgagauuagagccucugccaaucuggccgccaccaagaugucugagugugugcugggccagagcaagagaguggacuuuugcggcaagggcuaccaccugaugagcuucccucagucugccccucacggcgugguguuucugcacgugacauaugugcccgcucaagagaagaauuucaccaccgcuccagccaucugccacgacggcaaagcccacuuuccuagagaaggcguguucguguccaacggcacccauugguucgugacacagcggaacuucuacgagccccagaucaucaccaccgacaacaccuucgugucuggcaacugcgacguugugaucggcauugugaacaauaccguguacgacccucugcagcccgagcuggacagcuucaaagaggaacuggacaaguacuuuaagaaccacacaagccccgacguggaccugggcgauaucagcggaaucaaugccagcgucgugaacauccagaaagagaucgaccggcugaacgagguggccaagaaucugaacgagagccugaucgaccugcaagaacuggggaaguacgagcaguacaucaaguggcccugguacaucuggcugggcuuuaucgccggacugauugccaucgugauggucacaaucaugcuguguugcaugaccagcugcuguagcugccugaagggcuguuguagcuguggcagcugcugcaaguucgacgaggacgauucugagcccgugcugaagggcgugaaacugcacuacaccugaggacuagucccuguucccagagcccacuuuuuuuucuuuuuuugaaauaaaauagccugucuuucagaucucaaaggcucuuuucagagccaccaaaaaaaaaaaaaaaaaaaaaaaaaaaaaaaaaaaaaaaaaaaaaaaaaaaaaaaaaaaaaaaaaaaaaaaaaaaaaaaaaaaaaaaaaaaaaaaaaaaaa

SEQ ID NO: 23604 - RNA, 4094 nt, Artificial Sequence
  SARS-CoV-2/Wuhan/WIV05/2019__EPI_ISL_402128 spike protein mRNA gc mod (1-1273)(K986P_V987P_K986P_V987P_E484K_D614G)
aggagagucccgcagucggcguccagcggcucugcuuguucgugugugugucguugcaggccuuauucaagcuuaccauguucguguuucuggugcugcugccccugguguccagccagugugugaaccugaccaccagaacacagcugccuccagccuacaccaacagcuucaccagaggcguguacuaccccgacaagguguucagauccagcgugcugcacucuacccaggaccuguuccugccuuucuucagcaacgugaccugguuccacgccauccacguguccggcaccaauggcaccaagagauucgacaaccccgugcugcccuucaacgacgggguguacuuugccagcaccgagaaguccaacaucaucagaggcuggaucuucggcaccacacuggacagcaagacccagagccugcugaucgugaacaacgccaccaacguggucaucaaagugugcgaguuccaguucugcaacgaccccuuccugggcgucuacuaccacaagaacaacaagagcuggauggaaagcgaguuccggguguacagcagcgccaacaacugcaccuucgaguacgugucccagccuuuccugauggaccuggaaggcaagcagggcaacuucaagaaccugcgcgaguucguguucaagaacaucgacggcuacuucaaaaucuacagcaagcacaccccuaucaaccucgugcgggaucugccucagggcuucucugcucuggaaccccugguggaucugcccaucggcaucaacaucacccgguuucagacacugcuggcccugcacagaagcuaccugacaccuggcgauagcagcagcggauggacagcuggugccgccgcuuacuaugugggcuaccugcagccuagaaccuuccugcugaaguacaacgagaacggcaccaucaccgacgccguggauugugcucuggauccucugagcgagacaaagugcacccugaaguccuucaccguggaaaagggcaucuaccagaccagcaacuuccgggugcagcccaccgaauccaucgugcgguuccccaauaucaccaaucugugccccuucggcgagguguucaaugccaccagauucgccucuguguacgccuggaaccggaagcggaucagcaauugcguggccgacuacuccgugcuguacaacuccgccagcuucagcaccuucaagugcuacggcguguccccuaccaagcugaacgaccugugcuucacaaacguguacgccgacagcuucgugauccggggagaugaagugcggcagauugccccuggacagacaggcaagaucgccgacuacaacuacaagcugcccgacgacuucaccggcugugugauugccuggaacagcaacaaccuggacuccaaagucggcggcaacuacaauuaccuguaccggcuguuccggaaguccaaucugaagcccuucgagcgggacaucagcaccgaaaucuaucaggccggcagcaccccuugcaacggcgugaagggcuucaacugcuacuucccacugcaguccuacggcuuucagcccacaaauggcgugggcuaucagcccuacagagugguggugcugagcuucgaacugcugcaugcuccugccacagugugcggcccuaagaaaagcaccaaucucgugaagaacaaaugcgugaacuucaacuucaacggccugaccggcaccggcgugcugacagagagcaacaagaaguuccugccauuccagcaguuuggccgggauaucgccgauaccacagacgccguuagagauccccagacacuggaaauccuggacaucaccccaugcagcuucggcggagugucugugaucaccccuggcaccaacaccagcaaucagguggcagugcuguaccagggcgugaacuguaccgaagugcccguggccauucacgccgaucagcugacaccuacauggcggguguacuccaccggcagcaauguguuucagaccagagccggcugucugaucggagccgagcacgugaacaauagcuacgagugcgacauccccaucggcgcuggcaucugugccagcuaccagacacagacaaacagccccagacgggcuagaagcguggccagccagagcaucauugccuacacaaugucucugggcgccgagaacagcguggccuacuccaacaacucuaucgcuauccccaccaacuucaccaucagcgugaccaccgagauccugccuguguccaugaccaagaccagcguggacugcaccauguacaucugcggcgauuccaccgagugcuccaaccugcugcugcaguacggcagcuucugcacccagcugaauagagcccugacagggaucgccguggaacaggacaagaacacccaagagguguucgcccaagugaagcaaaucuacaagaccccuccuaucaaggacuucggcggcuucaauuucagccagauucugcccgauccuagcaagcccagcaagcggagcuucaucgaggaccugcuguucaacaaagugacacuggccgacgccggcuucaucaagcaguauggcgauugucugggcgacauugccgccagggaucugauuugcgcccagaaguuuaacggacugacagugcugccuccucugcugaccgaugagaugaucgcccaguacacaucugcccugcuggccggcacaaucacaagcggcuggacauuuggagcuggcgccgcucugcagauccccuuugcuaugcagauggccuaccgguucaacggcaucggagugacccagaaugugcuguacgagaaccagaagcugaucgccaaccaguucaacagcgccaucggcaagauccaggacagccugagcagcacagcaagcgcccugggaaagcugcaggacguggucaaccagaaugcccaggcacugaacacccuggucaagcagcuguccuccaacuucggcgccaucagcucugugcugaacgauauccugagcagacuggacccuccugaggccgaggugcagaucgacagacugaucacaggcagacugcagagccuccagacauacgugacccagcagcugaucagagccgccgagauuagagccucugccaaucuggccgccaccaagaugucugagugugugcugggccagagcaagagaguggacuuuugcggcaagggcuaccaccugaugagcuucccucagucugccccucacggcgugguguuucugcacgugacauaugugcccgcucaagagaagaauuucaccaccgcuccagccaucugccacgacggcaaagcccacuuuccuagagaaggcguguucguguccaacggcacccauugguucgugacacagcggaacuucuacgagccccagaucaucaccaccgacaacaccuucgugucuggcaacugcgacguugugaucggcauugugaacaauaccguguacgacccucugcagcccgagcuggacagcuucaaagaggaacuggacaaguacuuuaagaaccacacaagccccgacguggaccugggcgauaucagcggaaucaaugccagcgucgugaacauccagaaagagaucgaccggcugaacgagguggccaagaaucugaacgagagccugaucgaccugcaagaacuggggaaguacgagcaguacaucaaguggcccugguacaucuggcugggcuuuaucgccggacugauugccaucgugauggucacaaucaugcuguguugcaugaccagcugcuguagcugccugaagggcuguuguagcuguggcagcugcugcaaguucgacgaggacgauucugagcccgugcugaagggcgugaaacugcacuacaccugaggacuagucccuguucccagagcccacuuuuuuuucuuuuuuugaaauaaaauagccugucuuucagaucucaaaggcucuuuucagagccaccaaaaaaaaaaaaaaaaaaaaaaaaaaaaaaaaaaaaaaaaaaaaaaaaaaaaaaaaaaaaaaaaaaaaaaaaaaaaaaaaaaaaaaaaaaaaaaaaaaaaa

SEQ ID NO: 23605 - RNA, 4094 nt, Artificial Sequence
  SARS-CoV-2/Wuhan/WIV05/2019__EPI_ISL_402128 spike protein mRNA gc mod (1-1273)(K986P_V987P_K986P_V987P_L18F_T20N_P26S_D138Y_R190S_K417T _E484K_N501Y_D614G_H655Y_T1027I)
aggagagucccgcagucggcguccagcggcucugcuuguucgugugugugucguugcaggccuuauucaagcuuaccauguucguguuucuggugcugcugccccugguguccagccagugugugaacuucaccaacagaacacagcugccuagcgccuacaccaacagcuucaccagaggcguguacuaccccgacaagguguucagauccagcgugcugcacucuacccaggaccuguuccugccuuucuucagcaacgugaccugguuccacgccauccacguguccggcaccaauggcaccaagagauucgacaaccccgugcugcccuucaacgacgggguguacuuugccagcaccgagaaguccaacaucaucagaggcuggaucuucggcaccacacuggacagcaagacccagagccugcugaucgugaacaacgccaccaacguggucaucaaagugugcgaguuccaguucugcaacuaccccuuccugggcgucuacuaccacaagaacaacaagagcuggauggaaagcgaguuccggguguacagcagcgccaacaacugcaccuucgaguacgugucccagccuuuccugauggaccuggaaggcaagcagggcaacuucaagaaccugagcgaguucguguucaagaacaucgacggcuacuucaaaaucuacagcaagcacaccccuaucaaccucgugcgggaucugccucagggcuucucugcucuggaaccccugguggaucugcccaucggcaucaacaucacccgguuucagacacugcuggcccugcacagaagcuaccugacaccuggcgauagcagcagcggauggacagcuggugccgccgcuuacuaugugggcuaccugcagccuagaaccuuccugcugaaguacaacgagaacggcaccaucaccgacgccguggauugugcucuggauccucugagcgagacaaagugcacccugaaguccuucaccguggaaaagggcaucuaccagaccagcaacuuccgggugcagcccaccgaauccaucgugcgguuccccaauaucaccaaucugugccccuucggcgagguguucaaugccaccagauucgccucuguguacgccuggaaccggaagcggaucagcaauugcguggccgacuacuccgugcuguacaacuccgccagcuucagcaccuucaagugcuacggcguguccccuaccaagcugaacgaccugugcuucacaaacguguacgccgacagcuucgugauccggggagaugaagugcggcagauugccccuggacagacaggcaccaucgccgacuacaacuacaagcugcccgacgacuucaccggcugugugauugccuggaacagcaacaaccuggacuccaaagucggcggcaacuacaauuaccuguaccggcuguuccggaaguccaaucugaagcccuucgagcgggacaucagcaccgaaaucuaucaggccggcagcaccccuugcaacggcgugaagggcuucaacugcuacuucccacugcaguccuacggcuuucagcccacauacggcgugggcuaucagcccuacagagugguggugcugagcuucgaacugcugcaugcuccugccacagugugcggcccuaagaaaagcaccaaucucgugaagaacaaaugcgugaacuucaacuucaacggccugaccggcaccggcgugcugacagagagcaacaagaaguuccugccauuccagcaguuuggccgggauaucgccgauaccacagacgccguuagagauccccagacacuggaaauccuggacaucaccccaugcagcuucggcggagugucugugaucaccccuggcaccaacaccagcaaucagguggcagugcuguaccagggcgugaacuguaccgaagugcccguggccauucacgccgaucagcugacaccuacauggcggguguacuccaccggcagcaauguguuucagaccagagccggcugucugaucggagccgaguacgugaacaauagcuacgagugcgacauccccaucggcgcuggcaucugugccagcuaccagacacagacaaacagccccagacgggcuagaagcguggccagccagagcaucauugccuacacaaugucucugggcgccgagaacagcguggccuacuccaacaacucuaucgcuauccccaccaacuucaccaucagcgugaccaccgagauccugccuguguccaugaccaagaccagcguggacugcaccauguacaucugcggcgauuccaccgagugcuccaaccugcugcugcaguacggcagcuucugcacccagcugaauagagcccugacagggaucgccguggaacaggacaagaacacccaagagguguucgcccaagugaagcaaaucuacaagaccccuccuaucaaggacuucggcggcuucaauuucagccagauucugcccgauccuagcaagcccagcaagcggagcuucaucgaggaccugcuguucaacaaagugacacuggccgacgccggcuucaucaagcaguauggcgauugucugggcgacauugccgccagggaucugauuugcgcccagaaguuuaacggacugacagugcugccuccucugcugaccgaugagaugaucgcccaguacacaucugcccugcuggccggcacaaucacaagcggcuggacauuuggagcuggcgccgcucugcagauccccuuugcuaugcagauggccuaccgguucaacggcaucggagugacccagaaugugcuguacgagaaccagaagcugaucgccaaccaguucaacagcgccaucggcaagauccaggacagccugagcagcacagcaagcgcccugggaaagcugcaggacguggucaaccagaaugcccaggcacugaacacccuggucaagcagcuguccuccaacuucggcgccaucagcucugugcugaacgauauccugagcagacuggacccuccugaggccgaggugcagaucgacagacugaucacaggcagacugcagagccuccagacauacgugacccagcagcugaucagagccgccgagauuagagccucugccaaucuggccgccaucaagaugucugagugugugcugggccagagcaagagaguggacuuuugcggcaagggcuaccaccugaugagcuucccucagucugccccucacggcgugguguuucugcacgugacauaugugcccgcucaagagaagaauuucaccaccgcuccagccaucugccacgacggcaaagcccacuuuccuagagaaggcguguucguguccaacggcacccauugguucgugacacagcggaacuucuacgagccccagaucaucaccaccgacaacaccuucgugucuggcaacugcgacguugugaucggcauugugaacaauaccguguacgacccucugcagcccgagcuggacagcuucaaagaggaacuggacaaguacuuuaagaaccacacaagccccgacguggaccugggcgauaucagcggaaucaaugccagcgucgugaacauccagaaagagaucgaccggcugaacgagguggccaagaaucugaacgagagccugaucgaccugcaagaacuggggaaguacgagcaguacaucaaguggcccugguacaucuggcugggcuuuaucgccggacugauugccaucgugauggucacaaucaugcuguguugcaugaccagcugcuguagcugccugaagggcuguuguagcuguggcagcugcugcaaguucgacgaggacgauucugagcccgugcugaagggcgugaaacugcacuacaccugaggacuagucccuguucccagagcccacuuuuuuuucuuuuuuugaaauaaaauagccugucuuucagaucucaaaggcucuuuucagagccaccaaaaaaaaaaaaaaaaaaaaaaaaaaaaaaaaaaaaaaaaaaaaaaaaaaaaaaaaaaaaaaaaaaaaaaaaaaaaaaaaaaaaaaaaaaaaaaaaaaaaa

SEQ ID NO: 23606 - RNA, 4094 nt, Artificial Sequence
  SARS-CoV-2/Wuhan/WIV05/2019__EPI_ISL_402128 spike protein mRNA gc mod (1-1273)(K986P_V987P_K986P_V987P_S13I_W152C_L452R_D614G)
aggagagucccgcagucggcguccagcggcucugcuuguucgugugugugucguugcaggccuuauucaagcuuaccauguucguguuucuggugcugcugccccugguguccauccagugugugaaccugaccaccagaacacagcugccuccagccuacaccaacagcuucaccagaggcguguacuaccccgacaagguguucagauccagcgugcugcacucuacccaggaccuguuccugccuuucuucagcaacgugaccugguuccacgccauccacguguccggcaccaauggcaccaagagauucgacaaccccgugcugcccuucaacgacgggguguacuuugccagcaccgagaaguccaacaucaucagaggcuggaucuucggcaccacacuggacagcaagacccagagccugcugaucgugaacaacgccaccaacguggucaucaaagugugcgaguuccaguucugcaacgaccccuuccugggcgucuacuaccacaagaacaacaagagcugcauggaaagcgaguuccggguguacagcagcgccaacaacugcaccuucgaguacgugucccagccuuuccugauggaccuggaaggcaagcagggcaacuucaagaaccugcgcgaguucguguucaagaacaucgacggcuacuucaaaaucuacagcaagcacaccccuaucaaccucgugcgggaucugccucagggcuucucugcucuggaaccccugguggaucugcccaucggcaucaacaucacccgguuucagacacugcuggcccugcacagaagcuaccugacaccuggcgauagcagcagcggauggacagcuggugccgccgcuuacuaugugggcuaccugcagccuagaaccuuccugcugaaguacaacgagaacggcaccaucaccgacgccguggauugugcucuggauccucugagcgagacaaagugcacccugaaguccuucaccguggaaaagggcaucuaccagaccagcaacuuccgggugcagcccaccgaauccaucgugcgguuccccaauaucaccaaucugugccccuucggcgagguguucaaugccaccagauucgccucuguguacgccuggaaccggaagcggaucagcaauugcguggccgacuacuccgugcuguacaacuccgccagcuucagcaccuucaagugcuacggcguguccccuaccaagcugaacgaccugugcuucacaaacguguacgccgacagcuucgugauccggggagaugaagugcggcagauugccccuggacagacaggcaagaucgccgacuacaacuacaagcugcccgacgacuucaccggcugugugauugccuggaacagcaacaaccuggacuccaaagucggcggcaacuacaauuaccgcuaccggcuguuccggaaguccaaucugaagcccuucgagcgggacaucagcaccgaaaucuaucaggccggcagcaccccuugcaacggcguggaaggcuucaacugcuacuucccacugcaguccuacggcuuucagcccacaaauggcgugggcuaucagcccuacagagugguggugcugagcuucgaacugcugcaugcuccugccacagugugcggcccuaagaaaagcaccaaucucgugaagaacaaaugcgugaacuucaacuucaacggccugaccggcaccggcgugcugacagagagcaacaagaaguuccugccauuccagcaguuuggccgggauaucgccgauaccacagacgccguuagagauccccagacacuggaaauccuggacaucaccccaugcagcuucggcggagugucugugaucaccccuggcaccaacaccagcaaucagguggcagugcuguaccagggcgugaacuguaccgaagugcccguggccauucacgccgaucagcugacaccuacauggcggguguacuccaccggcagcaauguguuucagaccagagccggcugucugaucggagccgagcacgugaacaauagcuacgagugcgacauccccaucggcgcuggcaucugugccagcuaccagacacagacaaacagccccagacgggcuagaagcguggccagccagagcaucauugccuacacaaugucucugggcgccgagaacagcguggccuacuccaacaacucuaucgcuauccccaccaacuucaccaucagcgugaccaccgagauccugccuguguccaugaccaagaccagcguggacugcaccauguacaucugcggcgauuccaccgagugcuccaaccugcugcugcaguacggcagcuucugcacccagcugaauagagcccugacagggaucgccguggaacaggacaagaacacccaagagguguucgcccaagugaagcaaaucuacaagaccccuccuaucaaggacuucggcggcuucaauuucagccagauucugcccgauccuagcaagcccagcaagcggagcuucaucgaggaccugcuguucaacaaagugacacuggccgacgccggcuucaucaagcaguauggcgauugucugggcgacauugccgccagggaucugauuugcgcccagaaguuuaacggacugacagugcugccuccucugcugaccgaugagaugaucgcccaguacacaucugcccugcuggccggcacaaucacaagcggcuggacauuuggagcuggcgccgcucugcagauccccuuugcuaugcagauggccuaccgguucaacggcaucggagugacccagaaugugcuguacgagaaccagaagcugaucgccaaccaguucaacagcgccaucggcaagauccaggacagccugagcagcacagcaagcgcccugggaaagcugcaggacguggucaaccagaaugcccaggcacugaacacccuggucaagcagcuguccuccaacuucggcgccaucagcucugugcugaacgauauccugagcagacuggacccuccugaggccgaggugcagaucgacagacugaucacaggcagacugcagagccuccagacauacgugacccagcagcugaucagagccgccgagauuagagccucugccaaucuggccgccaccaagaugucugagugugugcugggccagagcaagagaguggacuuuugcggcaagggcuaccaccugaugagcuucccucagucugccccucacggcgugguguuucugcacgugacauaugugcccgcucaagagaagaauuucaccaccgcuccagccaucugccacgacggcaaagcccacuuuccuagagaaggcguguucguguccaacggcacccauugguucgugacacagcggaacuucuacgagccccagaucaucaccaccgacaacaccuucgugucuggcaacugcgacguugugaucggcauugugaacaauaccguguacgacccucugcagcccgagcuggacagcuucaaagaggaacuggacaaguacuuuaagaaccacacaagccccgacguggaccugggcgauaucagcggaaucaaugccagcgucgugaacauccagaaagagaucgaccggcugaacgagguggccaagaaucugaacgagagccugaucgaccugcaagaacuggggaaguacgagcaguacaucaaguggcccugguacaucuggcugggcuuuaucgccggacugauugccaucgugauggucacaaucaugcuguguugcaugaccagcugcuguagcugccugaagggcuguuguagcuguggcagcugcugcaaguucgacgaggacgauucugagcccgugcugaagggcgugaaacugcacuacaccugaggacuagucccuguucccagagcccacuuuuuuuucuuuuuuugaaauaaaauagccugucuuucagaucucaaaggcucuuuucagagccaccaaaaaaaaaaaaaaaaaaaaaaaaaaaaaaaaaaaaaaaaaaaaaaaaaaaaaaaaaaaaaaaaaaaaaaaaaaaaaaaaaaaaaaaaaaaaaaaaaaaaa

SEQ ID NO: 23607 - RNA, 4094 nt, Artificial Sequence
  SARS-CoV-2/Wuhan/WIV05/2019__EPI_ISL_402128 spike protein mRNA gc mod (1-1273)(K986P_V987P)
aggagagucccgcagucggcguccagcggcucugcuuguucgugugugugucguugcaggccuuauucaagcuuaccauguucguguuccuggugcugcugccucugguguccagccagugugugaaccugaccaccagaacacagcugccuccagccuacaccaacagcuuuaccagaggcguguacuaccccgacaagguguucagauccagcgugcugcacucuacccaggaccuguuccugccuuucuucagcaacgugaccugguuccacgccauccacguguccggcaccaauggcaccaagagauucgacaaccccgugcugcccuucaacgacgggguguacuuugccagcaccgagaaguccaacaucaucagaggcuggaucuucggcaccacacuggacagcaagacccagagccugcugaucgugaacaacgccaccaacguggucaucaaagugugcgaguuccaguucugcaacgaccccuuccugggcgucuacuaccacaagaacaacaagagcuggauggaaagcgaguuccggguguacagcagcgccaacaacugcaccuucgaguacgugucccagccuuuccugauggaccuggaaggcaagcagggcaacuucaagaaccugcgcgaguucguguuuaagaacaucgacggcuacuucaagaucuacagcaagcacaccccuaucaaccucgugcgggaucugccucagggcuucucugcucuggaaccccugguggaucugcccaucggcaucaacaucacccgguuucagacacugcuggcccugcacagaagcuaccugacaccuggcgauagcagcagcggauggacagcuggugccgccgcuuacuaugugggcuaccugcagccuagaaccuuccugcugaaguacaacgagaacggcaccaucaccgacgccguggauugugcucuggauccucugagcgagacaaagugcacccugaaguccuucaccguggaaaagggcaucuaccagaccagcaacuuccgggugcagcccaccgaauccaucgugcgguuccccaauaucaccaaucugugccccuucggcgagguguucaaugccaccagauucgccucuguguacgccuggaaccggaagcggaucagcaauugcguggccgacuacuccgugcuguacaacuccgccagcuucagcaccuucaagugcuacggcguguccccuaccaagcugaacgaccugugcuucacaaacguguacgccgacagcuucgugauccggggagaugaagugcggcagauugccccuggacagacaggcaagaucgccgacuacaacuacaagcugcccgacgacuucaccggcugugugauugccuggaacagcaacaaccuggacuccaaagucggcggcaacuacaauuaccuguaccggcuguuccggaaguccaaucugaagcccuucgagcgggacaucuccaccgagaucuaucaggccggcagcaccccuuguaacggcguggaaggcuucaacugcuacuucccacugcaguccuacggcuuucagcccacaaauggcgugggcuaucagcccuacagagugguggugcugagcuucgaacugcugcaugccccugccacagugugcggcccuaagaaaagcaccaaucucgugaagaacaaaugcgugaacuucaacuucaacggccugaccggcaccggcgugcugacagagagcaacaagaaguuccugccauuccagcaguuuggccgggauaucgccgauaccacagacgccguuagagauccccagacacuggaaauccuggacaucaccccuugcagcuucggcggagugucugugaucaccccuggcaccaacaccagcaaucagguggcagugcuguaccaggacgugaacuguaccgaagugcccguggccauucacgccgaucagcugacaccuacauggcggguguacuccaccggcagcaauguguuucagaccagagccggcugucugaucggagccgagcacgugaacaauagcuacgagugcgacauccccaucggcgcuggaaucugcgccagcuaccagacacagacaaacagcccucggagagccagaagcguggccagccagagcaucauugccuacacaaugucucugggcgccgagaacagcguggccuacuccaacaacucuaucgcuauccccaccaacuucaccaucagcgugaccacagagauccugccuguguccaugaccaagaccagcguggacugcaccauguacaucugcggcgauuccaccgagugcuccaaccugcugcugcaguacggcagcuucugcacccagcugaauagagcccugacagggaucgccguggaacaggacaagaacacccaagagguguucgcccaagugaagcagaucuacaagaccccuccuaucaaggacuucggcggcuucaauuucagccagauucugcccgauccuagcaagcccagcaagcggagcuucaucgaggaccugcuguucaacaaagugacacuggccgacgccggcuucaucaagcaguauggcgauugucugggcgacauugccgccagggaucugauuugcgcccagaaguuuaacggacugacagugcugccuccucugcugaccgaugagaugaucgcccaguacacaucugcccugcuggccggcacaaucacaagcggcuggacauuuggagcaggcgccgcucugcagauccccuuugcuaugcagauggccuaccgguucaacggcaucggagugacccagaaugugcuguacgagaaccagaagcugaucgccaaccaguucaacagcgccaucggcaagauccaggacagccugagcagcacagcaagcgcccugggaaagcugcaggacguggucaaccagaaugcccaggcacugaacacccuggucaagcagcuguccuccaacuucggcgccaucagcucugugcugaacgauauccugagcagacuggacccuccugaggccgaggugcagaucgacagacugaucacaggcagacugcagagccuccagacauacgugacccagcagcugaucagagccgccgagauuagagccucugccaaucuggccgccaccaagaugucugagugugugcugggccagagcaagagaguggacuuuugcggcaagggcuaccaccugaugagcuucccucagucugccccucacggcgugguguuucugcacgugacauaugugcccgcucaagagaagaauuucaccaccgcuccagccaucugccacgacggcaaagcccacuuuccuagagaaggcguguucguguccaacggcacccauugguucgugacacagcggaacuucuacgagccccagaucaucaccaccgacaacaccuucgugucuggcaacugcgacgucgugaucggcauugugaacaauaccguguacgacccucugcagcccgagcuggacagcuucaaagaggaacuggacaaguacuuuaagaaccacacaagccccgacguggaccugggcgauaucagcggaaucaaugccagcgucgugaacauccagaaagagaucgaccggcugaacgagguggccaagaaucugaacgagagccugaucgaccugcaagaacuggggaaguacgagcaguacaucaaguggcccugguacaucuggcugggcuuuaucgccggacugauugccaucgugauggucacaaucaugcuguguugcaugaccagcugcuguagcugccugaagggcuguuguagcuguggcagcugcugcaaguucgacgaggacgauucugagcccgugcugaagggcgugaaacugcacuacacaugaggacuagucccuguucccagagcccacuuuuuuuucuuuuuuugaaauaaaauagccugucuuucagaucucaaaggcucuuuucagagccaccaaaaaaaaaaaaaaaaaaaaaaaaaaaaaaaaaaaaaaaaaaaaaaaaaaaaaaaaaaaaaaaaaaaaaaaaaaaaaaaaaaaaaaaaaaaaaaaaaaaaa

SEQ ID NO: 23608 - RNA, 4094 nt, Artificial Sequence
  SARS-CoV-2/Wuhan/WIV05/2019__EPI_ISL_402128 spike protein mRNA gc mod (1-1273)(K986P_V987P_ D614G)
aggagagucccgcagucggcguccagcggcucugcuuguucgugugugugucguugcaggccuuauucaagcuuaccauguucguguuccuggugcugcugccucugguguccagccagugugugaaccugaccaccagaacacagcugccuccagccuacaccaacagcuuuaccagaggcguguacuaccccgacaagguguucagauccagcgugcugcacucuacccaggaccuguuccugccuuucuucagcaacgugaccugguuccacgccauccacguguccggcaccaauggcaccaagagauucgacaaccccgugcugcccuucaacgacgggguguacuuugccagcaccgagaaguccaacaucaucagaggcuggaucuucggcaccacacuggacagcaagacccagagccugcugaucgugaacaacgccaccaacguggucaucaaagugugcgaguuccaguucugcaacgaccccuuccugggcgucuacuaccacaagaacaacaagagcuggauggaaagcgaguuccggguguacagcagcgccaacaacugcaccuucgaguacgugucccagccuuuccugauggaccuggaaggcaagcagggcaacuucaagaaccugcgcgaguucguguuuaagaacaucgacggcuacuucaagaucuacagcaagcacaccccuaucaaccucgugcgggaucugccucagggcuucucugcucuggaaccccugguggaucugcccaucggcaucaacaucacccgguuucagacacugcuggcccugcacagaagcuaccugacaccuggcgauagcagcagcggauggacagcuggugccgccgcuuacuaugugggcuaccugcagccuagaaccuuccugcugaaguacaacgagaacggcaccaucaccgacgccguggauugugcucuggauccucugagcgagacaaagugcacccugaaguccuucaccguggaaaagggcaucuaccagaccagcaacuuccgggugcagcccaccgaauccaucgugcgguuccccaauaucaccaaucugugccccuucggcgagguguucaaugccaccagauucgccucuguguacgccuggaaccggaagcggaucagcaauugcguggccgacuacuccgugcuguacaacuccgccagcuucagcaccuucaagugcuacggcguguccccuaccaagcugaacgaccugugcuucacaaacguguacgccgacagcuucgugauccggggagaugaagugcggcagauugccccuggacagacaggcaagaucgccgacuacaacuacaagcugcccgacgacuucaccggcugugugauugccuggaacagcaacaaccuggacuccaaagucggcggcaacuacaauuaccuguaccggcuguuccggaaguccaaucugaagcccuucgagcgggacaucuccaccgagaucuaucaggccggcagcaccccuuguaacggcguggaaggcuucaacugcuacuucccacugcaguccuacggcuuucagcccacaaauggcgugggcuaucagcccuacagagugguggugcugagcuucgaacugcugcaugccccugccacagugugcggcccuaagaaaagcaccaaucucgugaagaacaaaugcgugaacuucaacuucaacggccugaccggcaccggcgugcugacagagagcaacaagaaguuccugccauuccagcaguuuggccgggauaucgccgauaccacagacgccguuagagauccccagacacuggaaauccuggacaucaccccuugcagcuucggcggagugucugugaucaccccuggcaccaacaccagcaaucagguggcagugcuguaccagggcgugaacuguaccgaagugcccguggccauucacgccgaucagcugacaccuacauggcggguguacuccaccggcagcaauguguuucagaccagagccggcugucugaucggagccgagcacgugaacaauagcuacgagugcgacauccccaucggcgcuggaaucugcgccagcuaccagacacagacaaacagcccucggagagccagaagcguggccagccagagcaucauugccuacacaaugucucugggcgccgagaacagcguggccuacuccaacaacucuaucgcuauccccaccaacuucaccaucagcgugaccacagagauccugccuguguccaugaccaagaccagcguggacugcaccauguacaucugcggcgauuccaccgagugcuccaaccugcugcugcaguacggcagcuucugcacccagcugaauagagcccugacagggaucgccguggaacaggacaagaacacccaagagguguucgcccaagugaagcagaucuacaagaccccuccuaucaaggacuucggcggcuucaauuucagccagauucugcccgauccuagcaagcccagcaagcggagcuucaucgaggaccugcuguucaacaaagugacacuggccgacgccggcuucaucaagcaguauggcgauugucugggcgacauugccgccagggaucugauuugcgcccagaaguuuaacggacugacagugcugccuccucugcugaccgaugagaugaucgcccaguacacaucugcccugcuggccggcacaaucacaagcggcuggacauuuggagcaggcgccgcucugcagauccccuuugcuaugcagauggccuaccgguucaacggcaucggagugacccagaaugugcuguacgagaaccagaagcugaucgccaaccaguucaacagcgccaucggcaagauccaggacagccugagcagcacagcaagcgcccugggaaagcugcaggacguggucaaccagaaugcccaggcacugaacacccuggucaagcagcuguccuccaacuucggcgccaucagcucugugcugaacgauauccugagcagacuggacccuccugaggccgaggugcagaucgacagacugaucacaggcagacugcagagccuccagacauacgugacccagcagcugaucagagccgccgagauuagagccucugccaaucuggccgccaccaagaugucugagugugugcugggccagagcaagagaguggacuuuugcggcaagggcuaccaccugaugagcuucccucagucugccccucacggcgugguguuucugcacgugacauaugugcccgcucaagagaagaauuucaccaccgcuccagccaucugccacgacggcaaagcccacuuuccuagagaaggcguguucguguccaacggcacccauugguucgugacacagcggaacuucuacgagccccagaucaucaccaccgacaacaccuucgugucuggcaacugcgacgucgugaucggcauugugaacaauaccguguacgacccucugcagcccgagcuggacagcuucaaagaggaacuggacaaguacuuuaagaaccacacaagccccgacguggaccugggcgauaucagcggaaucaaugccagcgucgugaacauccagaaagagaucgaccggcugaacgagguggccaagaaucugaacgagagccugaucgaccugcaagaacuggggaaguacgagcaguacaucaaguggcccugguacaucuggcugggcuuuaucgccggacugauugccaucgugauggucacaaucaugcuguguugcaugaccagcugcuguagcugccugaagggcuguuguagcuguggcagcugcugcaaguucgacgaggacgauucugagcccgugcugaagggcgugaaacugcacuacacaugaggacuagucccuguucccagagcccacuuuuuuuucuuuuuuugaaauaaaauagccugucuuucagaucucaaaggcucuuuucagagccaccaaaaaaaaaaaaaaaaaaaaaaaaaaaaaaaaaaaaaaaaaaaaaaaaaaaaaaaaaaaaaaaaaaaaaaaaaaaaaaaaaaaaaaaaaaaaaaaaaaaaa

SEQ ID NO: 23609 - RNA, 4094 nt, Artificial Sequence
  SARS-CoV-2/Wuhan/WIV05/2019__EPI_ISL_402128 spike protein mRNA gc mod (1-1273)(K986P_V987P_A222V_D614G)
aggagagucccgcagucggcguccagcggcucugcuuguucgugugugugucguugcaggccuuauucaagcuuaccauguucguguuccuggugcugcugccucugguguccagccagugugugaaccugaccaccagaacacagcugccuccagccuacaccaacagcuuuaccagaggcguguacuaccccgacaagguguucagauccagcgugcugcacucuacccaggaccuguuccugccuuucuucagcaacgugaccugguuccacgccauccacguguccggcaccaauggcaccaagagauucgacaaccccgugcugcccuucaacgacgggguguacuuugccagcaccgagaaguccaacaucaucagaggcuggaucuucggcaccacacuggacagcaagacccagagccugcugaucgugaacaacgccaccaacguggucaucaaagugugcgaguuccaguucugcaacgaccccuuccugggcgucuacuaccacaagaacaacaagagcuggauggaaagcgaguuccggguguacagcagcgccaacaacugcaccuucgaguacgugucccagccuuuccugauggaccuggaaggcaagcagggcaacuucaagaaccugcgcgaguucguguuuaagaacaucgacggcuacuucaagaucuacagcaagcacaccccuaucaaccucgugcgggaucugccucagggcuucucugugcuggaaccccugguggaucugcccaucggcaucaacaucacccgguuucagacacugcuggcccugcacagaagcuaccugacaccuggcgauagcagcagcggauggacagcuggugccgccgcuuacuaugugggcuaccugcagccuagaaccuuccugcugaaguacaacgagaacggcaccaucaccgacgccguggauugugcucuggauccucugagcgagacaaagugcacccugaaguccuucaccguggaaaagggcaucuaccagaccagcaacuuccgggugcagcccaccgaauccaucgugcgguuccccaauaucaccaaucugugccccuucggcgagguguucaaugccaccagauucgccucuguguacgccuggaaccggaagcggaucagcaauugcguggccgacuacuccgugcuguacaacuccgccagcuucagcaccuucaagugcuacggcguguccccuaccaagcugaacgaccugugcuucacaaacguguacgccgacagcuucgugauccggggagaugaagugcggcagauugccccuggacagacaggcaagaucgccgacuacaacuacaagcugcccgacgacuucaccggcugugugauugccuggaacagcaacaaccuggacuccaaagucggcggcaacuacaauuaccuguaccggcuguuccggaaguccaaucugaagcccuucgagcgggacaucuccaccgagaucuaucaggccggcagcaccccuuguaacggcguggaaggcuucaacugcuacuucccacugcaguccuacggcuuucagcccacaaauggcgugggcuaucagcccuacagagugguggugcugagcuucgaacugcugcaugccccugccacagugugcggcccuaagaaaagcaccaaucucgugaagaacaaaugcgugaacuucaacuucaacggccugaccggcaccggcgugcugacagagagcaacaagaaguuccugccauuccagcaguuuggccgggauaucgccgauaccacagacgccguuagagauccccagacacuggaaauccuggacaucaccccuugcagcuucggcggagugucugugaucaccccuggcaccaacaccagcaaucagguggcagugcuguaccagggcgugaacuguaccgaagugcccguggccauucacgccgaucagcugacaccuacauggcggguguacuccaccggcagcaauguguuucagaccagagccggcugucugaucggagccgagcacgugaacaauagcuacgagugcgacauccccaucggcgcuggaaucugcgccagcuaccagacacagacaaacagcccucggagagccagaagcguggccagccagagcaucauugccuacacaaugucucugggcgccgagaacagcguggccuacuccaacaacucuaucgcuauccccaccaacuucaccaucagcgugaccacagagauccugccuguguccaugaccaagaccagcguggacugcaccauguacaucugcggcgauuccaccgagugcuccaaccugcugcugcaguacggcagcuucugcacccagcugaauagagcccugacagggaucgccguggaacaggacaagaacacccaagagguguucgcccaagugaagcagaucuacaagaccccuccuaucaaggacuucggcggcuucaauuucagccagauucugcccgauccuagcaagcccagcaagcggagcuucaucgaggaccugcuguucaacaaagugacacuggccgacgccggcuucaucaagcaguauggcgauugucugggcgacauugccgccagggaucugauuugcgcccagaaguuuaacggacugacagugcugccuccucugcugaccgaugagaugaucgcccaguacacaucugcccugcuggccggcacaaucacaagcggcuggacauuuggagcaggcgccgcucugcagauccccuuugcuaugcagauggccuaccgguucaacggcaucggagugacccagaaugugcuguacgagaaccagaagcugaucgccaaccaguucaacagcgccaucggcaagauccaggacagccugagcagcacagcaagcgcccugggaaagcugcaggacguggucaaccagaaugcccaggcacugaacacccuggucaagcagcuguccuccaacuucggcgccaucagcucugugcugaacgauauccugagcagacuggacccuccugaggccgaggugcagaucgacagacugaucacaggcagacugcagagccuccagacauacgugacccagcagcugaucagagccgccgagauuagagccucugccaaucuggccgccaccaagaugucugagugugugcugggccagagcaagagaguggacuuuugcggcaagggcuaccaccugaugagcuucccucagucugccccucacggcgugguguuucugcacgugacauaugugcccgcucaagagaagaauuucaccaccgcuccagccaucugccacgacggcaaagcccacuuuccuagagaaggcguguucguguccaacggcacccauugguucgugacacagcggaacuucuacgagccccagaucaucaccaccgacaacaccuucgugucuggcaacugcgacgucgugaucggcauugugaacaauaccguguacgacccucugcagcccgagcuggacagcuucaaagaggaacuggacaaguacuuuaagaaccacacaagccccgacguggaccugggcgauaucagcggaaucaaugccagcgucgugaacauccagaaagagaucgaccggcugaacgagguggccaagaaucugaacgagagccugaucgaccugcaagaacuggggaaguacgagcaguacaucaaguggcccugguacaucuggcugggcuuuaucgccggacugauugccaucgugauggucacaaucaugcuguguugcaugaccagcugcuguagcugccugaagggcuguuguagcuguggcagcugcugcaaguucgacgaggacgauucugagcccgugcugaagggcgugaaacugcacuacacaugaggacuagucccuguucccagagcccacuuuuuuuucuuuuuuugaaauaaaauagccugucuuucagaucucaaaggcucuuuucagagccaccaaaaaaaaaaaaaaaaaaaaaaaaaaaaaaaaaaaaaaaaaaaaaaaaaaaaaaaaaaaaaaaaaaaaaaaaaaaaaaaaaaaaaaaaaaaaaaaaaaaaa

SEQ ID NO: 23610 - RNA, 4094 nt, Artificial Sequence
  SARS-CoV-2/Wuhan/WIV05/2019__EPI_ISL_402128 spike protein mRNA gc mod (1-1273)(K986P_V987P_N439K_D614G)
aggagagucccgcagucggcguccagcggcucugcuuguucgugugugugucguugcaggccuuauucaagcuuaccauguucguguuccuggugcugcugccucugguguccagccagugugugaaccugaccaccagaacacagcugccuccagccuacaccaacagcuuuaccagaggcguguacuaccccgacaagguguucagauccagcgugcugcacucuacccaggaccuguuccugccuuucuucagcaacgugaccugguuccacgccauccacguguccggcaccaauggcaccaagagauucgacaaccccgugcugcccuucaacgacgggguguacuuugccagcaccgagaaguccaacaucaucagaggcuggaucuucggcaccacacuggacagcaagacccagagccugcugaucgugaacaacgccaccaacguggucaucaaagugugcgaguuccaguucugcaacgaccccuuccugggcgucuacuaccacaagaacaacaagagcuggauggaaagcgaguuccggguguacagcagcgccaacaacugcaccuucgaguacgugucccagccuuuccugauggaccuggaaggcaagcagggcaacuucaagaaccugcgcgaguucguguuuaagaacaucgacggcuacuucaagaucuacagcaagcacaccccuaucaaccucgugcgggaucugccucagggcuucucugcucuggaaccccugguggaucugcccaucggcaucaacaucacccgguuucagacacugcuggcccugcacagaagcuaccugacaccuggcgauagcagcagcggauggacagcuggugccgccgcuuacuaugugggcuaccugcagccuagaaccuuccugcugaaguacaacgagaacggcaccaucaccgacgccguggauugugcucuggauccucugagcgagacaaagugcacccugaaguccuucaccguggaaaagggcaucuaccagaccagcaacuuccgggugcagcccaccgaauccaucgugcgguuccccaauaucaccaaucugugccccuucggcgagguguucaaugccaccagauucgccucuguguacgccuggaaccggaagcggaucagcaauugcguggccgacuacuccgugcuguacaacuccgccagcuucagcaccuucaagugcuacggcguguccccuaccaagcugaacgaccugugcuucacaaacguguacgccgacagcuucgugauccggggagaugaagugcggcagauugccccuggacagacaggcaagaucgccgacuacaacuacaagcugcccgacgacuucaccggcugugugauugccuggaacagcaagaaccuggacuccaaagucggcggcaacuacaauuaccuguaccggcuguuccggaaguccaaucugaagcccuucgagcgggacaucuccaccgagaucuaucaggccggcagcaccccuuguaacggcguggaaggcuucaacugcuacuucccacugcaguccuacggcuuucagcccacaaauggcgugggcuaucagcccuacagagugguggugcugagcuucgaacugcugcaugccccugccacagugugcggcccuaagaaaagcaccaaucucgugaagaacaaaugcgugaacuucaacuucaacggccugaccggcaccggcgugcugacagagagcaacaagaaguuccugccauuccagcaguuuggccgggauaucgccgauaccacagacgccguuagagauccccagacacuggaaauccuggacaucaccccuugcagcuucggcggagugucugugaucaccccuggcaccaacaccagcaaucagguggcagugcuguaccagggcgugaacuguaccgaagugcccguggccauucacgccgaucagcugacaccuacauggcggguguacuccaccggcagcaauguguuucagaccagagccggcugucugaucggagccgagcacgugaacaauagcuacgagugcgacauccccaucggcgcuggaaucugcgccagcuaccagacacagacaaacagcccucggagagccagaagcguggccagccagagcaucauugccuacacaaugucucugggcgccgagaacagcguggccuacuccaacaacucuaucgcuauccccaccaacuucaccaucagcgugaccacagagauccugccuguguccaugaccaagaccagcguggacugcaccauguacaucugcggcgauuccaccgagugcuccaaccugcugcugcaguacggcagcuucugcacccagcugaauagagcccugacagggaucgccguggaacaggacaagaacacccaagagguguucgcccaagugaagcagaucuacaagaccccuccuaucaaggacuucggcggcuucaauuucagccagauucugcccgauccuagcaagcccagcaagcggagcuucaucgaggaccugcuguucaacaaagugacacuggccgacgccggcuucaucaagcaguauggcgauugucugggcgacauugccgccagggaucugauuugcgcccagaaguuuaacggacugacagugcugccuccucugcugaccgaugagaugaucgcccaguacacaucugcccugcuggccggcacaaucacaagcggcuggacauuuggagcaggcgccgcucugcagauccccuuugcuaugcagauggccuaccgguucaacggcaucggagugacccagaaugugcuguacgagaaccagaagcugaucgccaaccaguucaacagcgccaucggcaagauccaggacagccugagcagcacagcaagcgcccugggaaagcugcaggacguggucaaccagaaugcccaggcacugaacacccuggucaagcagcuguccuccaacuucggcgccaucagcucugugcugaacgauauccugagcagacuggacccuccugaggccgaggugcagaucgacagacugaucacaggcagacugcagagccuccagacauacgugacccagcagcugaucagagccgccgagauuagagccucugccaaucuggccgccaccaagaugucugagugugugcugggccagagcaagagaguggacuuuugcggcaagggcuaccaccugaugagcuucccucagucugccccucacggcgugguguuucugcacgugacauaugugcccgcucaagagaagaauuucaccaccgcuccagccaucugccacgacggcaaagcccacuuuccuagagaaggcguguucguguccaacggcacccauugguucgugacacagcggaacuucuacgagccccagaucaucaccaccgacaacaccuucgugucuggcaacugcgacgucgugaucggcauugugaacaauaccguguacgacccucugcagcccgagcuggacagcuucaaagaggaacuggacaaguacuuuaagaaccacacaagccccgacguggaccugggcgauaucagcggaaucaaugccagcgucgugaacauccagaaagagaucgaccggcugaacgagguggccaagaaucugaacgagagccugaucgaccugcaagaacuggggaaguacgagcaguacaucaaguggcccugguacaucuggcugggcuuuaucgccggacugauugccaucgugauggucacaaucaugcuguguugcaugaccagcugcuguagcugccugaagggcuguuguagcuguggcagcugcugcaaguucgacgaggacgauucugagcccgugcugaagggcgugaaacugcacuacacaugaggacuagucccuguucccagagcccacuuuuuuuucuuuuuuugaaauaaaauagccugucuuucagaucucaaaggcucuuuucagagccaccaaaaaaaaaaaaaaaaaaaaaaaaaaaaaaaaaaaaaaaaaaaaaaaaaaaaaaaaaaaaaaaaaaaaaaaaaaaaaaaaaaaaaaaaaaaaaaaaaaaaa

SEQ ID NO: 23611 - RNA, 4094 nt, Artificial Sequence
  SARS-CoV-2/Wuhan/WIV05/2019__EPI_ISL_402128 spike protein mRNA gc mod (1-1273)(K986P_V987P_S477N_D614G)
aggagagucccgcagucggcguccagcggcucugcuuguucgugugugugucguugcaggccuuauucaagcuuaccauguucguguuccuggugcugcugccucugguguccagccagugugugaaccugaccaccagaacacagcugccuccagccuacaccaacagcuuuaccagaggcguguacuaccccgacaagguguucagauccagcgugcugcacucuacccaggaccuguuccugccuuucuucagcaacgugaccugguuccacgccauccacguguccggcaccaauggcaccaagagauucgacaaccccgugcugcccuucaacgacgggguguacuuugccagcaccgagaaguccaacaucaucagaggcuggaucuucggcaccacacuggacagcaagacccagagccugcugaucgugaacaacgccaccaacguggucaucaaagugugcgaguuccaguucugcaacgaccccuuccugggcgucuacuaccacaagaacaacaagagcuggauggaaagcgaguuccggguguacagcagcgccaacaacugcaccuucgaguacgugucccagccuuuccugauggaccuggaaggcaagcagggcaacuucaagaaccugcgcgaguucguguuuaagaacaucgacggcuacuucaagaucuacagcaagcacaccccuaucaaccucgugcgggaucugccucagggcuucucugcucuggaaccccugguggaucugcccaucggcaucaacaucacccgguuucagacacugcuggcccugcacagaagcuaccugacaccuggcgauagcagcagcggauggacagcuggugccgccgcuuacuaugugggcuaccugcagccuagaaccuuccugcugaaguacaacgagaacggcaccaucaccgacgccguggauugugcucuggauccucugagcgagacaaagugcacccugaaguccuucaccguggaaaagggcaucuaccagaccagcaacuuccgggugcagcccaccgaauccaucgugcgguuccccaauaucaccaaucugugccccuucggcgagguguucaaugccaccagauucgccucuguguacgccuggaaccggaagcggaucagcaauugcguggccgacuacuccgugcuguacaacuccgccagcuucagcaccuucaagugcuacggcguguccccuaccaagcugaacgaccugugcuucacaaacguguacgccgacagcuucgugauccggggagaugaagugcggcagauugccccuggacagacaggcaagaucgccgacuacaacuacaagcugcccgacgacuucaccggcugugugauugccuggaacagcaacaaccuggacuccaaagucggcggcaacuacaauuaccuguaccggcuguuccggaaguccaaucugaagcccuucgagcgggacaucuccaccgagaucuaucaggccggcaacaccccuuguaacggcguggaaggcuucaacugcuacuucccacugcaguccuacggcuuucagcccacaaauggcgugggcuaucagcccuacagagugguggugcugagcuucgaacugcugcaugccccugccacagugugcggcccuaagaaaagcaccaaucucgugaagaacaaaugcgugaacuucaacuucaacggccugaccggcaccggcgugcugacagagagcaacaagaaguuccugccauuccagcaguuuggccgggauaucgccgauaccacagacgccguuagagauccccagacacuggaaauccuggacaucaccccuugcagcuucggcggagugucugugaucaccccuggcaccaacaccagcaaucagguggcagugcuguaccagggcgugaacuguaccgaagugcccguggccauucacgccgaucagcugacaccuacauggcggguguacuccaccggcagcaauguguuucagaccagagccggcugucugaucggagccgagcacgugaacaauagcuacgagugcgacauccccaucggcgcuggaaucugcgccagcuaccagacacagacaaacagcccucggagagccagaagcguggccagccagagcaucauugccuacacaaugucucugggcgccgagaacagcguggccuacuccaacaacucuaucgcuauccccaccaacuucaccaucagcgugaccacagagauccugccuguguccaugaccaagaccagcguggacugcaccauguacaucugcggcgauuccaccgagugcuccaaccugcugcugcaguacggcagcuucugcacccagcugaauagagcccugacagggaucgccguggaacaggacaagaacacccaagagguguucgcccaagugaagcagaucuacaagaccccuccuaucaaggacuucggcggcuucaauuucagccagauucugcccgauccuagcaagcccagcaagcggagcuucaucgaggaccugcuguucaacaaagugacacuggccgacgccggcuucaucaagcaguauggcgauugucugggcgacauugccgccagggaucugauuugcgcccagaaguuuaacggacugacagugcugccuccucugcugaccgaugagaugaucgcccaguacacaucugcccugcuggccggcacaaucacaagcggcuggacauuuggagcaggcgccgcucugcagauccccuuugcuaugcagauggccuaccgguucaacggcaucggagugacccagaaugugcuguacgagaaccagaagcugaucgccaaccaguucaacagcgccaucggcaagauccaggacagccugagcagcacagcaagcgcccugggaaagcugcaggacguggucaaccagaaugcccaggcacugaacacccuggucaagcagcuguccuccaacuucggcgccaucagcucugugcugaacgauauccugagcagacuggacccuccugaggccgaggugcagaucgacagacugaucacaggcagacugcagagccuccagacauacgugacccagcagcugaucagagccgccgagauuagagccucugccaaucuggccgccaccaagaugucugagugugugcugggccagagcaagagaguggacuuuugcggcaagggcuaccaccugaugagcuucccucagucugccccucacggcgugguguuucugcacgugacauaugugcccgcucaagagaagaauuucaccaccgcuccagccaucugccacgacggcaaagcccacuuuccuagagaaggcguguucguguccaacggcacccauugguucgugacacagcggaacuucuacgagccccagaucaucaccaccgacaacaccuucgugucuggcaacugcgacgucgugaucggcauugugaacaauaccguguacgacccucugcagcccgagcuggacagcuucaaagaggaacuggacaaguacuuuaagaaccacacaagccccgacguggaccugggcgauaucagcggaaucaaugccagcgucgugaacauccagaaagagaucgaccggcugaacgagguggccaagaaucugaacgagagccugaucgaccugcaagaacuggggaaguacgagcaguacaucaaguggcccugguacaucuggcugggcuuuaucgccggacugauugccaucgugauggucacaaucaugcuguguugcaugaccagcugcuguagcugccugaagggcuguuguagcuguggcagcugcugcaaguucgacgaggacgauucugagcccgugcugaagggcgugaaacugcacuacacaugaggacuagucccuguucccagagcccacuuuuuuuucuuuuuuugaaauaaaauagccugucuuucagaucucaaaggcucuuuucagagccaccaaaaaaaaaaaaaaaaaaaaaaaaaaaaaaaaaaaaaaaaaaaaaaaaaaaaaaaaaaaaaaaaaaaaaaaaaaaaaaaaaaaaaaaaaaaaaaaaaaaaa

SEQ ID NO: 23612 - RNA, 4094 nt, Artificial Sequence
  SARS-CoV-2/Wuhan/WIV05/2019__EPI_ISL_402128 spike protein mRNA gc mod (1-1273)(K986P_V987P_N501Y_D614G)
aggagagucccgcagucggcguccagcggcucugcuuguucgugugugugucguugcaggccuuauucaagcuuaccauguucguguuccuggugcugcugccucugguguccagccagugugugaaccugaccaccagaacacagcugccuccagccuacaccaacagcuuuaccagaggcguguacuaccccgacaagguguucagauccagcgugcugcacucuacccaggaccuguuccugccuuucuucagcaacgugaccugguuccacgccauccacguguccggcaccaauggcaccaagagauucgacaaccccgugcugcccuucaacgacgggguguacuuugccagcaccgagaaguccaacaucaucagaggcuggaucuucggcaccacacuggacagcaagacccagagccugcugaucgugaacaacgccaccaacguggucaucaaagugugcgaguuccaguucugcaacgaccccuuccugggcgucuacuaccacaagaacaacaagagcuggauggaaagcgaguuccggguguacagcagcgccaacaacugcaccuucgaguacgugucccagccuuuccugauggaccuggaaggcaagcagggcaacuucaagaaccugcgcgaguucguguuuaagaacaucgacggcuacuucaagaucuacagcaagcacaccccuaucaaccucgugcgggaucugccucagggcuucucugcucuggaaccccugguggaucugcccaucggcaucaacaucacccgguuucagacacugcuggcccugcacagaagcuaccugacaccuggcgauagcagcagcggauggacagcuggugccgccgcuuacuaugugggcuaccugcagccuagaaccuuccugcugaaguacaacgagaacggcaccaucaccgacgccguggauugugcucuggauccucugagcgagacaaagugcacccugaaguccuucaccguggaaaagggcaucuaccagaccagcaacuuccgggugcagcccaccgaauccaucgugcgguuccccaauaucaccaaucugugccccuucggcgagguguucaaugccaccagauucgccucuguguacgccuggaaccggaagcggaucagcaauugcguggccgacuacuccgugcuguacaacuccgccagcuucagcaccuucaagugcuacggcguguccccuaccaagcugaacgaccugugcuucacaaacguguacgccgacagcuucgugauccggggagaugaagugcggcagauugccccuggacagacaggcaagaucgccgacuacaacuacaagcugcccgacgacuucaccggcugugugauugccuggaacagcaacaaccuggacuccaaagucggcggcaacuacaauuaccuguaccggcuguuccggaaguccaaucugaagcccuucgagcgggacaucuccaccgagaucuaucaggccggcagcaccccuuguaacggcguggaaggcuucaacugcuacuucccacugcaguccuacggcuuucagcccacauacggcgugggcuaucagcccuacagagugguggugcugagcuucgaacugcugcaugccccugccacagugugcggcccuaagaaaagcaccaaucucgugaagaacaaaugcgugaacuucaacuucaacggccugaccggcaccggcgugcugacagagagcaacaagaaguuccugccauuccagcaguuuggccgggauaucgccgauaccacagacgccguuagagauccccagacacuggaaauccuggacaucaccccuugcagcuucggcggagugucugugaucaccccuggcaccaacaccagcaaucagguggcagugcuguaccagggcgugaacuguaccgaagugcccguggccauucacgccgaucagcugacaccuacauggcggguguacuccaccggcagcaauguguuucagaccagagccggcugucugaucggagccgagcacgugaacaauagcuacgagugcgacauccccaucggcgcuggaaucugcgccagcuaccagacacagacaaacagcccucggagagccagaagcguggccagccagagcaucauugccuacacaaugucucugggcgccgagaacagcguggccuacuccaacaacucuaucgcuauccccaccaacuucaccaucagcgugaccacagagauccugccuguguccaugaccaagaccagcguggacugcaccauguacaucugcggcgauuccaccgagugcuccaaccugcugcugcaguacggcagcuucugcacccagcugaauagagcccugacagggaucgccguggaacaggacaagaacacccaagagguguucgcccaagugaagcagaucuacaagaccccuccuaucaaggacuucggcggcuucaauuucagccagauucugcccgauccuagcaagcccagcaagcggagcuucaucgaggaccugcuguucaacaaagugacacuggccgacgccggcuucaucaagcaguauggcgauugucugggcgacauugccgccagggaucugauuugcgcccagaaguuuaacggacugacagugcugccuccucugcugaccgaugagaugaucgcccaguacacaucugcccugcuggccggcacaaucacaagcggcuggacauuuggagcaggcgccgcucugcagauccccuuugcuaugcagauggccuaccgguucaacggcaucggagugacccagaaugugcuguacgagaaccagaagcugaucgccaaccaguucaacagcgccaucggcaagauccaggacagccugagcagcacagcaagcgcccugggaaagcugcaggacguggucaaccagaaugcccaggcacugaacacccuggucaagcagcuguccuccaacuucggcgccaucagcucugugcugaacgauauccugagcagacuggacccuccugaggccgaggugcagaucgacagacugaucacaggcagacugcagagccuccagacauacgugacccagcagcugaucagagccgccgagauuagagccucugccaaucuggccgccaccaagaugucugagugugugcugggccagagcaagagaguggacuuuugcggcaagggcuaccaccugaugagcuucccucagucugccccucacggcgugguguuucugcacgugacauaugugcccgcucaagagaagaauuucaccaccgcuccagccaucugccacgacggcaaagcccacuuuccuagagaaggcguguucguguccaacggcacccauugguucgugacacagcggaacuucuacgagccccagaucaucaccaccgacaacaccuucgugucuggcaacugcgacgucgugaucggcauugugaacaauaccguguacgacccucugcagcccgagcuggacagcuucaaagaggaacuggacaaguacuuuaagaaccacacaagccccgacguggaccugggcgauaucagcggaaucaaugccagcgucgugaacauccagaaagagaucgaccggcugaacgagguggccaagaaucugaacgagagccugaucgaccugcaagaacuggggaaguacgagcaguacaucaaguggcccugguacaucuggcugggcuuuaucgccggacugauugccaucgugauggucacaaucaugcuguguugcaugaccagcugcuguagcugccugaagggcuguuguagcuguggcagcugcugcaaguucgacgaggacgauucugagcccgugcugaagggcgugaaacugcacuacacaugaggacuagucccuguucccagagcccacuuuuuuuucuuuuuuugaaauaaaauagccugucuuucagaucucaaaggcucuuuucagagccaccaaaaaaaaaaaaaaaaaaaaaaaaaaaaaaaaaaaaaaaaaaaaaaaaaaaaaaaaaaaaaaaaaaaaaaaaaaaaaaaaaaaaaaaaaaaaaaaaaaaaa

SEQ ID NO: 23613 - RNA, 4088 nt, Artificial Sequence
  SARS-CoV-2/Wuhan/WIV05/2019__EPI_ISL_402128 spike protein mRNA gc mod (1-1273)(K986P_V987P_H69del_V70del_D614G)
aggagagucccgcagucggcguccagcggcucugcuuguucgugugugugucguugcaggccuuauucaagcuuaccauguucguguuccuggugcugcugccucugguguccagccagugugugaaccugaccaccagaacacagcugccuccagccuacaccaacagcuuuaccagaggcguguacuaccccgacaagguguucagauccagcgugcugcacucuacccaggaccuguuccugccuuucuucagcaacgugaccugguuccacgccaucuccggcaccaauggcaccaagagauucgacaaccccgugcugcccuucaacgacgggguguacuuugccagcaccgagaaguccaacaucaucagaggcuggaucuucggcaccacacuggacagcaagacccagagccugcugaucgugaacaacgccaccaacguggucaucaaagugugcgaguuccaguucugcaacgaccccuuccugggcgucuacuaccacaagaacaacaagagcuggauggaaagcgaguuccggguguacagcagcgccaacaacugcaccuucgaguacgugucccagccuuuccugauggaccuggaaggcaagcagggcaacuucaagaaccugcgcgaguucguguuuaagaacaucgacggcuacuucaagaucuacagcaagcacaccccuaucaaccucgugcgggaucugccucagggcuucucugcucuggaaccccugguggaucugcccaucggcaucaacaucacccgguuucagacacugcuggcccugcacagaagcuaccugacaccuggcgauagcagcagcggauggacagcuggugccgccgcuuacuaugugggcuaccugcagccuagaaccuuccugcugaaguacaacgagaacggcaccaucaccgacgccguggauugugcucuggauccucugagcgagacaaagugcacccugaaguccuucaccguggaaaagggcaucuaccagaccagcaacuuccgggugcagcccaccgaauccaucgugcgguuccccaauaucaccaaucugugccccuucggcgagguguucaaugccaccagauucgccucuguguacgccuggaaccggaagcggaucagcaauugcguggccgacuacuccgugcuguacaacuccgccagcuucagcaccuucaagugcuacggcguguccccuaccaagcugaacgaccugugcuucacaaacguguacgccgacagcuucgugauccggggagaugaagugcggcagauugccccuggacagacaggcaagaucgccgacuacaacuacaagcugcccgacgacuucaccggcugugugauugccuggaacagcaacaaccuggacuccaaagucggcggcaacuacaauuaccuguaccggcuguuccggaaguccaaucugaagcccuucgagcgggacaucuccaccgagaucuaucaggccggcagcaccccuuguaacggcguggaaggcuucaacugcuacuucccacugcaguccuacggcuuucagcccacaaauggcgugggcuaucagcccuacagagugguggugcugagcuucgaacugcugcaugccccugccacagugugcggcccuaagaaaagcaccaaucucgugaagaacaaaugcgugaacuucaacuucaacggccugaccggcaccggcgugcugacagagagcaacaagaaguuccugccauuccagcaguuuggccgggauaucgccgauaccacagacgccguuagagauccccagacacuggaaauccuggacaucaccccuugcagcuucggcggagugucugugaucaccccuggcaccaacaccagcaaucagguggcagugcuguaccagggcgugaacuguaccgaagugcccguggccauucacgccgaucagcugacaccuacauggcggguguacuccaccggcagcaauguguuucagaccagagccggcugucugaucggagccgagcacgugaacaauagcuacgagugcgacauccccaucggcgcuggaaucugcgccagcuaccagacacagacaaacagcccucggagagccagaagcguggccagccagagcaucauugccuacacaaugucucugggcgccgagaacagcguggccuacuccaacaacucuaucgcuauccccaccaacuucaccaucagcgugaccacagagauccugccuguguccaugaccaagaccagcguggacugcaccauguacaucugcggcgauuccaccgagugcuccaaccugcugcugcaguacggcagcuucugcacccagcugaauagagcccugacagggaucgccguggaacaggacaagaacacccaagagguguucgcccaagugaagcagaucuacaagaccccuccuaucaaggacuucggcggcuucaauuucagccagauucugcccgauccuagcaagcccagcaagcggagcuucaucgaggaccugcuguucaacaaagugacacuggccgacgccggcuucaucaagcaguauggcgauugucugggcgacauugccgccagggaucugauuugcgcccagaaguuuaacggacugacagugcugccuccucugcugaccgaugagaugaucgcccaguacacaucugcccugcuggccggcacaaucacaagcggcuggacauuuggagcaggcgccgcucugcagauccccuuugcuaugcagauggccuaccgguucaacggcaucggagugacccagaaugugcuguacgagaaccagaagcugaucgccaaccaguucaacagcgccaucggcaagauccaggacagccugagcagcacagcaagcgcccugggaaagcugcaggacguggucaaccagaaugcccaggcacugaacacccuggucaagcagcuguccuccaacuucggcgccaucagcucugugcugaacgauauccugagcagacuggacccuccugaggccgaggugcagaucgacagacugaucacaggcagacugcagagccuccagacauacgugacccagcagcugaucagagccgccgagauuagagccucugccaaucuggccgccaccaagaugucugagugugugcugggccagagcaagagaguggacuuuugcggcaagggcuaccaccugaugagcuucccucagucugccccucacggcgugguguuucugcacgugacauaugugcccgcucaagagaagaauuucaccaccgcuccagccaucugccacgacggcaaagcccacuuuccuagagaaggcguguucguguccaacggcacccauugguucgugacacagcggaacuucuacgagccccagaucaucaccaccgacaacaccuucgugucuggcaacugcgacgucgugaucggcauugugaacaauaccguguacgacccucugcagcccgagcuggacagcuucaaagaggaacuggacaaguacuuuaagaaccacacaagccccgacguggaccugggcgauaucagcggaaucaaugccagcgucgugaacauccagaaagagaucgaccggcugaacgagguggccaagaaucugaacgagagccugaucgaccugcaagaacuggggaaguacgagcaguacaucaaguggcccugguacaucuggcugggcuuuaucgccggacugauugccaucgugauggucacaaucaugcuguguugcaugaccagcugcuguagcugccugaagggcuguuguagcuguggcagcugcugcaaguucgacgaggacgauucugagcccgugcugaagggcgugaaacugcacuacacaugaggacuagucccuguucccagagcccacuuuuuuuucuuuuuuugaaauaaaauagccugucuuucagaucucaaaggcucuuuucagagccaccaaaaaaaaaaaaaaaaaaaaaaaaaaaaaaaaaaaaaaaaaaaaaaaaaaaaaaaaaaaaaaaaaaaaaaaaaaaaaaaaaaaaaaaaaaaaaaaaaaaaa

SEQ ID NO: 23614 - RNA, 4094 nt, Artificial Sequence
  SARS-CoV-2/Wuhan/WIV05/2019__EPI_ISL_402128 spike protein mRNA gc mod (1-1273)(K986P_V987P_Y453F_D614G)
aggagagucccgcagucggcguccagcggcucugcuuguucgugugugugucguugcaggccuuauucaagcuuaccauguucguguuccuggugcugcugccucugguguccagccagugugugaaccugaccaccagaacacagcugccuccagccuacaccaacagcuuuaccagaggcguguacuaccccgacaagguguucagauccagcgugcugcacucuacccaggaccuguuccugccuuucuucagcaacgugaccugguuccacgccauccacguguccggcaccaauggcaccaagagauucgacaaccccgugcugcccuucaacgacgggguguacuuugccagcaccgagaaguccaacaucaucagaggcuggaucuucggcaccacacuggacagcaagacccagagccugcugaucgugaacaacgccaccaacguggucaucaaagugugcgaguuccaguucugcaacgaccccuuccugggcgucuacuaccacaagaacaacaagagcuggauggaaagcgaguuccggguguacagcagcgccaacaacugcaccuucgaguacgugucccagccuuuccugauggaccuggaaggcaagcagggcaacuucaagaaccugcgcgaguucguguuuaagaacaucgacggcuacuucaagaucuacagcaagcacaccccuaucaaccucgugcgggaucugccucagggcuucucugcucuggaaccccugguggaucugcccaucggcaucaacaucacccgguuucagacacugcuggcccugcacagaagcuaccugacaccuggcgauagcagcagcggauggacagcuggugccgccgcuuacuaugugggcuaccugcagccuagaaccuuccugcugaaguacaacgagaacggcaccaucaccgacgccguggauugugcucuggauccucugagcgagacaaagugcacccugaaguccuucaccguggaaaagggcaucuaccagaccagcaacuuccgggugcagcccaccgaauccaucgugcgguuccccaauaucaccaaucugugccccuucggcgagguguucaaugccaccagauucgccucuguguacgccuggaaccggaagcggaucagcaauugcguggccgacuacuccgugcuguacaacuccgccagcuucagcaccuucaagugcuacggcguguccccuaccaagcugaacgaccugugcuucacaaacguguacgccgacagcuucgugauccggggagaugaagugcggcagauugccccuggacagacaggcaagaucgccgacuacaacuacaagcugcccgacgacuucaccggcugugugauugccuggaacagcaacaaccuggacuccaaagucggcggcaacuacaauuaccuguuccggcuguuccggaaguccaaucugaagcccuucgagcgggacaucuccaccgagaucuaucaggccggcagcaccccuuguaacggcguggaaggcuucaacugcuacuucccacugcaguccuacggcuuucagcccacaaauggcgugggcuaucagcccuacagagugguggugcugagcuucgaacugcugcaugccccugccacagugugcggcccuaagaaaagcaccaaucucgugaagaacaaaugcgugaacuucaacuucaacggccugaccggcaccggcgugcugacagagagcaacaagaaguuccugccauuccagcaguuuggccgggauaucgccgauaccacagacgccguuagagauccccagacacuggaaauccuggacaucaccccuugcagcuucggcggagugucugugaucaccccuggcaccaacaccagcaaucagguggcagugcuguaccagggcgugaacuguaccgaagugcccguggccauucacgccgaucagcugacaccuacauggcggguguacuccaccggcagcaauguguuucagaccagagccggcugucugaucggagccgagcacgugaacaauagcuacgagugcgacauccccaucggcgcuggaaucugcgccagcuaccagacacagacaaacagcccucggagagccagaagcguggccagccagagcaucauugccuacacaaugucucugggcgccgagaacagcguggccuacuccaacaacucuaucgcuauccccaccaacuucaccaucagcgugaccacagagauccugccuguguccaugaccaagaccagcguggacugcaccauguacaucugcggcgauuccaccgagugcuccaaccugcugcugcaguacggcagcuucugcacccagcugaauagagcccugacagggaucgccguggaacaggacaagaacacccaagagguguucgcccaagugaagcagaucuacaagaccccuccuaucaaggacuucggcggcuucaauuucagccagauucugcccgauccuagcaagcccagcaagcggagcuucaucgaggaccugcuguucaacaaagugacacuggccgacgccggcuucaucaagcaguauggcgauugucugggcgacauugccgccagggaucugauuugcgcccagaaguuuaacggacugacagugcugccuccucugcugaccgaugagaugaucgcccaguacacaucugcccugcuggccggcacaaucacaagcggcuggacauuuggagcaggcgccgcucugcagauccccuuugcuaugcagauggccuaccgguucaacggcaucggagugacccagaaugugcuguacgagaaccagaagcugaucgccaaccaguucaacagcgccaucggcaagauccaggacagccugagcagcacagcaagcgcccugggaaagcugcaggacguggucaaccagaaugcccaggcacugaacacccuggucaagcagcuguccuccaacuucggcgccaucagcucugugcugaacgauauccugagcagacuggacccuccugaggccgaggugcagaucgacagacugaucacaggcagacugcagagccuccagacauacgugacccagcagcugaucagagccgccgagauuagagccucugccaaucuggccgccaccaagaugucugagugugugcugggccagagcaagagaguggacuuuugcggcaagggcuaccaccugaugagcuucccucagucugccccucacggcgugguguuucugcacgugacauaugugcccgcucaagagaagaauuucaccaccgcuccagccaucugccacgacggcaaagcccacuuuccuagagaaggcguguucguguccaacggcacccauugguucgugacacagcggaacuucuacgagccccagaucaucaccaccgacaacaccuucgugucuggcaacugcgacgucgugaucggcauugugaacaauaccguguacgacccucugcagcccgagcuggacagcuucaaagaggaacuggacaaguacuuuaagaaccacacaagccccgacguggaccugggcgauaucagcggaaucaaugccagcgucgugaacauccagaaagagaucgaccggcugaacgagguggccaagaaucugaacgagagccugaucgaccugcaagaacuggggaaguacgagcaguacaucaaguggcccugguacaucuggcugggcuuuaucgccggacugauugccaucgugauggucacaaucaugcuguguugcaugaccagcugcuguagcugccugaagggcuguuguagcuguggcagcugcugcaaguucgacgaggacgauucugagcccgugcugaagggcgugaaacugcacuacacaugaggacuagucccuguucccagagcccacuuuuuuuucuuuuuuugaaauaaaauagccugucuuucagaucucaaaggcucuuuucagagccaccaaaaaaaaaaaaaaaaaaaaaaaaaaaaaaaaaaaaaaaaaaaaaaaaaaaaaaaaaaaaaaaaaaaaaaaaaaaaaaaaaaaaaaaaaaaaaaaaaaaaa

SEQ ID NO: 23615 - RNA, 4094 nt, Artificial Sequence
  SARS-CoV-2/Wuhan/WIV05/2019__EPI_ISL_402128 spike protein mRNA gc mod (1-1273)(K986P_V987P_D614G_I692V)
aggagagucccgcagucggcguccagcggcucugcuuguucgugugugugucguugcaggccuuauucaagcuuaccauguucguguuccuggugcugcugccucugguguccagccagugugugaaccugaccaccagaacacagcugccuccagccuacaccaacagcuuuaccagaggcguguacuaccccgacaagguguucagauccagcgugcugcacucuacccaggaccuguuccugccuuucuucagcaacgugaccugguuccacgccauccacguguccggcaccaauggcaccaagagauucgacaaccccgugcugcccuucaacgacgggguguacuuugccagcaccgagaaguccaacaucaucagaggcuggaucuucggcaccacacuggacagcaagacccagagccugcugaucgugaacaacgccaccaacguggucaucaaagugugcgaguuccaguucugcaacgaccccuuccugggcgucuacuaccacaagaacaacaagagcuggauggaaagcgaguuccggguguacagcagcgccaacaacugcaccuucgaguacgugucccagccuuuccugauggaccuggaaggcaagcagggcaacuucaagaaccugcgcgaguucguguuuaagaacaucgacggcuacuucaagaucuacagcaagcacaccccuaucaaccucgugcgggaucugccucagggcuucucugcucuggaaccccugguggaucugcccaucggcaucaacaucacccgguuucagacacugcuggcccugcacagaagcuaccugacaccuggcgauagcagcagcggauggacagcuggugccgccgcuuacuaugugggcuaccugcagccuagaaccuuccugcugaaguacaacgagaacggcaccaucaccgacgccguggauugugcucuggauccucugagcgagacaaagugcacccugaaguccuucaccguggaaaagggcaucuaccagaccagcaacuuccgggugcagcccaccgaauccaucgugcgguuccccaauaucaccaaucugugccccuucggcgagguguucaaugccaccagauucgccucuguguacgccuggaaccggaagcggaucagcaauugcguggccgacuacuccgugcuguacaacuccgccagcuucagcaccuucaagugcuacggcguguccccuaccaagcugaacgaccugugcuucacaaacguguacgccgacagcuucgugauccggggagaugaagugcggcagauugccccuggacagacaggcaagaucgccgacuacaacuacaagcugcccgacgacuucaccggcugugugauugccuggaacagcaacaaccuggacuccaaagucggcggcaacuacaauuaccuguaccggcuguuccggaaguccaaucugaagcccuucgagcgggacaucuccaccgagaucuaucaggccggcagcaccccuuguaacggcguggaaggcuucaacugcuacuucccacugcaguccuacggcuuucagcccacaaauggcgugggcuaucagcccuacagagugguggugcugagcuucgaacugcugcaugccccugccacagugugcggcccuaagaaaagcaccaaucucgugaagaacaaaugcgugaacuucaacuucaacggccugaccggcaccggcgugcugacagagagcaacaagaaguuccugccauuccagcaguuuggccgggauaucgccgauaccacagacgccguuagagauccccagacacuggaaauccuggacaucaccccuugcagcuucggcggagugucugugaucaccccuggcaccaacaccagcaaucagguggcagugcuguaccagggcgugaacuguaccgaagugcccguggccauucacgccgaucagcugacaccuacauggcggguguacuccaccggcagcaauguguuucagaccagagccggcugucugaucggagccgagcacgugaacaauagcuacgagugcgacauccccaucggcgcuggaaucugcgccagcuaccagacacagacaaacagcccucggagagccagaagcguggccagccagagcgugauugccuacacaaugucucugggcgccgagaacagcguggccuacuccaacaacucuaucgcuauccccaccaacuucaccaucagcgugaccacagagauccugccuguguccaugaccaagaccagcguggacugcaccauguacaucugcggcgauuccaccgagugcuccaaccugcugcugcaguacggcagcuucugcacccagcugaauagagcccugacagggaucgccguggaacaggacaagaacacccaagagguguucgcccaagugaagcagaucuacaagaccccuccuaucaaggacuucggcggcuucaauuucagccagauucugcccgauccuagcaagcccagcaagcggagcuucaucgaggaccugcuguucaacaaagugacacuggccgacgccggcuucaucaagcaguauggcgauugucugggcgacauugccgccagggaucugauuugcgcccagaaguuuaacggacugacagugcugccuccucugcugaccgaugagaugaucgcccaguacacaucugcccugcuggccggcacaaucacaagcggcuggacauuuggagcaggcgccgcucugcagauccccuuugcuaugcagauggccuaccgguucaacggcaucggagugacccagaaugugcuguacgagaaccagaagcugaucgccaaccaguucaacagcgccaucggcaagauccaggacagccugagcagcacagcaagcgcccugggaaagcugcaggacguggucaaccagaaugcccaggcacugaacacccuggucaagcagcuguccuccaacuucggcgccaucagcucugugcugaacgauauccugagcagacuggacccuccugaggccgaggugcagaucgacagacugaucacaggcagacugcagagccuccagacauacgugacccagcagcugaucagagccgccgagauuagagccucugccaaucuggccgccaccaagaugucugagugugugcugggccagagcaagagaguggacuuuugcggcaagggcuaccaccugaugagcuucccucagucugccccucacggcgugguguuucugcacgugacauaugugcccgcucaagagaagaauuucaccaccgcuccagccaucugccacgacggcaaagcccacuuuccuagagaaggcguguucguguccaacggcacccauugguucgugacacagcggaacuucuacgagccccagaucaucaccaccgacaacaccuucgugucuggcaacugcgacgucgugaucggcauugugaacaauaccguguacgacccucugcagcccgagcuggacagcuucaaagaggaacuggacaaguacuuuaagaaccacacaagccccgacguggaccugggcgauaucagcggaaucaaugccagcgucgugaacauccagaaagagaucgaccggcugaacgagguggccaagaaucugaacgagagccugaucgaccugcaagaacuggggaaguacgagcaguacaucaaguggcccugguacaucuggcugggcuuuaucgccggacugauugccaucgugauggucacaaucaugcuguguugcaugaccagcugcuguagcugccugaagggcuguuguagcuguggcagcugcugcaaguucgacgaggacgauucugagcccgugcugaagggcgugaaacugcacuacacaugaggacuagucccuguucccagagcccacuuuuuuuucuuuuuuugaaauaaaauagccugucuuucagaucucaaaggcucuuuucagagccaccaaaaaaaaaaaaaaaaaaaaaaaaaaaaaaaaaaaaaaaaaaaaaaaaaaaaaaaaaaaaaaaaaaaaaaaaaaaaaaaaaaaaaaaaaaaaaaaaaaaaa

SEQ ID NO: 23616 - RNA, 4094 nt, Artificial Sequence
  SARS-CoV-2/Wuhan/WIV05/2019__EPI_ISL_402128 spike protein mRNA gc mod (1-1273)(K986P_V987P_D614G_M1229I)
aggagagucccgcagucggcguccagcggcucugcuuguucgugugugugucguugcaggccuuauucaagcuuaccauguucguguuccuggugcugcugccucugguguccagccagugugugaaccugaccaccagaacacagcugccuccagccuacaccaacagcuuuaccagaggcguguacuaccccgacaagguguucagauccagcgugcugcacucuacccaggaccuguuccugccuuucuucagcaacgugaccugguuccacgccauccacguguccggcaccaauggcaccaagagauucgacaaccccgugcugcccuucaacgacgggguguacuuugccagcaccgagaaguccaacaucaucagaggcuggaucuucggcaccacacuggacagcaagacccagagccugcugaucgugaacaacgccaccaacguggucaucaaagugugcgaguuccaguucugcaacgaccccuuccugggcgucuacuaccacaagaacaacaagagcuggauggaaagcgaguuccggguguacagcagcgccaacaacugcaccuucgaguacgugucccagccuuuccugauggaccuggaaggcaagcagggcaacuucaagaaccugcgcgaguucguguuuaagaacaucgacggcuacuucaagaucuacagcaagcacaccccuaucaaccucgugcgggaucugccucagggcuucucugcucuggaaccccugguggaucugcccaucggcaucaacaucacccgguuucagacacugcuggcccugcacagaagcuaccugacaccuggcgauagcagcagcggauggacagcuggugccgccgcuuacuaugugggcuaccugcagccuagaaccuuccugcugaaguacaacgagaacggcaccaucaccgacgccguggauugugcucuggauccucugagcgagacaaagugcacccugaaguccuucaccguggaaaagggcaucuaccagaccagcaacuuccgggugcagcccaccgaauccaucgugcgguuccccaauaucaccaaucugugccccuucggcgagguguucaaugccaccagauucgccucuguguacgccuggaaccggaagcggaucagcaauugcguggccgacuacuccgugcuguacaacuccgccagcuucagcaccuucaagugcuacggcguguccccuaccaagcugaacgaccugugcuucacaaacguguacgccgacagcuucgugauccggggagaugaagugcggcagauugccccuggacagacaggcaagaucgccgacuacaacuacaagcugcccgacgacuucaccggcugugugauugccuggaacagcaacaaccuggacuccaaagucggcggcaacuacaauuaccuguaccggcuguuccggaaguccaaucugaagcccuucgagcgggacaucuccaccgagaucuaucaggccggcagcaccccuuguaacggcguggaaggcuucaacugcuacuucccacugcaguccuacggcuuucagcccacaaauggcgugggcuaucagcccuacagagugguggugcugagcuucgaacugcugcaugccccugccacagugugcggcccuaagaaaagcaccaaucucgugaagaacaaaugcgugaacuucaacuucaacggccugaccggcaccggcgugcugacagagagcaacaagaaguuccugccauuccagcaguuuggccgggauaucgccgauaccacagacgccguuagagauccccagacacuggaaauccuggacaucaccccuugcagcuucggcggagugucugugaucaccccuggcaccaacaccagcaaucagguggcagugcuguaccagggcgugaacuguaccgaagugcccguggccauucacgccgaucagcugacaccuacauggcggguguacuccaccggcagcaauguguuucagaccagagccggcugucugaucggagccgagcacgugaacaauagcuacgagugcgacauccccaucggcgcuggaaucugcgccagcuaccagacacagacaaacagcccucggagagccagaagcguggccagccagagcaucauugccuacacaaugucucugggcgccgagaacagcguggccuacuccaacaacucuaucgcuauccccaccaacuucaccaucagcgugaccacagagauccugccuguguccaugaccaagaccagcguggacugcaccauguacaucugcggcgauuccaccgagugcuccaaccugcugcugcaguacggcagcuucugcacccagcugaauagagcccugacagggaucgccguggaacaggacaagaacacccaagagguguucgcccaagugaagcagaucuacaagaccccuccuaucaaggacuucggcggcuucaauuucagccagauucugcccgauccuagcaagcccagcaagcggagcuucaucgaggaccugcuguucaacaaagugacacuggccgacgccggcuucaucaagcaguauggcgauugucugggcgacauugccgccagggaucugauuugcgcccagaaguuuaacggacugacagugcugccuccucugcugaccgaugagaugaucgcccaguacacaucugcccugcuggccggcacaaucacaagcggcuggacauuuggagcaggcgccgcucugcagauccccuuugcuaugcagauggccuaccgguucaacggcaucggagugacccagaaugugcuguacgagaaccagaagcugaucgccaaccaguucaacagcgccaucggcaagauccaggacagccugagcagcacagcaagcgcccugggaaagcugcaggacguggucaaccagaaugcccaggcacugaacacccuggucaagcagcuguccuccaacuucggcgccaucagcucugugcugaacgauauccugagcagacuggacccuccugaggccgaggugcagaucgacagacugaucacaggcagacugcagagccuccagacauacgugacccagcagcugaucagagccgccgagauuagagccucugccaaucuggccgccaccaagaugucugagugugugcugggccagagcaagagaguggacuuuugcggcaagggcuaccaccugaugagcuucccucagucugccccucacggcgugguguuucugcacgugacauaugugcccgcucaagagaagaauuucaccaccgcuccagccaucugccacgacggcaaagcccacuuuccuagagaaggcguguucguguccaacggcacccauugguucgugacacagcggaacuucuacgagccccagaucaucaccaccgacaacaccuucgugucuggcaacugcgacgucgugaucggcauugugaacaauaccguguacgacccucugcagcccgagcuggacagcuucaaagaggaacuggacaaguacuuuaagaaccacacaagccccgacguggaccugggcgauaucagcggaaucaaugccagcgucgugaacauccagaaagagaucgaccggcugaacgagguggccaagaaucugaacgagagccugaucgaccugcaagaacuggggaaguacgagcaguacaucaaguggcccugguacaucuggcugggcuuuaucgccggacugauugccaucgugaucgucacaaucaugcuguguugcaugaccagcugcuguagcugccugaagggcuguuguagcuguggcagcugcugcaaguucgacgaggacgauucugagcccgugcugaagggcgugaaacugcacuacacaugaggacuagucccuguucccagagcccacuuuuuuuucuuuuuuugaaauaaaauagccugucuuucagaucucaaaggcucuuuucagagccaccaaaaaaaaaaaaaaaaaaaaaaaaaaaaaaaaaaaaaaaaaaaaaaaaaaaaaaaaaaaaaaaaaaaaaaaaaaaaaaaaaaaaaaaaaaaaaaaaaaaaa

SEQ ID NO: 23617 - RNA, 4088 nt, Artificial Sequence
  SARS-CoV-2/Wuhan/WIV05/2019__EPI_ISL_402128 spike protein mRNA gc mod (1-1273)(K986P_V987P_H69del_V70del_A222V_Y453F_S477N_D614G_I692V)
aggagagucccgcagucggcguccagcggcucugcuuguucgugugugugucguugcaggccuuauucaagcuuaccauguucguguuccuggugcugcugccucugguguccagccagugugugaaccugaccaccagaacacagcugccuccagccuacaccaacagcuuuaccagaggcguguacuaccccgacaagguguucagauccagcgugcugcacucuacccaggaccuguuccugccuuucuucagcaacgugaccugguuccacgccaucuccggcaccaauggcaccaagagauucgacaaccccgugcugcccuucaacgacgggguguacuuugccagcaccgagaaguccaacaucaucagaggcuggaucuucggcaccacacuggacagcaagacccagagccugcugaucgugaacaacgccaccaacguggucaucaaagugugcgaguuccaguucugcaacgaccccuuccugggcgucuacuaccacaagaacaacaagagcuggauggaaagcgaguuccggguguacagcagcgccaacaacugcaccuucgaguacgugucccagccuuuccugauggaccuggaaggcaagcagggcaacuucaagaaccugcgcgaguucguguuuaagaacaucgacggcuacuucaagaucuacagcaagcacaccccuaucaaccucgugcgggaucugccucagggcuucucugugcuggaaccccugguggaucugcccaucggcaucaacaucacccgguuucagacacugcuggcccugcacagaagcuaccugacaccuggcgauagcagcagcggauggacagcuggugccgccgcuuacuaugugggcuaccugcagccuagaaccuuccugcugaaguacaacgagaacggcaccaucaccgacgccguggauugugcucuggauccucugagcgagacaaagugcacccugaaguccuucaccguggaaaagggcaucuaccagaccagcaacuuccgggugcagcccaccgaauccaucgugcgguuccccaauaucaccaaucugugccccuucggcgagguguucaaugccaccagauucgccucuguguacgccuggaaccggaagcggaucagcaauugcguggccgacuacuccgugcuguacaacuccgccagcuucagcaccuucaagugcuacggcguguccccuaccaagcugaacgaccugugcuucacaaacguguacgccgacagcuucgugauccggggagaugaagugcggcagauugccccuggacagacaggcaagaucgccgacuacaacuacaagcugcccgacgacuucaccggcugugugauugccuggaacagcaacaaccuggacuccaaagucggcggcaacuacaauuaccuguuccggcuguuccggaaguccaaucugaagcccuucgagcgggacaucuccaccgagaucuaucaggccggcaacaccccuuguaacggcguggaaggcuucaacugcuacuucccacugcaguccuacggcuuucagcccacaaauggcgugggcuaucagcccuacagagugguggugcugagcuucgaacugcugcaugccccugccacagugugcggcccuaagaaaagcaccaaucucgugaagaacaaaugcgugaacuucaacuucaacggccugaccggcaccggcgugcugacagagagcaacaagaaguuccugccauuccagcaguuuggccgggauaucgccgauaccacagacgccguuagagauccccagacacuggaaauccuggacaucaccccuugcagcuucggcggagugucugugaucaccccuggcaccaacaccagcaaucagguggcagugcuguaccagggcgugaacuguaccgaagugcccguggccauucacgccgaucagcugacaccuacauggcggguguacuccaccggcagcaauguguuucagaccagagccggcugucugaucggagccgagcacgugaacaauagcuacgagugcgacauccccaucggcgcuggaaucugcgccagcuaccagacacagacaaacagcccucggagagccagaagcguggccagccagagcgugauugccuacacaaugucucugggcgccgagaacagcguggccuacuccaacaacucuaucgcuauccccaccaacuucaccaucagcgugaccacagagauccugccuguguccaugaccaagaccagcguggacugcaccauguacaucugcggcgauuccaccgagugcuccaaccugcugcugcaguacggcagcuucugcacccagcugaauagagcccugacagggaucgccguggaacaggacaagaacacccaagagguguucgcccaagugaagcagaucuacaagaccccuccuaucaaggacuucggcggcuucaauuucagccagauucugcccgauccuagcaagcccagcaagcggagcuucaucgaggaccugcuguucaacaaagugacacuggccgacgccggcuucaucaagcaguauggcgauugucugggcgacauugccgccagggaucugauuugcgcccagaaguuuaacggacugacagugcugccuccucugcugaccgaugagaugaucgcccaguacacaucugcccugcuggccggcacaaucacaagcggcuggacauuuggagcaggcgccgcucugcagauccccuuugcuaugcagauggccuaccgguucaacggcaucggagugacccagaaugugcuguacgagaaccagaagcugaucgccaaccaguucaacagcgccaucggcaagauccaggacagccugagcagcacagcaagcgcccugggaaagcugcaggacguggucaaccagaaugcccaggcacugaacacccuggucaagcagcuguccuccaacuucggcgccaucagcucugugcugaacgauauccugagcagacuggacccuccugaggccgaggugcagaucgacagacugaucacaggcagacugcagagccuccagacauacgugacccagcagcugaucagagccgccgagauuagagccucugccaaucuggccgccaccaagaugucugagugugugcugggccagagcaagagaguggacuuuugcggcaagggcuaccaccugaugagcuucccucagucugccccucacggcgugguguuucugcacgugacauaugugcccgcucaagagaagaauuucaccaccgcuccagccaucugccacgacggcaaagcccacuuuccuagagaaggcguguucguguccaacggcacccauugguucgugacacagcggaacuucuacgagccccagaucaucaccaccgacaacaccuucgugucuggcaacugcgacgucgugaucggcauugugaacaauaccguguacgacccucugcagcccgagcuggacagcuucaaagaggaacuggacaaguacuuuaagaaccacacaagccccgacguggaccugggcgauaucagcggaaucaaugccagcgucgugaacauccagaaagagaucgaccggcugaacgagguggccaagaaucugaacgagagccugaucgaccugcaagaacuggggaaguacgagcaguacaucaaguggcccugguacaucuggcugggcuuuaucgccggacugauugccaucgugauggucacaaucaugcuguguugcaugaccagcugcuguagcugccugaagggcuguuguagcuguggcagcugcugcaaguucgacgaggacgauucugagcccgugcugaagggcgugaaacugcacuacacaugaggacuagucccuguucccagagcccacuuuuuuuucuuuuuuugaaauaaaauagccugucuuucagaucucaaaggcucuuuucagagccaccaaaaaaaaaaaaaaaaaaaaaaaaaaaaaaaaaaaaaaaaaaaaaaaaaaaaaaaaaaaaaaaaaaaaaaaaaaaaaaaaaaaaaaaaaaaaaaaaaaaaa

SEQ ID NO: 23618 - RNA, 4088 nt, Artificial Sequence
  SARS-CoV-2/Wuhan/WIV05/2019__EPI_ISL_402128 spike protein mRNA gc mod (1-1273)(K986P_V987P_H69del_V70del_Y453F_D614G_I692V_M1229I)
aggagagucccgcagucggcguccagcggcucugcuuguucgugugugugucguugcaggccuuauucaagcuuaccauguucguguuccuggugcugcugccucugguguccagccagugugugaaccugaccaccagaacacagcugccuccagccuacaccaacagcuuuaccagaggcguguacuaccccgacaagguguucagauccagcgugcugcacucuacccaggaccuguuccugccuuucuucagcaacgugaccugguuccacgccaucuccggcaccaauggcaccaagagauucgacaaccccgugcugcccuucaacgacgggguguacuuugccagcaccgagaaguccaacaucaucagaggcuggaucuucggcaccacacuggacagcaagacccagagccugcugaucgugaacaacgccaccaacguggucaucaaagugugcgaguuccaguucugcaacgaccccuuccugggcgucuacuaccacaagaacaacaagagcuggauggaaagcgaguuccggguguacagcagcgccaacaacugcaccuucgaguacgugucccagccuuuccugauggaccuggaaggcaagcagggcaacuucaagaaccugcgcgaguucguguuuaagaacaucgacggcuacuucaagaucuacagcaagcacaccccuaucaaccucgugcgggaucugccucagggcuucucugcucuggaaccccugguggaucugcccaucggcaucaacaucacccgguuucagacacugcuggcccugcacagaagcuaccugacaccuggcgauagcagcagcggauggacagcuggugccgccgcuuacuaugugggcuaccugcagccuagaaccuuccugcugaaguacaacgagaacggcaccaucaccgacgccguggauugugcucuggauccucugagcgagacaaagugcacccugaaguccuucaccguggaaaagggcaucuaccagaccagcaacuuccgggugcagcccaccgaauccaucgugcgguuccccaauaucaccaaucugugccccuucggcgagguguucaaugccaccagauucgccucuguguacgccuggaaccggaagcggaucagcaauugcguggccgacuacuccgugcuguacaacuccgccagcuucagcaccuucaagugcuacggcguguccccuaccaagcugaacgaccugugcuucacaaacguguacgccgacagcuucgugauccggggagaugaagugcggcagauugccccuggacagacaggcaagaucgccgacuacaacuacaagcugcccgacgacuucaccggcugugugauugccuggaacagcaacaaccuggacuccaaagucggcggcaacuacaauuaccuguuccggcuguuccggaaguccaaucugaagcccuucgagcgggacaucuccaccgagaucuaucaggccggcagcaccccuuguaacggcguggaaggcuucaacugcuacuucccacugcaguccuacggcuuucagcccacaaauggcgugggcuaucagcccuacagagugguggugcugagcuucgaacugcugcaugccccugccacagugugcggcccuaagaaaagcaccaaucucgugaagaacaaaugcgugaacuucaacuucaacggccugaccggcaccggcgugcugacagagagcaacaagaaguuccugccauuccagcaguuuggccgggauaucgccgauaccacagacgccguuagagauccccagacacuggaaauccuggacaucaccccuugcagcuucggcggagugucugugaucaccccuggcaccaacaccagcaaucagguggcagugcuguaccagggcgugaacuguaccgaagugcccguggccauucacgccgaucagcugacaccuacauggcggguguacuccaccggcagcaauguguuucagaccagagccggcugucugaucggagccgagcacgugaacaauagcuacgagugcgacauccccaucggcgcuggaaucugcgccagcuaccagacacagacaaacagcccucggagagccagaagcguggccagccagagcgugauugccuacacaaugucucugggcgccgagaacagcguggccuacuccaacaacucuaucgcuauccccaccaacuucaccaucagcgugaccacagagauccugccuguguccaugaccaagaccagcguggacugcaccauguacaucugcggcgauuccaccgagugcuccaaccugcugcugcaguacggcagcuucugcacccagcugaauagagcccugacagggaucgccguggaacaggacaagaacacccaagagguguucgcccaagugaagcagaucuacaagaccccuccuaucaaggacuucggcggcuucaauuucagccagauucugcccgauccuagcaagcccagcaagcggagcuucaucgaggaccugcuguucaacaaagugacacuggccgacgccggcuucaucaagcaguauggcgauugucugggcgacauugccgccagggaucugauuugcgcccagaaguuuaacggacugacagugcugccuccucugcugaccgaugagaugaucgcccaguacacaucugcccugcuggccggcacaaucacaagcggcuggacauuuggagcaggcgccgcucugcagauccccuuugcuaugcagauggccuaccgguucaacggcaucggagugacccagaaugugcuguacgagaaccagaagcugaucgccaaccaguucaacagcgccaucggcaagauccaggacagccugagcagcacagcaagcgcccugggaaagcugcaggacguggucaaccagaaugcccaggcacugaacacccuggucaagcagcuguccuccaacuucggcgccaucagcucugugcugaacgauauccugagcagacuggacccuccugaggccgaggugcagaucgacagacugaucacaggcagacugcagagccuccagacauacgugacccagcagcugaucagagccgccgagauuagagccucugccaaucuggccgccaccaagaugucugagugugugcugggccagagcaagagaguggacuuuugcggcaagggcuaccaccugaugagcuucccucagucugccccucacggcgugguguuucugcacgugacauaugugcccgcucaagagaagaauuucaccaccgcuccagccaucugccacgacggcaaagcccacuuuccuagagaaggcguguucguguccaacggcacccauugguucgugacacagcggaacuucuacgagccccagaucaucaccaccgacaacaccuucgugucuggcaacugcgacgucgugaucggcauugugaacaauaccguguacgacccucugcagcccgagcuggacagcuucaaagaggaacuggacaaguacuuuaagaaccacacaagccccgacguggaccugggcgauaucagcggaaucaaugccagcgucgugaacauccagaaagagaucgaccggcugaacgagguggccaagaaucugaacgagagccugaucgaccugcaagaacuggggaaguacgagcaguacaucaaguggcccugguacaucuggcugggcuuuaucgccggacugauugccaucgugaucgucacaaucaugcuguguugcaugaccagcugcuguagcugccugaagggcuguuguagcuguggcagcugcugcaaguucgacgaggacgauucugagcccgugcugaagggcgugaaacugcacuacacaugaggacuagucccuguucccagagcccacuuuuuuuucuuuuuuugaaauaaaauagccugucuuucagaucucaaaggcucuuuucagagccaccaaaaaaaaaaaaaaaaaaaaaaaaaaaaaaaaaaaaaaaaaaaaaaaaaaaaaaaaaaaaaaaaaaaaaaaaaaaaaaaaaaaaaaaaaaaaaaaaaaaaa

SEQ ID NO: 23619 - RNA, 4085 nt, Artificial Sequence
  SARS-CoV-2/Wuhan/WIV05/2019__EPI_ISL_402128 spike protein mRNA gc mod (1-1273)(K986P_V987P_K986P_V987P_H69del_V70del_Y144del_N501Y_A570 D_D614G_P681H_T716I_S982A_D1118H)
aggagagucccgcagucggcguccagcggcucugcuuguucgugugugugucguugcaggccuuauucaagcuuaccauguucguguuccuggugcugcugccucugguguccagccagugugugaaccugaccaccagaacacagcugccuccagccuacaccaacagcuuuaccagaggcguguacuaccccgacaagguguucagauccagcgugcugcacucuacccaggaccuguuccugccuuucuucagcaacgugaccugguuccacgccaucuccggcaccaauggcaccaagagauucgacaaccccgugcugcccuucaacgacgggguguacuuugccagcaccgagaaguccaacaucaucagaggcuggaucuucggcaccacacuggacagcaagacccagagccugcugaucgugaacaacgccaccaacguggucaucaaagugugcgaguuccaguucugcaacgaccccuuccugggcgucuaccacaagaacaacaagagcuggauggaaagcgaguuccggguguacagcagcgccaacaacugcaccuucgaguacgugucccagccuuuccugauggaccuggaaggcaagcagggcaacuucaagaaccugcgcgaguucguguuuaagaacaucgacggcuacuucaagaucuacagcaagcacaccccuaucaaccucgugcgggaucugccucagggcuucucugcucuggaaccccugguggaucugcccaucggcaucaacaucacccgguuucagacacugcuggcccugcacagaagcuaccugacaccuggcgauagcagcagcggauggacagcuggugccgccgcuuacuaugugggcuaccugcagccuagaaccuuccugcugaaguacaacgagaacggcaccaucaccgacgccguggauugugcucuggauccucugagcgagacaaagugcacccugaaguccuucaccguggaaaagggcaucuaccagaccagcaacuuccgggugcagcccaccgaauccaucgugcgguuccccaauaucaccaaucugugccccuucggcgagguguucaaugccaccagauucgccucuguguacgccuggaaccggaagcggaucagcaauugcguggccgacuacuccgugcuguacaacuccgccagcuucagcaccuucaagugcuacggcguguccccuaccaagcugaacgaccugugcuucacaaacguguacgccgacagcuucgugauccggggagaugaagugcggcagauugccccuggacagacaggcaagaucgccgacuacaacuacaagcugcccgacgacuucaccggcugugugauugccuggaacagcaacaaccuggacuccaaagucggcggcaacuacaauuaccuguaccggcuguuccggaaguccaaucugaagcccuucgagcgggacaucuccaccgagaucuaucaggccggcagcaccccuuguaacggcguggaaggcuucaacugcuacuucccacugcaguccuacggcuuucagcccacauacggcgugggcuaucagcccuacagagugguggugcugagcuucgaacugcugcaugccccugccacagugugcggcccuaagaaaagcaccaaucucgugaagaacaaaugcgugaacuucaacuucaacggccugaccggcaccggcgugcugacagagagcaacaagaaguuccugccauuccagcaguuuggccgggauaucgacgauaccacagacgccguuagagauccccagacacuggaaauccuggacaucaccccuugcagcuucggcggagugucugugaucaccccuggcaccaacaccagcaaucagguggcagugcuguaccagggcgugaacuguaccgaagugcccguggccauucacgccgaucagcugacaccuacauggcggguguacuccaccggcagcaauguguuucagaccagagccggcugucugaucggagccgagcacgugaacaauagcuacgagugcgacauccccaucggcgcuggaaucugcgccagcuaccagacacagacaaacagccaccggagagccagaagcguggccagccagagcaucauugccuacacaaugucucugggcgccgagaacagcguggccuacuccaacaacucuaucgcuauccccaucaacuucaccaucagcgugaccacagagauccugccuguguccaugaccaagaccagcguggacugcaccauguacaucugcggcgauuccaccgagugcuccaaccugcugcugcaguacggcagcuucugcacccagcugaauagagcccugacagggaucgccguggaacaggacaagaacacccaagagguguucgcccaagugaagcagaucuacaagaccccuccuaucaaggacuucggcggcuucaauuucagccagauucugcccgauccuagcaagcccagcaagcggagcuucaucgaggaccugcuguucaacaaagugacacuggccgacgccggcuucaucaagcaguauggcgauugucugggcgacauugccgccagggaucugauuugcgcccagaaguuuaacggacugacagugcugccuccucugcugaccgaugagaugaucgcccaguacacaucugcccugcuggccggcacaaucacaagcggcuggacauuuggagcaggcgccgcucugcagauccccuuugcuaugcagauggccuaccgguucaacggcaucggagugacccagaaugugcuguacgagaaccagaagcugaucgccaaccaguucaacagcgccaucggcaagauccaggacagccugagcagcacagcaagcgcccugggaaagcugcaggacguggucaaccagaaugcccaggcacugaacacccuggucaagcagcuguccuccaacuucggcgccaucagcucugugcugaacgauauccuggccagacuggacccuccugaggccgaggugcagaucgacagacugaucacaggcagacugcagagccuccagacauacgugacccagcagcugaucagagccgccgagauuagagccucugccaaucuggccgccaccaagaugucugagugugugcugggccagagcaagagaguggacuuuugcggcaagggcuaccaccugaugagcuucccucagucugccccucacggcgugguguuucugcacgugacauaugugcccgcucaagagaagaauuucaccaccgcuccagccaucugccacgacggcaaagcccacuuuccuagagaaggcguguucguguccaacggcacccauugguucgugacacagcggaacuucuacgagccccagaucaucaccacccacaacaccuucgugucuggcaacugcgacgucgugaucggcauugugaacaauaccguguacgacccucugcagcccgagcuggacagcuucaaagaggaacuggacaaguacuuuaagaaccacacaagccccgacguggaccugggcgauaucagcggaaucaaugccagcgucgugaacauccagaaagagaucgaccggcugaacgagguggccaagaaucugaacgagagccugaucgaccugcaagaacuggggaaguacgagcaguacaucaaguggcccugguacaucuggcugggcuuuaucgccggacugauugccaucgugauggucacaaucaugcuguguugcaugaccagcugcuguagcugccugaagggcuguuguagcuguggcagcugcugcaaguucgacgaggacgauucugagcccgugcugaagggcgugaaacugcacuacacaugaggacuagucccuguucccagagcccacuuuuuuuucuuuuuuugaaauaaaauagccugucuuucagaucucaaaggcucuuuucagagccaccaaaaaaaaaaaaaaaaaaaaaaaaaaaaaaaaaaaaaaaaaaaaaaaaaaaaaaaaaaaaaaaaaaaaaaaaaaaaaaaaaaaaaaaaaaaaaaaaaaaaa

SEQ ID NO: 23620 - RNA, 4094 nt, Artificial Sequence
  SARS-CoV-2/Wuhan/WIV05/2019__EPI_ISL_402128 spike protein mRNA gc mod (1-1273)(K986P_V987P_K986P_V987P_K417N_E484K_N501Y_D614G)
aggagagucccgcagucggcguccagcggcucugcuuguucgugugugugucguugcaggccuuauucaagcuuaccauguucguguuccuggugcugcugccucugguguccagccagugugugaaccugaccaccagaacacagcugccuccagccuacaccaacagcuuuaccagaggcguguacuaccccgacaagguguucagauccagcgugcugcacucuacccaggaccuguuccugccuuucuucagcaacgugaccugguuccacgccauccacguguccggcaccaauggcaccaagagauucgacaaccccgugcugcccuucaacgacgggguguacuuugccagcaccgagaaguccaacaucaucagaggcuggaucuucggcaccacacuggacagcaagacccagagccugcugaucgugaacaacgccaccaacguggucaucaaagugugcgaguuccaguucugcaacgaccccuuccugggcgucuacuaccacaagaacaacaagagcuggauggaaagcgaguuccggguguacagcagcgccaacaacugcaccuucgaguacgugucccagccuuuccugauggaccuggaaggcaagcagggcaacuucaagaaccugcgcgaguucguguuuaagaacaucgacggcuacuucaagaucuacagcaagcacaccccuaucaaccucgugcgggaucugccucagggcuucucugcucuggaaccccugguggaucugcccaucggcaucaacaucacccgguuucagacacugcuggcccugcacagaagcuaccugacaccuggcgauagcagcagcggauggacagcuggugccgccgcuuacuaugugggcuaccugcagccuagaaccuuccugcugaaguacaacgagaacggcaccaucaccgacgccguggauugugcucuggauccucugagcgagacaaagugcacccugaaguccuucaccguggaaaagggcaucuaccagaccagcaacuuccgggugcagcccaccgaauccaucgugcgguuccccaauaucaccaaucugugccccuucggcgagguguucaaugccaccagauucgccucuguguacgccuggaaccggaagcggaucagcaauugcguggccgacuacuccgugcuguacaacuccgccagcuucagcaccuucaagugcuacggcguguccccuaccaagcugaacgaccugugcuucacaaacguguacgccgacagcuucgugauccggggagaugaagugcggcagauugccccuggacagacaggcaacaucgccgacuacaacuacaagcugcccgacgacuucaccggcugugugauugccuggaacagcaacaaccuggacuccaaagucggcggcaacuacaauuaccuguaccggcuguuccggaaguccaaucugaagcccuucgagcgggacaucuccaccgagaucuaucaggccggcagcaccccuuguaacggcgugaagggcuucaacugcuacuucccacugcaguccuacggcuuucagcccacauacggcgugggcuaucagcccuacagagugguggugcugagcuucgaacugcugcaugccccugccacagugugcggcccuaagaaaagcaccaaucucgugaagaacaaaugcgugaacuucaacuucaacggccugaccggcaccggcgugcugacagagagcaacaagaaguuccugccauuccagcaguuuggccgggauaucgccgauaccacagacgccguuagagauccccagacacuggaaauccuggacaucaccccuugcagcuucggcggagugucugugaucaccccuggcaccaacaccagcaaucagguggcagugcuguaccagggcgugaacuguaccgaagugcccguggccauucacgccgaucagcugacaccuacauggcggguguacuccaccggcagcaauguguuucagaccagagccggcugucugaucggagccgagcacgugaacaauagcuacgagugcgacauccccaucggcgcuggaaucugcgccagcuaccagacacagacaaacagcccucggagagccagaagcguggccagccagagcaucauugccuacacaaugucucugggcgccgagaacagcguggccuacuccaacaacucuaucgcuauccccaccaacuucaccaucagcgugaccacagagauccugccuguguccaugaccaagaccagcguggacugcaccauguacaucugcggcgauuccaccgagugcuccaaccugcugcugcaguacggcagcuucugcacccagcugaauagagcccugacagggaucgccguggaacaggacaagaacacccaagagguguucgcccaagugaagcagaucuacaagaccccuccuaucaaggacuucggcggcuucaauuucagccagauucugcccgauccuagcaagcccagcaagcggagcuucaucgaggaccugcuguucaacaaagugacacuggccgacgccggcuucaucaagcaguauggcgauugucugggcgacauugccgccagggaucugauuugcgcccagaaguuuaacggacugacagugcugccuccucugcugaccgaugagaugaucgcccaguacacaucugcccugcuggccggcacaaucacaagcggcuggacauuuggagcaggcgccgcucugcagauccccuuugcuaugcagauggccuaccgguucaacggcaucggagugacccagaaugugcuguacgagaaccagaagcugaucgccaaccaguucaacagcgccaucggcaagauccaggacagccugagcagcacagcaagcgcccugggaaagcugcaggacguggucaaccagaaugcccaggcacugaacacccuggucaagcagcuguccuccaacuucggcgccaucagcucugugcugaacgauauccugagcagacuggacccuccugaggccgaggugcagaucgacagacugaucacaggcagacugcagagccuccagacauacgugacccagcagcugaucagagccgccgagauuagagccucugccaaucuggccgccaccaagaugucugagugugugcugggccagagcaagagaguggacuuuugcggcaagggcuaccaccugaugagcuucccucagucugccccucacggcgugguguuucugcacgugacauaugugcccgcucaagagaagaauuucaccaccgcuccagccaucugccacgacggcaaagcccacuuuccuagagaaggcguguucguguccaacggcacccauugguucgugacacagcggaacuucuacgagccccagaucaucaccaccgacaacaccuucgugucuggcaacugcgacgucgugaucggcauugugaacaauaccguguacgacccucugcagcccgagcuggacagcuucaaagaggaacuggacaaguacuuuaagaaccacacaagccccgacguggaccugggcgauaucagcggaaucaaugccagcgucgugaacauccagaaagagaucgaccggcugaacgagguggccaagaaucugaacgagagccugaucgaccugcaagaacuggggaaguacgagcaguacaucaaguggcccugguacaucuggcugggcuuuaucgccggacugauugccaucgugauggucacaaucaugcuguguugcaugaccagcugcuguagcugccugaagggcuguuguagcuguggcagcugcugcaaguucgacgaggacgauucugagcccgugcugaagggcgugaaacugcacuacacaugaggacuagucccuguucccagagcccacuuuuuuuucuuuuuuugaaauaaaauagccugucuuucagaucucaaaggcucuuuucagagccaccaaaaaaaaaaaaaaaaaaaaaaaaaaaaaaaaaaaaaaaaaaaaaaaaaaaaaaaaaaaaaaaaaaaaaaaaaaaaaaaaaaaaaaaaaaaaaaaaaaaaa

SEQ ID NO: 23621 - RNA, 4085 nt, Artificial Sequence
  SARS-CoV-2/Wuhan/WIV05/2019__EPI_ISL_402128 spike protein mRNA gc mod (1-1273)(K986P_V987P_K986P_V987P_L18F_D80A_D215G_L242del_A243del_ L244del_R246I_K417N_E484K_N501Y_D614G_A701V)
aggagagucccgcagucggcguccagcggcucugcuuguucgugugugugucguugcaggccuuauucaagcuuaccauguucguguuccuggugcugcugccucugguguccagccagugugugaacuucaccaccagaacacagcugccuccagccuacaccaacagcuuuaccagaggcguguacuaccccgacaagguguucagauccagcgugcugcacucuacccaggaccuguuccugccuuucuucagcaacgugaccugguuccacgccauccacguguccggcaccaauggcaccaagagauucgccaaccccgugcugcccuucaacgacgggguguacuuugccagcaccgagaaguccaacaucaucagaggcuggaucuucggcaccacacuggacagcaagacccagagccugcugaucgugaacaacgccaccaacguggucaucaaagugugcgaguuccaguucugcaacgaccccuuccugggcgucuacuaccacaagaacaacaagagcuggauggaaagcgaguuccggguguacagcagcgccaacaacugcaccuucgaguacgugucccagccuuuccugauggaccuggaaggcaagcagggcaacuucaagaaccugcgcgaguucguguuuaagaacaucgacggcuacuucaagaucuacagcaagcacaccccuaucaaccucgugcggggccugccucagggcuucucugcucuggaaccccugguggaucugcccaucggcaucaacaucacccgguuucagacacugcacaucagcuaccugacaccuggcgauagcagcagcggauggacagcuggugccgccgcuuacuaugugggcuaccugcagccuagaaccuuccugcugaaguacaacgagaacggcaccaucaccgacgccguggauugugcucuggauccucugagcgagacaaagugcacccugaaguccuucaccguggaaaagggcaucuaccagaccagcaacuuccgggugcagcccaccgaauccaucgugcgguuccccaauaucaccaaucugugccccuucggcgagguguucaaugccaccagauucgccucuguguacgccuggaaccggaagcggaucagcaauugcguggccgacuacuccgugcuguacaacuccgccagcuucagcaccuucaagugcuacggcguguccccuaccaagcugaacgaccugugcuucacaaacguguacgccgacagcuucgugauccggggagaugaagugcggcagauugccccuggacagacaggcaacaucgccgacuacaacuacaagcugcccgacgacuucaccggcugugugauugccuggaacagcaacaaccuggacuccaaagucggcggcaacuacaauuaccuguaccggcuguuccggaaguccaaucugaagcccuucgagcgggacaucuccaccgagaucuaucaggccggcagcaccccuuguaacggcgugaagggcuucaacugcuacuucccacugcaguccuacggcuuucagcccacauacggcgugggcuaucagcccuacagagugguggugcugagcuucgaacugcugcaugccccugccacagugugcggcccuaagaaaagcaccaaucucgugaagaacaaaugcgugaacuucaacuucaacggccugaccggcaccggcgugcugacagagagcaacaagaaguuccugccauuccagcaguuuggccgggauaucgccgauaccacagacgccguuagagauccccagacacuggaaauccuggacaucaccccuugcagcuucggcggagugucugugaucaccccuggcaccaacaccagcaaucagguggcagugcuguaccagggcgugaacuguaccgaagugcccguggccauucacgccgaucagcugacaccuacauggcggguguacuccaccggcagcaauguguuucagaccagagccggcugucugaucggagccgagcacgugaacaauagcuacgagugcgacauccccaucggcgcuggaaucugcgccagcuaccagacacagacaaacagcccucggagagccagaagcguggccagccagagcaucauugccuacacaaugucucugggcguggagaacagcguggccuacuccaacaacucuaucgcuauccccaccaacuucaccaucagcgugaccacagagauccugccuguguccaugaccaagaccagcguggacugcaccauguacaucugcggcgauuccaccgagugcuccaaccugcugcugcaguacggcagcuucugcacccagcugaauagagcccugacagggaucgccguggaacaggacaagaacacccaagagguguucgcccaagugaagcagaucuacaagaccccuccuaucaaggacuucggcggcuucaauuucagccagauucugcccgauccuagcaagcccagcaagcggagcuucaucgaggaccugcuguucaacaaagugacacuggccgacgccggcuucaucaagcaguauggcgauugucugggcgacauugccgccagggaucugauuugcgcccagaaguuuaacggacugacagugcugccuccucugcugaccgaugagaugaucgcccaguacacaucugcccugcuggccggcacaaucacaagcggcuggacauuuggagcaggcgccgcucugcagauccccuuugcuaugcagauggccuaccgguucaacggcaucggagugacccagaaugugcuguacgagaaccagaagcugaucgccaaccaguucaacagcgccaucggcaagauccaggacagccugagcagcacagcaagcgcccugggaaagcugcaggacguggucaaccagaaugcccaggcacugaacacccuggucaagcagcuguccuccaacuucggcgccaucagcucugugcugaacgauauccugagcagacuggacccuccugaggccgaggugcagaucgacagacugaucacaggcagacugcagagccuccagacauacgugacccagcagcugaucagagccgccgagauuagagccucugccaaucuggccgccaccaagaugucugagugugugcugggccagagcaagagaguggacuuuugcggcaagggcuaccaccugaugagcuucccucagucugccccucacggcgugguguuucugcacgugacauaugugcccgcucaagagaagaauuucaccaccgcuccagccaucugccacgacggcaaagcccacuuuccuagagaaggcguguucguguccaacggcacccauugguucgugacacagcggaacuucuacgagccccagaucaucaccaccgacaacaccuucgugucuggcaacugcgacgucgugaucggcauugugaacaauaccguguacgacccucugcagcccgagcuggacagcuucaaagaggaacuggacaaguacuuuaagaaccacacaagccccgacguggaccugggcgauaucagcggaaucaaugccagcgucgugaacauccagaaagagaucgaccggcugaacgagguggccaagaaucugaacgagagccugaucgaccugcaagaacuggggaaguacgagcaguacaucaaguggcccugguacaucuggcugggcuuuaucgccggacugauugccaucgugauggucacaaucaugcuguguugcaugaccagcugcuguagcugccugaagggcuguuguagcuguggcagcugcugcaaguucgacgaggacgauucugagcccgugcugaagggcgugaaacugcacuacacaugaggacuagucccuguucccagagcccacuuuuuuuucuuuuuuugaaauaaaauagccugucuuucagaucucaaaggcucuuuucagagccaccaaaaaaaaaaaaaaaaaaaaaaaaaaaaaaaaaaaaaaaaaaaaaaaaaaaaaaaaaaaaaaaaaaaaaaaaaaaaaaaaaaaaaaaaaaaaaaaaaaaaa

SEQ ID NO: 23622 - RNA, 4094 nt, Artificial Sequence
  SARS-CoV-2/Wuhan/WIV05/2019__EPI_ISL_402128 spike protein mRNA gc mod (1-1273)(K986P_V987P_K986P_V987P_E484K_D614G)
aggagagucccgcagucggcguccagcggcucugcuuguucgugugugugucguugcaggccuuauucaagcuuaccauguucguguuccuggugcugcugccucugguguccagccagugugugaaccugaccaccagaacacagcugccuccagccuacaccaacagcuuuaccagaggcguguacuaccccgacaagguguucagauccagcgugcugcacucuacccaggaccuguuccugccuuucuucagcaacgugaccugguuccacgccauccacguguccggcaccaauggcaccaagagauucgacaaccccgugcugcccuucaacgacgggguguacuuugccagcaccgagaaguccaacaucaucagaggcuggaucuucggcaccacacuggacagcaagacccagagccugcugaucgugaacaacgccaccaacguggucaucaaagugugcgaguuccaguucugcaacgaccccuuccugggcgucuacuaccacaagaacaacaagagcuggauggaaagcgaguuccggguguacagcagcgccaacaacugcaccuucgaguacgugucccagccuuuccugauggaccuggaaggcaagcagggcaacuucaagaaccugcgcgaguucguguuuaagaacaucgacggcuacuucaagaucuacagcaagcacaccccuaucaaccucgugcgggaucugccucagggcuucucugcucuggaaccccugguggaucugcccaucggcaucaacaucacccgguuucagacacugcuggcccugcacagaagcuaccugacaccuggcgauagcagcagcggauggacagcuggugccgccgcuuacuaugugggcuaccugcagccuagaaccuuccugcugaaguacaacgagaacggcaccaucaccgacgccguggauugugcucuggauccucugagcgagacaaagugcacccugaaguccuucaccguggaaaagggcaucuaccagaccagcaacuuccgggugcagcccaccgaauccaucgugcgguuccccaauaucaccaaucugugccccuucggcgagguguucaaugccaccagauucgccucuguguacgccuggaaccggaagcggaucagcaauugcguggccgacuacuccgugcuguacaacuccgccagcuucagcaccuucaagugcuacggcguguccccuaccaagcugaacgaccugugcuucacaaacguguacgccgacagcuucgugauccggggagaugaagugcggcagauugccccuggacagacaggcaagaucgccgacuacaacuacaagcugcccgacgacuucaccggcugugugauugccuggaacagcaacaaccuggacuccaaagucggcggcaacuacaauuaccuguaccggcuguuccggaaguccaaucugaagcccuucgagcgggacaucuccaccgagaucuaucaggccggcagcaccccuuguaacggcgugaagggcuucaacugcuacuucccacugcaguccuacggcuuucagcccacaaauggcgugggcuaucagcccuacagagugguggugcugagcuucgaacugcugcaugccccugccacagugugcggcccuaagaaaagcaccaaucucgugaagaacaaaugcgugaacuucaacuucaacggccugaccggcaccggcgugcugacagagagcaacaagaaguuccugccauuccagcaguuuggccgggauaucgccgauaccacagacgccguuagagauccccagacacuggaaauccuggacaucaccccuugcagcuucggcggagugucugugaucaccccuggcaccaacaccagcaaucagguggcagugcuguaccagggcgugaacuguaccgaagugcccguggccauucacgccgaucagcugacaccuacauggcggguguacuccaccggcagcaauguguuucagaccagagccggcugucugaucggagccgagcacgugaacaauagcuacgagugcgacauccccaucggcgcuggaaucugcgccagcuaccagacacagacaaacagcccucggagagccagaagcguggccagccagagcaucauugccuacacaaugucucugggcgccgagaacagcguggccuacuccaacaacucuaucgcuauccccaccaacuucaccaucagcgugaccacagagauccugccuguguccaugaccaagaccagcguggacugcaccauguacaucugcggcgauuccaccgagugcuccaaccugcugcugcaguacggcagcuucugcacccagcugaauagagcccugacagggaucgccguggaacaggacaagaacacccaagagguguucgcccaagugaagcagaucuacaagaccccuccuaucaaggacuucggcggcuucaauuucagccagauucugcccgauccuagcaagcccagcaagcggagcuucaucgaggaccugcuguucaacaaagugacacuggccgacgccggcuucaucaagcaguauggcgauugucugggcgacauugccgccagggaucugauuugcgcccagaaguuuaacggacugacagugcugccuccucugcugaccgaugagaugaucgcccaguacacaucugcccugcuggccggcacaaucacaagcggcuggacauuuggagcaggcgccgcucugcagauccccuuugcuaugcagauggccuaccgguucaacggcaucggagugacccagaaugugcuguacgagaaccagaagcugaucgccaaccaguucaacagcgccaucggcaagauccaggacagccugagcagcacagcaagcgcccugggaaagcugcaggacguggucaaccagaaugcccaggcacugaacacccuggucaagcagcuguccuccaacuucggcgccaucagcucugugcugaacgauauccugagcagacuggacccuccugaggccgaggugcagaucgacagacugaucacaggcagacugcagagccuccagacauacgugacccagcagcugaucagagccgccgagauuagagccucugccaaucuggccgccaccaagaugucugagugugugcugggccagagcaagagaguggacuuuugcggcaagggcuaccaccugaugagcuucccucagucugccccucacggcgugguguuucugcacgugacauaugugcccgcucaagagaagaauuucaccaccgcuccagccaucugccacgacggcaaagcccacuuuccuagagaaggcguguucguguccaacggcacccauugguucgugacacagcggaacuucuacgagccccagaucaucaccaccgacaacaccuucgugucuggcaacugcgacgucgugaucggcauugugaacaauaccguguacgacccucugcagcccgagcuggacagcuucaaagaggaacuggacaaguacuuuaagaaccacacaagccccgacguggaccugggcgauaucagcggaaucaaugccagcgucgugaacauccagaaagagaucgaccggcugaacgagguggccaagaaucugaacgagagccugaucgaccugcaagaacuggggaaguacgagcaguacaucaaguggcccugguacaucuggcugggcuuuaucgccggacugauugccaucgugauggucacaaucaugcuguguugcaugaccagcugcuguagcugccugaagggcuguuguagcuguggcagcugcugcaaguucgacgaggacgauucugagcccgugcugaagggcgugaaacugcacuacacaugaggacuagucccuguucccagagcccacuuuuuuuucuuuuuuugaaauaaaauagccugucuuucagaucucaaaggcucuuuucagagccaccaaaaaaaaaaaaaaaaaaaaaaaaaaaaaaaaaaaaaaaaaaaaaaaaaaaaaaaaaaaaaaaaaaaaaaaaaaaaaaaaaaaaaaaaaaaaaaaaaaaaa

SEQ ID NO: 23623 - RNA, 4094 nt, Artificial Sequence
  SARS-CoV-2/Wuhan/WIV05/2019__EPI_ISL_402128 spike protein mRNA gc mod (1-1273)(K986P_V987P_K986P_V987P_L18F_T20N_P26S_D138Y_R190S_K417T _E484K_N501Y_D614G_H655Y_T1027I)
aggagagucccgcagucggcguccagcggcucugcuuguucgugugugugucguugcaggccuuauucaagcuuaccauguucguguuccuggugcugcugccucugguguccagccagugugugaacuucaccaacagaacacagcugccuagcgccuacaccaacagcuuuaccagaggcguguacuaccccgacaagguguucagauccagcgugcugcacucuacccaggaccuguuccugccuuucuucagcaacgugaccugguuccacgccauccacguguccggcaccaauggcaccaagagauucgacaaccccgugcugcccuucaacgacgggguguacuuugccagcaccgagaaguccaacaucaucagaggcuggaucuucggcaccacacuggacagcaagacccagagccugcugaucgugaacaacgccaccaacguggucaucaaagugugcgaguuccaguucugcaacuaccccuuccugggcgucuacuaccacaagaacaacaagagcuggauggaaagcgaguuccggguguacagcagcgccaacaacugcaccuucgaguacgugucccagccuuuccugauggaccuggaaggcaagcagggcaacuucaagaaccugagcgaguucguguuuaagaacaucgacggcuacuucaagaucuacagcaagcacaccccuaucaaccucgugcgggaucugccucagggcuucucugcucuggaaccccugguggaucugcccaucggcaucaacaucacccgguuucagacacugcuggcccugcacagaagcuaccugacaccuggcgauagcagcagcggauggacagcuggugccgccgcuuacuaugugggcuaccugcagccuagaaccuuccugcugaaguacaacgagaacggcaccaucaccgacgccguggauugugcucuggauccucugagcgagacaaagugcacccugaaguccuucaccguggaaaagggcaucuaccagaccagcaacuuccgggugcagcccaccgaauccaucgugcgguuccccaauaucaccaaucugugccccuucggcgagguguucaaugccaccagauucgccucuguguacgccuggaaccggaagcggaucagcaauugcguggccgacuacuccgugcuguacaacuccgccagcuucagcaccuucaagugcuacggcguguccccuaccaagcugaacgaccugugcuucacaaacguguacgccgacagcuucgugauccggggagaugaagugcggcagauugccccuggacagacaggcaccaucgccgacuacaacuacaagcugcccgacgacuucaccggcugugugauugccuggaacagcaacaaccuggacuccaaagucggcggcaacuacaauuaccuguaccggcuguuccggaaguccaaucugaagcccuucgagcgggacaucuccaccgagaucuaucaggccggcagcaccccuuguaacggcgugaagggcuucaacugcuacuucccacugcaguccuacggcuuucagcccacauacggcgugggcuaucagcccuacagagugguggugcugagcuucgaacugcugcaugccccugccacagugugcggcccuaagaaaagcaccaaucucgugaagaacaaaugcgugaacuucaacuucaacggccugaccggcaccggcgugcugacagagagcaacaagaaguuccugccauuccagcaguuuggccgggauaucgccgauaccacagacgccguuagagauccccagacacuggaaauccuggacaucaccccuugcagcuucggcggagugucugugaucaccccuggcaccaacaccagcaaucagguggcagugcuguaccagggcgugaacuguaccgaagugcccguggccauucacgccgaucagcugacaccuacauggcggguguacuccaccggcagcaauguguuucagaccagagccggcugucugaucggagccgaguacgugaacaauagcuacgagugcgacauccccaucggcgcuggaaucugcgccagcuaccagacacagacaaacagcccucggagagccagaagcguggccagccagagcaucauugccuacacaaugucucugggcgccgagaacagcguggccuacuccaacaacucuaucgcuauccccaccaacuucaccaucagcgugaccacagagauccugccuguguccaugaccaagaccagcguggacugcaccauguacaucugcggcgauuccaccgagugcuccaaccugcugcugcaguacggcagcuucugcacccagcugaauagagcccugacagggaucgccguggaacaggacaagaacacccaagagguguucgcccaagugaagcagaucuacaagaccccuccuaucaaggacuucggcggcuucaauuucagccagauucugcccgauccuagcaagcccagcaagcggagcuucaucgaggaccugcuguucaacaaagugacacuggccgacgccggcuucaucaagcaguauggcgauugucugggcgacauugccgccagggaucugauuugcgcccagaaguuuaacggacugacagugcugccuccucugcugaccgaugagaugaucgcccaguacacaucugcccugcuggccggcacaaucacaagcggcuggacauuuggagcaggcgccgcucugcagauccccuuugcuaugcagauggccuaccgguucaacggcaucggagugacccagaaugugcuguacgagaaccagaagcugaucgccaaccaguucaacagcgccaucggcaagauccaggacagccugagcagcacagcaagcgcccugggaaagcugcaggacguggucaaccagaaugcccaggcacugaacacccuggucaagcagcuguccuccaacuucggcgccaucagcucugugcugaacgauauccugagcagacuggacccuccugaggccgaggugcagaucgacagacugaucacaggcagacugcagagccuccagacauacgugacccagcagcugaucagagccgccgagauuagagccucugccaaucuggccgccaucaagaugucugagugugugcugggccagagcaagagaguggacuuuugcggcaagggcuaccaccugaugagcuucccucagucugccccucacggcgugguguuucugcacgugacauaugugcccgcucaagagaagaauuucaccaccgcuccagccaucugccacgacggcaaagcccacuuuccuagagaaggcguguucguguccaacggcacccauugguucgugacacagcggaacuucuacgagccccagaucaucaccaccgacaacaccuucgugucuggcaacugcgacgucgugaucggcauugugaacaauaccguguacgacccucugcagcccgagcuggacagcuucaaagaggaacuggacaaguacuuuaagaaccacacaagccccgacguggaccugggcgauaucagcggaaucaaugccagcgucgugaacauccagaaagagaucgaccggcugaacgagguggccaagaaucugaacgagagccugaucgaccugcaagaacuggggaaguacgagcaguacaucaaguggcccugguacaucuggcugggcuuuaucgccggacugauugccaucgugauggucacaaucaugcuguguugcaugaccagcugcuguagcugccugaagggcuguuguagcuguggcagcugcugcaaguucgacgaggacgauucugagcccgugcugaagggcgugaaacugcacuacacaugaggacuagucccuguucccagagcccacuuuuuuuucuuuuuuugaaauaaaauagccugucuuucagaucucaaaggcucuuuucagagccaccaaaaaaaaaaaaaaaaaaaaaaaaaaaaaaaaaaaaaaaaaaaaaaaaaaaaaaaaaaaaaaaaaaaaaaaaaaaaaaaaaaaaaaaaaaaaaaaaaaaaa

SEQ ID NO: 23624 - RNA, 4094 nt, Artificial Sequence
  SARS-CoV-2/Wuhan/WIV05/2019__EPI_ISL_402128 spike protein mRNA gc mod (1-1273)(K986P_V987P_K986P_V987P_S13I_W152C_L452R_D614G)
aggagagucccgcagucggcguccagcggcucugcuuguucgugugugugucguugcaggccuuauucaagcuuaccauguucguguuccuggugcugcugccucugguguccauccagugugugaaccugaccaccagaacacagcugccuccagccuacaccaacagcuuuaccagaggcguguacuaccccgacaagguguucagauccagcgugcugcacucuacccaggaccuguuccugccuuucuucagcaacgugaccugguuccacgccauccacguguccggcaccaauggcaccaagagauucgacaaccccgugcugcccuucaacgacgggguguacuuugccagcaccgagaaguccaacaucaucagaggcuggaucuucggcaccacacuggacagcaagacccagagccugcugaucgugaacaacgccaccaacguggucaucaaagugugcgaguuccaguucugcaacgaccccuuccugggcgucuacuaccacaagaacaacaagagcugcauggaaagcgaguuccggguguacagcagcgccaacaacugcaccuucgaguacgugucccagccuuuccugauggaccuggaaggcaagcagggcaacuucaagaaccugcgcgaguucguguuuaagaacaucgacggcuacuucaagaucuacagcaagcacaccccuaucaaccucgugcgggaucugccucagggcuucucugcucuggaaccccugguggaucugcccaucggcaucaacaucacccgguuucagacacugcuggcccugcacagaagcuaccugacaccuggcgauagcagcagcggauggacagcuggugccgccgcuuacuaugugggcuaccugcagccuagaaccuuccugcugaaguacaacgagaacggcaccaucaccgacgccguggauugugcucuggauccucugagcgagacaaagugcacccugaaguccuucaccguggaaaagggcaucuaccagaccagcaacuuccgggugcagcccaccgaauccaucgugcgguuccccaauaucaccaaucugugccccuucggcgagguguucaaugccaccagauucgccucuguguacgccuggaaccggaagcggaucagcaauugcguggccgacuacuccgugcuguacaacuccgccagcuucagcaccuucaagugcuacggcguguccccuaccaagcugaacgaccugugcuucacaaacguguacgccgacagcuucgugauccggggagaugaagugcggcagauugccccuggacagacaggcaagaucgccgacuacaacuacaagcugcccgacgacuucaccggcugugugauugccuggaacagcaacaaccuggacuccaaagucggcggcaacuacaauuaccgcuaccggcuguuccggaaguccaaucugaagcccuucgagcgggacaucuccaccgagaucuaucaggccggcagcaccccuuguaacggcguggaaggcuucaacugcuacuucccacugcaguccuacggcuuucagcccacaaauggcgugggcuaucagcccuacagagugguggugcugagcuucgaacugcugcaugccccugccacagugugcggcccuaagaaaagcaccaaucucgugaagaacaaaugcgugaacuucaacuucaacggccugaccggcaccggcgugcugacagagagcaacaagaaguuccugccauuccagcaguuuggccgggauaucgccgauaccacagacgccguuagagauccccagacacuggaaauccuggacaucaccccuugcagcuucggcggagugucugugaucaccccuggcaccaacaccagcaaucagguggcagugcuguaccagggcgugaacuguaccgaagugcccguggccauucacgccgaucagcugacaccuacauggcggguguacuccaccggcagcaauguguuucagaccagagccggcugucugaucggagccgagcacgugaacaauagcuacgagugcgacauccccaucggcgcuggaaucugcgccagcuaccagacacagacaaacagcccucggagagccagaagcguggccagccagagcaucauugccuacacaaugucucugggcgccgagaacagcguggccuacuccaacaacucuaucgcuauccccaccaacuucaccaucagcgugaccacagagauccugccuguguccaugaccaagaccagcguggacugcaccauguacaucugcggcgauuccaccgagugcuccaaccugcugcugcaguacggcagcuucugcacccagcugaauagagcccugacagggaucgccguggaacaggacaagaacacccaagagguguucgcccaagugaagcagaucuacaagaccccuccuaucaaggacuucggcggcuucaauuucagccagauucugcccgauccuagcaagcccagcaagcggagcuucaucgaggaccugcuguucaacaaagugacacuggccgacgccggcuucaucaagcaguauggcgauugucugggcgacauugccgccagggaucugauuugcgcccagaaguuuaacggacugacagugcugccuccucugcugaccgaugagaugaucgcccaguacacaucugcccugcuggccggcacaaucacaagcggcuggacauuuggagcaggcgccgcucugcagauccccuuugcuaugcagauggccuaccgguucaacggcaucggagugacccagaaugugcuguacgagaaccagaagcugaucgccaaccaguucaacagcgccaucggcaagauccaggacagccugagcagcacagcaagcgcccugggaaagcugcaggacguggucaaccagaaugcccaggcacugaacacccuggucaagcagcuguccuccaacuucggcgccaucagcucugugcugaacgauauccugagcagacuggacccuccugaggccgaggugcagaucgacagacugaucacaggcagacugcagagccuccagacauacgugacccagcagcugaucagagccgccgagauuagagccucugccaaucuggccgccaccaagaugucugagugugugcugggccagagcaagagaguggacuuuugcggcaagggcuaccaccugaugagcuucccucagucugccccucacggcgugguguuucugcacgugacauaugugcccgcucaagagaagaauuucaccaccgcuccagccaucugccacgacggcaaagcccacuuuccuagagaaggcguguucguguccaacggcacccauugguucgugacacagcggaacuucuacgagccccagaucaucaccaccgacaacaccuucgugucuggcaacugcgacgucgugaucggcauugugaacaauaccguguacgacccucugcagcccgagcuggacagcuucaaagaggaacuggacaaguacuuuaagaaccacacaagccccgacguggaccugggcgauaucagcggaaucaaugccagcgucgugaacauccagaaagagaucgaccggcugaacgagguggccaagaaucugaacgagagccugaucgaccugcaagaacuggggaaguacgagcaguacaucaaguggcccugguacaucuggcugggcuuuaucgccggacugauugccaucgugauggucacaaucaugcuguguugcaugaccagcugcuguagcugccugaagggcuguuguagcuguggcagcugcugcaaguucgacgaggacgauucugagcccgugcugaagggcgugaaacugcacuacacaugaggacuagucccuguucccagagcccacuuuuuuuucuuuuuuugaaauaaaauagccugucuuucagaucucaaaggcucuuuucagagccaccaaaaaaaaaaaaaaaaaaaaaaaaaaaaaaaaaaaaaaaaaaaaaaaaaaaaaaaaaaaaaaaaaaaaaaaaaaaaaaaaaaaaaaaaaaaaaaaaaaaaa

SEQ ID NO: 23625 - RNA, 1521 nt, Artificial Sequence
  SARS-CoV-2/Wuhan/WIV05/2019__EPI_ISL_402128 spike protein mRNA gc (1-15,334-528) Ferritin construct
aggagagggcgcuuggcuugcaaggacccugagcugcggcauugaagcacacccaacccaacucgacugaagucagccucacugaaccggaucugagaaucuucucucucugggcuugccagggcucuccgaaccuagcuagcauccucuucaauuccaacuagaaagcuuaccauguucguguuccugguccuccugccccuggugagcucccagugcaaccugugccccuucggcgagguguucaacgccacccgguucgccagcgucuacgccuggaaccgcaagcggaucuccaacugcguggcggacuacagcgugcuguacaacuccgccagcuucuccacguucaagugcuacggcgucagccccaccaagcucaacgaccugugcuucaccaacguguacgccgacuccuucgugauccgcggggacgagguccggcagaucgcccccggccagaccgggaagaucgccgacuacaacuacaagcugccggacgacuucacgggcugcgugaucgcguggaacagcaacaaccucgacuccaaggucgggggcaacuacaacuaccuguaccgccuguuccgcaagagcaaccucaagcccuucgagcgggacaucuccaccgagaucuaccaggccggcagcacccccugcaacgggguggagggcuucaacugcuacuucccccugcaguccuacggguuccagccgaccaacggcgugggguaccagcccuaccggguggucgugcugagcuucgagcuccugcacgcccccgccacggugugcggccccaagggcggggguggaagcggcggggguggaagugacaucaucaagcuccugaacgagcaggucaacaaggagaugcaguccagcaaccuguacauguccaugagcuccuggugcuacacccacagccucgacggcgccgggcuguuccuguucgaccacgccgcggaggaguacgagcacgccaagaagcucaucaucuuccugaacgagaacaacgugcccgugcagcugaccuccaucagcgccccggagcacaaguucgagggccucacgcagaucuuccagaaggccuacgagcacgagcagcacaucuccgagagcaucaacaacaucguggaccacgccaucaaguccaaggaccacgcgaccuucaacuuccugcagugguacgucgccgagcagcacgaggaggaggugcuguucaaggacauccucgacaagaucgagcugaucgggaacgagaaccacggccuguaccucgccgaccaguacgugaaggggaucgccaagagccgcaaguccugaggacuagucccuguucccagagcccacuuuuuuuucuuuuuuugaaauaaaauagccugucuuucagaucucaaaggcucuuuucagagccaccaaaaaaaaaaaaaaaaaaaaaaaaaaaaaaaaaaaaaaaaaaaaaaaaaaaaaaaaaaaaaaaaaaaaaaaaaaaaaaaaaaaaaaaaaaaaaaaaaaaaa

SEQ ID NO: 23626 - RNA, 1119 nt, Artificial Sequence
  SARS-CoV-2/Wuhan/WIV05/2019__EPI_ISL_402128 spike protein mRNA gc (334-528) Foldon construct
aggagagggcgcuuggcuugcaaggacccugagcugcggcauugaagcacacccaacccaacucgacugaagucagccucacugaaccggaucugagaaucuucucucucugggcuugccagggcucuccgaaccuagcuagcauccucuucaauuccaacuagaaagcuuaccaugcccaugggcagccugcagccgcucgccacccuguaccugcucgggaugcugguggccuccguccuggcgaaccugugccccuucggcgagguguucaacgccacccgguucgccagcgucuacgccuggaaccgcaagcggaucuccaacugcguggcggacuacagcgugcuguacaacuccgccagcuucuccacguucaagugcuacggcgucagccccaccaagcucaacgaccugugcuucaccaacguguacgccgacuccuucgugauccgcggggacgagguccggcagaucgcccccggccagaccgggaagaucgccgacuacaacuacaagcugccggacgacuucacgggcugcgugaucgcguggaacagcaacaaccucgacuccaaggucgggggcaacuacaacuaccuguaccgccuguuccgcaagagcaaccucaagcccuucgagcgggacaucuccaccgagaucuaccaggccggcagcacccccugcaacgggguggagggcuucaacugcuacuucccccugcaguccuacggguuccagccgaccaacggcgugggguaccagcccuaccggguggucgugcugagcuucgagcuccugcacgcccccgccacggugugcggccccaagggcagcggcggguacauccccgaggccccgcgcgacggccaggccuacgugcggaaggacggcgaguggguccugcugagcaccuuccucugaggacuagucccuguucccagagcccacuuuuuuuucuuuuuuugaaauaaaauagccugucuuucagaucucaaaggcucuuuucagagccaccaaaaaaaaaaaaaaaaaaaaaaaaaaaaaaaaaaaaaaaaaaaaaaaaaaaaaaaaaaaaaaaaaaaaaaaaaaaaaaaaaaaaaaaaaaaaaaaaaaaaa

SEQ ID NO: 23627 - RNA, 1497 nt, Artificial Sequence
  SARS-CoV-2/Wuhan/WIV05/2019__EPI_ISL_402128 spike protein mRNA gc (1-15,334-528) LumSynth construct
aggagagggcgcuuggcuugcaaggacccugagcugcggcauugaagcacacccaacccaacucgacugaagucagccucacugaaccggaucugagaaucuucucucucugggcuugccagggcucuccgaaccuagcuagcauccucuucaauuccaacuagaaagcuuaccauguucguguuccugguccuccugccccuggugagcucccagugcaaccugugccccuucggcgagguguucaacgccacccgguucgccagcgucuacgccuggaaccgcaagcggaucuccaacugcguggcggacuacagcgugcuguacaacuccgccagcuucuccacguucaagugcuacggcgucagccccaccaagcucaacgaccugugcuucaccaacguguacgccgacuccuucgugauccgcggggacgagguccggcagaucgcccccggccagaccgggaagaucgccgacuacaacuacaagcugccggacgacuucacgggcugcgugaucgcguggaacagcaacaaccucgacuccaaggucgggggcaacuacaacuaccuguaccgccuguuccgcaagagcaaccucaagcccuucgagcgggacaucuccaccgagaucuaccaggccggcagcacccccugcaacgggguggagggcuucaacugcuacuucccccugcaguccuacggguuccagccgaccaacggcgugggguaccagcccuaccggguggucgugcugagcuucgagcuccugcacgcccccgccacggugugcggccccaagggcggcggcggcuccggaggcggagguagcgggggacagaucuacgagggcaagcugaccgccgaggggcuccgcuucggcaucguggccagccgguucaaccacgcgcuggucgaccgccugguggagggggccaucgacgccaucgugcggcacggcgggcgcgaggaggacaucacccucguccgggugcccggcuccugggagaucccgguggccgccggcgagcuggcccgcaaggaggacaucgacgcggucaucgccaucggggugcugauccggggcgccacgccccacuucgacuacaucgccagcgagguguccaaggggcucgcggaccugagccuggagcuccgcaagcccaucaccuucggcgucaucaccgccgacacccuggagcaggccaucgagcgggccgggacgaagcacggcaacaagggcugggaggccgcgcuguccgccaucgagauggccaaccucuucaagagccugcgcugaggacuagucccuguucccagagcccacuuuuuuuucuuuuuuugaaauaaaauagccugucuuucagaucucaaaggcucuuuucagagccaccaaaaaaaaaaaaaaaaaaaaaaaaaaaaaaaaaaaaaaaaaaaaaaaaaaaaaaaaaaaaaaaaaaaaaaaaaaaaaaaaaaaaaaaaaaaaaaaaaaaaa

SEQ ID NO: 23628 - RNA, 1458 nt, Artificial Sequence
  SARS-CoV-2/Wuhan/WIV05/2019__EPI_ISL_402128 spike protein mRNA gc (334-528) LumSynth construct
aggagagggcgcuuggcuugcaaggacccugagcugcggcauugaagcacacccaacccaacucgacugaagucagccucacugaaccggaucugagaaucuucucucucugggcuugccagggcucuccgaaccuagcuagcauccucuucaauuccaacuagaaagcuuaccaugcagaucuacgagggcaagcugaccgccgaggggcuccgcuucggcaucguggccagccgguucaaccacgcgcuggucgaccgccugguggagggggccaucgacgccaucgugcggcacggcgggcgcgaggaggacaucacccucguccgggugcccggcuccugggagaucccgguggccgccggcgagcuggcccgcaaggaggacaucgacgcggucaucgccaucggggugcugauccggggcgccacgccccacuucgacuacaucgccagcgagguguccaaggggcucgcggaccugagccuggagcuccgcaagcccaucaccuucggcgucaucaccgccgacacccuggagcaggccaucgagcgggccgggacgaagcacggcaacaagggcugggaggccgcgcuguccgccaucgagauggccaaccucuucaagagccugcgcggcgggggcgggagcggcgggggcggcuccgggggcgggaaccugugccccuucggcgagguguucaacgccacccgguucgccagcgucuacgccuggaaccgcaagcggaucuccaacugcguggcggacuacagcgugcuguacaacuccgccagcuucuccacguucaagugcuacggcgucagccccaccaagcucaacgaccugugcuucaccaacguguacgccgacuccuucgugauccgcggggacgagguccggcagaucgcccccggccagaccgggaagaucgccgacuacaacuacaagcugccggacgacuucacgggcugcgugaucgcguggaacagcaacaaccucgacuccaaggucgggggcaacuacaacuaccuguaccgccuguuccgcaagagcaaccucaagcccuucgagcgggacaucuccaccgagaucuaccaggccggcagcacccccugcaacgggguggagggcuucaacugcuacuucccccugcaguccuacggguuccagccgaccaacggcgugggguaccagcccuaccggguggucgugcugagcuucgagcuccugcacgcccccgccacggugugcggccccaagugaggacuagucccuguucccagagcccacuuuuuuuucuuuuuuugaaauaaaauagccugucuuucagaucucaaaggcucuuuucagagccaccaaaaaaaaaaaaaaaaaaaaaaaaaaaaaaaaaaaaaaaaaaaaaaaaaaaaaaaaaaaaaaaaaaaaaaaaaaaaaaaaaaaaaaaaaaaaaaaaaaaaa

SEQ ID NO: 23629 - RNA, 4191 nt, Artificial Sequence
  SARS-CoV-2/Wuhan/WIV05/2019__EPI_ISL_402128 spike protein mRNA gc (1-1273)
aggagagggcgcuuggcuugcaaggacccugagcugcggcauugaagcacacccaacccaacucgacugaagucagccucacugaaccggaucugagaaucuucucucucugggcuugccagggcucuccgaaccuagcuagcauccucuucaauuccaacuagaaagcuuaccauguucguguuccugguccuccugccccuggugagcucccagugcgugaaccucaccacccgcacgcagcugccgcccgccuacaccaacagcuucacccggggcgucuacuaccccgacaagguguuccgcuccagcgugcugcacuccacccaggaccucuuccugcccuucuucagcaacgucacgugguuccacgccauccacguguccgggaccaacggcaccaagcgguucgacaacccggugcugcccuucaacgacggggucuacuucgcgagcaccgagaaguccaacaucauccgcggcuggaucuucgggacgacccucgacagcaagacccagucccugcugaucgugaacaacgccaccaacguggucaucaaggugugcgaguuccaguucugcaacgaccccuuccucggcguguacuaccacaagaacaacaagagcuggauggaguccgaguuccgggucuacagcuccgccaacaacugcacguucgaguacgugagccagcccuuccugauggaccuggagggcaagcaggggaacuucaagaaccuccgcgaguucguguucaagaacaucgacggcuacuucaagaucuacuccaagcacaccccgaucaaccugguccgggaccugccccagggguucagcgcccucgagccccugguggaccugcccaucggcaucaacaucacccgcuuccagacccuccuggcccugcaccgguccuaccucacgccgggggacagcagcuccggcuggaccgcgggcgccgccgccuacuacgugggguaccugcagccccgcaccuuccugcucaaguacaacgagaacggcaccaucacggacgcggucgacugcgcccuggacccccugagcgagaccaagugcacccucaaguccuucaccguggagaaggggaucuaccagacgagcaacuuccgggugcagcccaccgaguccaucguccgcuucccgaacaucaccaaccugugccccuucggcgagguguucaacgccacccgguucgccagcgucuacgccuggaaccgcaagcggaucuccaacugcguggcggacuacagcgugcuguacaacuccgccagcuucuccacguucaagugcuacggcgucagccccaccaagcucaacgaccugugcuucaccaacguguacgccgacuccuucgugauccgcggggacgagguccggcagaucgcccccggccagaccgggaagaucgccgacuacaacuacaagcugccggacgacuucacgggcugcgugaucgcguggaacagcaacaaccucgacuccaaggucgggggcaacuacaacuaccuguaccgccuguuccgcaagagcaaccucaagcccuucgagcgggacaucuccaccgagaucuaccaggccggcagcacccccugcaacgggguggagggcuucaacugcuacuucccccugcaguccuacggguuccagccgaccaacggcgugggguaccagcccuaccggguggucgugcugagcuucgagcuccugcacgcccccgccacggugugcggccccaagaaguccaccaaccuggucaagaacaagugcgugaacuucaacuucaacggccucaccgggaccggcgugcugaccgagagcaacaagaaguuccugccguuccagcaguucgggcgcgacaucgccgacacgaccgacgcgguccgcgacccccagacccuggagauccucgacaucacccccugcagcuucggcgggguguccgugaucacgccgggcaccaacaccagcaaccaggucgccgugcuguaccaggacgugaacugcaccgagguccccguggccauccacgccgaccagcugacgcccaccuggcggguguacuccaccggcagcaacgucuuccagacccgcgccgggugccucaucggcgcggagcacgugaacaacuccuacgagugcgacauccccaucggggccggcaucugcgccagcuaccagacgcagaccaacuccccgcggcgcgcccggagcguggcgucccagagcaucaucgccuacaccaugucccugggcgccgagaacagcgucgccuacuccaacaacagcaucgccauccccaccaacuucacgaucuccgugaccaccgagauccugcccgugagcaugaccaagacgagcgucgacugcaccauguacaucugcggggacuccaccgagugcagcaaccuccugcugcaguacggcuccuucugcacccagcucaaccgcgcgcugacggggaucgccguggagcaggacaagaacacccaggagguguucgcccaggucaagcagaucuacaagacgcccccgaucaaggacuucggcggguucaacuucagccagauccugcccgaccccuccaagcccagcaagcgguccuucaucgaggaccuccuguucaacaaggugacccuggccgacgccggcuucaucaagcaguacggcgacugccucggggacaucgcggcccgcgaccugaucugcgcccagaaguucaacggccugaccgugcucccgccccugcugaccgacgagaugaucgcccaguacaccagcgcccuccuggcggggaccaucacguccggcuggaccuucggggccggcgccgcccugcagauccccuucgcgaugcagauggccuaccgguucaacggcaucggggucacccagaacgugcucuacgagaaccagaagcugaucgccaaccaguucaacagcgccaucggcaagauccaggacucccugagcuccaccgccagcgcgcucgggaagcugcaggacguggucaaccagaacgcccaggcccugaacacgcucgugaagcagcuguccagcaacuucggcgccaucuccagcgugcugaacgacauccucucccgccuggacaaggucgaggccgaggugcagaucgaccggcugaucaccgggcgccuccagagccugcagaccuacgugacccagcagcugauccgggcggccgagauccgcgccagcgccaaccucgccgcgaccaagauguccgagugcguccugggccagagcaagcggguggacuucugcggcaagggguaccaccugauguccuucccccagagcgccccgcacggcguggucuuccuccacgugacguacguccccgcccaggagaagaacuucaccaccgcccccgcgaucugccacgacgggaaggcccacuucccccgcgagggcguguucguguccaacgggacccacugguucgucacgcagcggaacuucuacgagccgcagaucaucaccaccgacaacaccuucgugagcggcaacugcgacguggucaucggcaucgugaacaacacgguguacgacccccugcagcccgagcuggacuccuucaaggaggagcucgacaaguacuucaagaaccacaccagccccgacgucgaccugggggacaucuccggcaucaacgccagcguggugaacauccagaaggagaucgaccgccugaacgaggucgccaagaaccucaacgagucccugaucgaccugcaggagcucgggaaguacgagcaguacaucaaguggccgugguacaucuggcugggcuucaucgccggccugaucgcgaucgugauggugaccaucaugcucugcugcaugaccagcugcugcuccugccugaaggggugcugcagcugcggcuccugcugcaaguucgacgaggacgacagcgagcccguccugaagggggugaagcuccacuacacgugaggacuagucccuguucccagagcccacuuuuuuuucuuuuuuugaaauaaaauagccugucuuucagaucucaaaggcucuuuucagagccaccaaaaaaaaaaaaaaaaaaaaaaaaaaaaaaaaaaaaaaaaaaaaaaaaaaaaaaaaaaaaaaaaaaaaaaaaaaaaaaaaaaaaaaaaaaaaaaaaaaaaa

SEQ ID NO: 23630 - RNA, 4191 nt, Artificial Sequence
  SARS-CoV-2/Wuhan/WIV05/2019__EPI_ISL_402128 spike protein mRNA gc (1-1273)(D614G)
aggagagggcgcuuggcuugcaaggacccugagcugcggcauugaagcacacccaacccaacucgacugaagucagccucacugaaccggaucugagaaucuucucucucugggcuugccagggcucuccgaaccuagcuagcauccucuucaauuccaacuagaaagcuuaccauguucguguuccugguccuccugccccuggugagcucccagugcgugaaccucaccacccgcacgcagcugccgcccgccuacaccaacagcuucacccggggcgucuacuaccccgacaagguguuccgcuccagcgugcugcacuccacccaggaccucuuccugcccuucuucagcaacgucacgugguuccacgccauccacguguccgggaccaacggcaccaagcgguucgacaacccggugcugcccuucaacgacggggucuacuucgcgagcaccgagaaguccaacaucauccgcggcuggaucuucgggacgacccucgacagcaagacccagucccugcugaucgugaacaacgccaccaacguggucaucaaggugugcgaguuccaguucugcaacgaccccuuccucggcguguacuaccacaagaacaacaagagcuggauggaguccgaguuccgggucuacagcuccgccaacaacugcacguucgaguacgugagccagcccuuccugauggaccuggagggcaagcaggggaacuucaagaaccuccgcgaguucguguucaagaacaucgacggcuacuucaagaucuacuccaagcacaccccgaucaaccugguccgggaccugccccagggguucagcgcccucgagccccugguggaccugcccaucggcaucaacaucacccgcuuccagacccuccuggcccugcaccgguccuaccucacgccgggggacagcagcuccggcuggaccgcgggcgccgccgccuacuacgugggguaccugcagccccgcaccuuccugcucaaguacaacgagaacggcaccaucacggacgcggucgacugcgcccuggacccccugagcgagaccaagugcacccucaaguccuucaccguggagaaggggaucuaccagacgagcaacuuccgggugcagcccaccgaguccaucguccgcuucccgaacaucaccaaccugugccccuucggcgagguguucaacgccacccgguucgccagcgucuacgccuggaaccgcaagcggaucuccaacugcguggcggacuacagcgugcuguacaacuccgccagcuucuccacguucaagugcuacggcgucagccccaccaagcucaacgaccugugcuucaccaacguguacgccgacuccuucgugauccgcggggacgagguccggcagaucgcccccggccagaccgggaagaucgccgacuacaacuacaagcugccggacgacuucacgggcugcgugaucgcguggaacagcaacaaccucgacuccaaggucgggggcaacuacaacuaccuguaccgccuguuccgcaagagcaaccucaagcccuucgagcgggacaucuccaccgagaucuaccaggccggcagcacccccugcaacgggguggagggcuucaacugcuacuucccccugcaguccuacggguuccagccgaccaacggcgugggguaccagcccuaccggguggucgugcugagcuucgagcuccugcacgcccccgccacggugugcggccccaagaaguccaccaaccuggucaagaacaagugcgugaacuucaacuucaacggccucaccgggaccggcgugcugaccgagagcaacaagaaguuccugccguuccagcaguucgggcgcgacaucgccgacacgaccgacgcgguccgcgacccccagacccuggagauccucgacaucacccccugcagcuucggcgggguguccgugaucacgccgggcaccaacaccagcaaccaggucgccgugcuguaccagggcgugaacugcaccgagguccccguggccauccacgccgaccagcugacgcccaccuggcggguguacuccaccggcagcaacgucuuccagacccgcgccgggugccucaucggcgcggagcacgugaacaacuccuacgagugcgacauccccaucggggccggcaucugcgccagcuaccagacgcagaccaacuccccgcggcgcgcccggagcguggcgucccagagcaucaucgccuacaccaugucccugggcgccgagaacagcgucgccuacuccaacaacagcaucgccauccccaccaacuucacgaucuccgugaccaccgagauccugcccgugagcaugaccaagacgagcgucgacugcaccauguacaucugcggggacuccaccgagugcagcaaccuccugcugcaguacggcuccuucugcacccagcucaaccgcgcgcugacggggaucgccguggagcaggacaagaacacccaggagguguucgcccaggucaagcagaucuacaagacgcccccgaucaaggacuucggcggguucaacuucagccagauccugcccgaccccuccaagcccagcaagcgguccuucaucgaggaccuccuguucaacaaggugacccuggccgacgccggcuucaucaagcaguacggcgacugccucggggacaucgcggcccgcgaccugaucugcgcccagaaguucaacggccugaccgugcucccgccccugcugaccgacgagaugaucgcccaguacaccagcgcccuccuggcggggaccaucacguccggcuggaccuucggggccggcgccgcccugcagauccccuucgcgaugcagauggccuaccgguucaacggcaucggggucacccagaacgugcucuacgagaaccagaagcugaucgccaaccaguucaacagcgccaucggcaagauccaggacucccugagcuccaccgccagcgcgcucgggaagcugcaggacguggucaaccagaacgcccaggcccugaacacgcucgugaagcagcuguccagcaacuucggcgccaucuccagcgugcugaacgacauccucucccgccuggacaaggucgaggccgaggugcagaucgaccggcugaucaccgggcgccuccagagccugcagaccuacgugacccagcagcugauccgggcggccgagauccgcgccagcgccaaccucgccgcgaccaagauguccgagugcguccugggccagagcaagcggguggacuucugcggcaagggguaccaccugauguccuucccccagagcgccccgcacggcguggucuuccuccacgugacguacguccccgcccaggagaagaacuucaccaccgcccccgcgaucugccacgacgggaaggcccacuucccccgcgagggcguguucguguccaacgggacccacugguucgucacgcagcggaacuucuacgagccgcagaucaucaccaccgacaacaccuucgugagcggcaacugcgacguggucaucggcaucgugaacaacacgguguacgacccccugcagcccgagcuggacuccuucaaggaggagcucgacaaguacuucaagaaccacaccagccccgacgucgaccugggggacaucuccggcaucaacgccagcguggugaacauccagaaggagaucgaccgccugaacgaggucgccaagaaccucaacgagucccugaucgaccugcaggagcucgggaaguacgagcaguacaucaaguggccgugguacaucuggcugggcuucaucgccggccugaucgcgaucgugauggugaccaucaugcucugcugcaugaccagcugcugcuccugccugaaggggugcugcagcugcggcuccugcugcaaguucgacgaggacgacagcgagcccguccugaagggggugaagcuccacuacacgugaggacuagucccuguucccagagcccacuuuuuuuucuuuuuuugaaauaaaauagccugucuuucagaucucaaaggcucuuuucagagccaccaaaaaaaaaaaaaaaaaaaaaaaaaaaaaaaaaaaaaaaaaaaaaaaaaaaaaaaaaaaaaaaaaaaaaaaaaaaaaaaaaaaaaaaaaaaaaaaaaaaaa

SEQ ID NO: 23631 - RNA, 4191 nt, Artificial Sequence
  SARS-CoV-2/Wuhan/WIV05/2019__EPI_ISL_402128 spike protein mRNA gc (1-1273)(A222V_D614G)
aggagagggcgcuuggcuugcaaggacccugagcugcggcauugaagcacacccaacccaacucgacugaagucagccucacugaaccggaucugagaaucuucucucucugggcuugccagggcucuccgaaccuagcuagcauccucuucaauuccaacuagaaagcuuaccauguucguguuccugguccuccugccccuggugagcucccagugcgugaaccucaccacccgcacgcagcugccgcccgccuacaccaacagcuucacccggggcgucuacuaccccgacaagguguuccgcuccagcgugcugcacuccacccaggaccucuuccugcccuucuucagcaacgucacgugguuccacgccauccacguguccgggaccaacggcaccaagcgguucgacaacccggugcugcccuucaacgacggggucuacuucgcgagcaccgagaaguccaacaucauccgcggcuggaucuucgggacgacccucgacagcaagacccagucccugcugaucgugaacaacgccaccaacguggucaucaaggugugcgaguuccaguucugcaacgaccccuuccucggcguguacuaccacaagaacaacaagagcuggauggaguccgaguuccgggucuacagcuccgccaacaacugcacguucgaguacgugagccagcccuuccugauggaccuggagggcaagcaggggaacuucaagaaccuccgcgaguucguguucaagaacaucgacggcuacuucaagaucuacuccaagcacaccccgaucaaccugguccgggaccugccccagggguucagcguccucgagccccugguggaccugcccaucggcaucaacaucacccgcuuccagacccuccuggcccugcaccgguccuaccucacgccgggggacagcagcuccggcuggaccgcgggcgccgccgccuacuacgugggguaccugcagccccgcaccuuccugcucaaguacaacgagaacggcaccaucacggacgcggucgacugcgcccuggacccccugagcgagaccaagugcacccucaaguccuucaccguggagaaggggaucuaccagacgagcaacuuccgggugcagcccaccgaguccaucguccgcuucccgaacaucaccaaccugugccccuucggcgagguguucaacgccacccgguucgccagcgucuacgccuggaaccgcaagcggaucuccaacugcguggcggacuacagcgugcuguacaacuccgccagcuucuccacguucaagugcuacggcgucagccccaccaagcucaacgaccugugcuucaccaacguguacgccgacuccuucgugauccgcggggacgagguccggcagaucgcccccggccagaccgggaagaucgccgacuacaacuacaagcugccggacgacuucacgggcugcgugaucgcguggaacagcaacaaccucgacuccaaggucgggggcaacuacaacuaccuguaccgccuguuccgcaagagcaaccucaagcccuucgagcgggacaucuccaccgagaucuaccaggccggcagcacccccugcaacgggguggagggcuucaacugcuacuucccccugcaguccuacggguuccagccgaccaacggcgugggguaccagcccuaccggguggucgugcugagcuucgagcuccugcacgcccccgccacggugugcggccccaagaaguccaccaaccuggucaagaacaagugcgugaacuucaacuucaacggccucaccgggaccggcgugcugaccgagagcaacaagaaguuccugccguuccagcaguucgggcgcgacaucgccgacacgaccgacgcgguccgcgacccccagacccuggagauccucgacaucacccccugcagcuucggcgggguguccgugaucacgccgggcaccaacaccagcaaccaggucgccgugcuguaccagggcgugaacugcaccgagguccccguggccauccacgccgaccagcugacgcccaccuggcggguguacuccaccggcagcaacgucuuccagacccgcgccgggugccucaucggcgcggagcacgugaacaacuccuacgagugcgacauccccaucggggccggcaucugcgccagcuaccagacgcagaccaacuccccgcggcgcgcccggagcguggcgucccagagcaucaucgccuacaccaugucccugggcgccgagaacagcgucgccuacuccaacaacagcaucgccauccccaccaacuucacgaucuccgugaccaccgagauccugcccgugagcaugaccaagacgagcgucgacugcaccauguacaucugcggggacuccaccgagugcagcaaccuccugcugcaguacggcuccuucugcacccagcucaaccgcgcgcugacggggaucgccguggagcaggacaagaacacccaggagguguucgcccaggucaagcagaucuacaagacgcccccgaucaaggacuucggcggguucaacuucagccagauccugcccgaccccuccaagcccagcaagcgguccuucaucgaggaccuccuguucaacaaggugacccuggccgacgccggcuucaucaagcaguacggcgacugccucggggacaucgcggcccgcgaccugaucugcgcccagaaguucaacggccugaccgugcucccgccccugcugaccgacgagaugaucgcccaguacaccagcgcccuccuggcggggaccaucacguccggcuggaccuucggggccggcgccgcccugcagauccccuucgcgaugcagauggccuaccgguucaacggcaucggggucacccagaacgugcucuacgagaaccagaagcugaucgccaaccaguucaacagcgccaucggcaagauccaggacucccugagcuccaccgccagcgcgcucgggaagcugcaggacguggucaaccagaacgcccaggcccugaacacgcucgugaagcagcuguccagcaacuucggcgccaucuccagcgugcugaacgacauccucucccgccuggacaaggucgaggccgaggugcagaucgaccggcugaucaccgggcgccuccagagccugcagaccuacgugacccagcagcugauccgggcggccgagauccgcgccagcgccaaccucgccgcgaccaagauguccgagugcguccugggccagagcaagcggguggacuucugcggcaagggguaccaccugauguccuucccccagagcgccccgcacggcguggucuuccuccacgugacguacguccccgcccaggagaagaacuucaccaccgcccccgcgaucugccacgacgggaaggcccacuucccccgcgagggcguguucguguccaacgggacccacugguucgucacgcagcggaacuucuacgagccgcagaucaucaccaccgacaacaccuucgugagcggcaacugcgacguggucaucggcaucgugaacaacacgguguacgacccccugcagcccgagcuggacuccuucaaggaggagcucgacaaguacuucaagaaccacaccagccccgacgucgaccugggggacaucuccggcaucaacgccagcguggugaacauccagaaggagaucgaccgccugaacgaggucgccaagaaccucaacgagucccugaucgaccugcaggagcucgggaaguacgagcaguacaucaaguggccgugguacaucuggcugggcuucaucgccggccugaucgcgaucgugauggugaccaucaugcucugcugcaugaccagcugcugcuccugccugaaggggugcugcagcugcggcuccugcugcaaguucgacgaggacgacagcgagcccguccugaagggggugaagcuccacuacacgugaggacuagucccuguucccagagcccacuuuuuuuucuuuuuuugaaauaaaauagccugucuuucagaucucaaaggcucuuuucagagccaccaaaaaaaaaaaaaaaaaaaaaaaaaaaaaaaaaaaaaaaaaaaaaaaaaaaaaaaaaaaaaaaaaaaaaaaaaaaaaaaaaaaaaaaaaaaaaaaaaaaaa

SEQ ID NO: 23632 - RNA, 4191 nt, Artificial Sequence
  SARS-CoV-2/Wuhan/WIV05/2019__EPI_ISL_402128 spike protein mRNA gc (1-1273)(N439K_D614G)
aggagagggcgcuuggcuugcaaggacccugagcugcggcauugaagcacacccaacccaacucgacugaagucagccucacugaaccggaucugagaaucuucucucucugggcuugccagggcucuccgaaccuagcuagcauccucuucaauuccaacuagaaagcuuaccauguucguguuccugguccuccugccccuggugagcucccagugcgugaaccucaccacccgcacgcagcugccgcccgccuacaccaacagcuucacccggggcgucuacuaccccgacaagguguuccgcuccagcgugcugcacuccacccaggaccucuuccugcccuucuucagcaacgucacgugguuccacgccauccacguguccgggaccaacggcaccaagcgguucgacaacccggugcugcccuucaacgacggggucuacuucgcgagcaccgagaaguccaacaucauccgcggcuggaucuucgggacgacccucgacagcaagacccagucccugcugaucgugaacaacgccaccaacguggucaucaaggugugcgaguuccaguucugcaacgaccccuuccucggcguguacuaccacaagaacaacaagagcuggauggaguccgaguuccgggucuacagcuccgccaacaacugcacguucgaguacgugagccagcccuuccugauggaccuggagggcaagcaggggaacuucaagaaccuccgcgaguucguguucaagaacaucgacggcuacuucaagaucuacuccaagcacaccccgaucaaccugguccgggaccugccccagggguucagcgcccucgagccccugguggaccugcccaucggcaucaacaucacccgcuuccagacccuccuggcccugcaccgguccuaccucacgccgggggacagcagcuccggcuggaccgcgggcgccgccgccuacuacgugggguaccugcagccccgcaccuuccugcucaaguacaacgagaacggcaccaucacggacgcggucgacugcgcccuggacccccugagcgagaccaagugcacccucaaguccuucaccguggagaaggggaucuaccagacgagcaacuuccgggugcagcccaccgaguccaucguccgcuucccgaacaucaccaaccugugccccuucggcgagguguucaacgccacccgguucgccagcgucuacgccuggaaccgcaagcggaucuccaacugcguggcggacuacagcgugcuguacaacuccgccagcuucuccacguucaagugcuacggcgucagccccaccaagcucaacgaccugugcuucaccaacguguacgccgacuccuucgugauccgcggggacgagguccggcagaucgcccccggccagaccgggaagaucgccgacuacaacuacaagcugccggacgacuucacgggcugcgugaucgcguggaacagcaagaaccucgacuccaaggucgggggcaacuacaacuaccuguaccgccuguuccgcaagagcaaccucaagcccuucgagcgggacaucuccaccgagaucuaccaggccggcagcacccccugcaacgggguggagggcuucaacugcuacuucccccugcaguccuacggguuccagccgaccaacggcgugggguaccagcccuaccggguggucgugcugagcuucgagcuccugcacgcccccgccacggugugcggccccaagaaguccaccaaccuggucaagaacaagugcgugaacuucaacuucaacggccucaccgggaccggcgugcugaccgagagcaacaagaaguuccugccguuccagcaguucgggcgcgacaucgccgacacgaccgacgcgguccgcgacccccagacccuggagauccucgacaucacccccugcagcuucggcgggguguccgugaucacgccgggcaccaacaccagcaaccaggucgccgugcuguaccagggcgugaacugcaccgagguccccguggccauccacgccgaccagcugacgcccaccuggcggguguacuccaccggcagcaacgucuuccagacccgcgccgggugccucaucggcgcggagcacgugaacaacuccuacgagugcgacauccccaucggggccggcaucugcgccagcuaccagacgcagaccaacuccccgcggcgcgcccggagcguggcgucccagagcaucaucgccuacaccaugucccugggcgccgagaacagcgucgccuacuccaacaacagcaucgccauccccaccaacuucacgaucuccgugaccaccgagauccugcccgugagcaugaccaagacgagcgucgacugcaccauguacaucugcggggacuccaccgagugcagcaaccuccugcugcaguacggcuccuucugcacccagcucaaccgcgcgcugacggggaucgccguggagcaggacaagaacacccaggagguguucgcccaggucaagcagaucuacaagacgcccccgaucaaggacuucggcggguucaacuucagccagauccugcccgaccccuccaagcccagcaagcgguccuucaucgaggaccuccuguucaacaaggugacccuggccgacgccggcuucaucaagcaguacggcgacugccucggggacaucgcggcccgcgaccugaucugcgcccagaaguucaacggccugaccgugcucccgccccugcugaccgacgagaugaucgcccaguacaccagcgcccuccuggcggggaccaucacguccggcuggaccuucggggccggcgccgcccugcagauccccuucgcgaugcagauggccuaccgguucaacggcaucggggucacccagaacgugcucuacgagaaccagaagcugaucgccaaccaguucaacagcgccaucggcaagauccaggacucccugagcuccaccgccagcgcgcucgggaagcugcaggacguggucaaccagaacgcccaggcccugaacacgcucgugaagcagcuguccagcaacuucggcgccaucuccagcgugcugaacgacauccucucccgccuggacaaggucgaggccgaggugcagaucgaccggcugaucaccgggcgccuccagagccugcagaccuacgugacccagcagcugauccgggcggccgagauccgcgccagcgccaaccucgccgcgaccaagauguccgagugcguccugggccagagcaagcggguggacuucugcggcaagggguaccaccugauguccuucccccagagcgccccgcacggcguggucuuccuccacgugacguacguccccgcccaggagaagaacuucaccaccgcccccgcgaucugccacgacgggaaggcccacuucccccgcgagggcguguucguguccaacgggacccacugguucgucacgcagcggaacuucuacgagccgcagaucaucaccaccgacaacaccuucgugagcggcaacugcgacguggucaucggcaucgugaacaacacgguguacgacccccugcagcccgagcuggacuccuucaaggaggagcucgacaaguacuucaagaaccacaccagccccgacgucgaccugggggacaucuccggcaucaacgccagcguggugaacauccagaaggagaucgaccgccugaacgaggucgccaagaaccucaacgagucccugaucgaccugcaggagcucgggaaguacgagcaguacaucaaguggccgugguacaucuggcugggcuucaucgccggccugaucgcgaucgugauggugaccaucaugcucugcugcaugaccagcugcugcuccugccugaaggggugcugcagcugcggcuccugcugcaaguucgacgaggacgacagcgagcccguccugaagggggugaagcuccacuacacgugaggacuagucccuguucccagagcccacuuuuuuuucuuuuuuugaaauaaaauagccugucuuucagaucucaaaggcucuuuucagagccaccaaaaaaaaaaaaaaaaaaaaaaaaaaaaaaaaaaaaaaaaaaaaaaaaaaaaaaaaaaaaaaaaaaaaaaaaaaaaaaaaaaaaaaaaaaaaaaaaaaaaa

SEQ ID NO: 23633 - RNA, 4191 nt, Artificial Sequence
  SARS-CoV-2/Wuhan/WIV05/2019__EPI_ISL_402128 spike protein mRNA gc (1-1273)(S477N_D614G)
aggagagggcgcuuggcuugcaaggacccugagcugcggcauugaagcacacccaacccaacucgacugaagucagccucacugaaccggaucugagaaucuucucucucugggcuugccagggcucuccgaaccuagcuagcauccucuucaauuccaacuagaaagcuuaccauguucguguuccugguccuccugccccuggugagcucccagugcgugaaccucaccacccgcacgcagcugccgcccgccuacaccaacagcuucacccggggcgucuacuaccccgacaagguguuccgcuccagcgugcugcacuccacccaggaccucuuccugcccuucuucagcaacgucacgugguuccacgccauccacguguccgggaccaacggcaccaagcgguucgacaacccggugcugcccuucaacgacggggucuacuucgcgagcaccgagaaguccaacaucauccgcggcuggaucuucgggacgacccucgacagcaagacccagucccugcugaucgugaacaacgccaccaacguggucaucaaggugugcgaguuccaguucugcaacgaccccuuccucggcguguacuaccacaagaacaacaagagcuggauggaguccgaguuccgggucuacagcuccgccaacaacugcacguucgaguacgugagccagcccuuccugauggaccuggagggcaagcaggggaacuucaagaaccuccgcgaguucguguucaagaacaucgacggcuacuucaagaucuacuccaagcacaccccgaucaaccugguccgggaccugccccagggguucagcgcccucgagccccugguggaccugcccaucggcaucaacaucacccgcuuccagacccuccuggcccugcaccgguccuaccucacgccgggggacagcagcuccggcuggaccgcgggcgccgccgccuacuacgugggguaccugcagccccgcaccuuccugcucaaguacaacgagaacggcaccaucacggacgcggucgacugcgcccuggacccccugagcgagaccaagugcacccucaaguccuucaccguggagaaggggaucuaccagacgagcaacuuccgggugcagcccaccgaguccaucguccgcuucccgaacaucaccaaccugugccccuucggcgagguguucaacgccacccgguucgccagcgucuacgccuggaaccgcaagcggaucuccaacugcguggcggacuacagcgugcuguacaacuccgccagcuucuccacguucaagugcuacggcgucagccccaccaagcucaacgaccugugcuucaccaacguguacgccgacuccuucgugauccgcggggacgagguccggcagaucgcccccggccagaccgggaagaucgccgacuacaacuacaagcugccggacgacuucacgggcugcgugaucgcguggaacagcaacaaccucgacuccaaggucgggggcaacuacaacuaccuguaccgccuguuccgcaagagcaaccucaagcccuucgagcgggacaucuccaccgagaucuaccaggccggcaacacccccugcaacgggguggagggcuucaacugcuacuucccccugcaguccuacggguuccagccgaccaacggcgugggguaccagcccuaccggguggucgugcugagcuucgagcuccugcacgcccccgccacggugugcggccccaagaaguccaccaaccuggucaagaacaagugcgugaacuucaacuucaacggccucaccgggaccggcgugcugaccgagagcaacaagaaguuccugccguuccagcaguucgggcgcgacaucgccgacacgaccgacgcgguccgcgacccccagacccuggagauccucgacaucacccccugcagcuucggcgggguguccgugaucacgccgggcaccaacaccagcaaccaggucgccgugcuguaccagggcgugaacugcaccgagguccccguggccauccacgccgaccagcugacgcccaccuggcggguguacuccaccggcagcaacgucuuccagacccgcgccgggugccucaucggcgcggagcacgugaacaacuccuacgagugcgacauccccaucggggccggcaucugcgccagcuaccagacgcagaccaacuccccgcggcgcgcccggagcguggcgucccagagcaucaucgccuacaccaugucccugggcgccgagaacagcgucgccuacuccaacaacagcaucgccauccccaccaacuucacgaucuccgugaccaccgagauccugcccgugagcaugaccaagacgagcgucgacugcaccauguacaucugcggggacuccaccgagugcagcaaccuccugcugcaguacggcuccuucugcacccagcucaaccgcgcgcugacggggaucgccguggagcaggacaagaacacccaggagguguucgcccaggucaagcagaucuacaagacgcccccgaucaaggacuucggcggguucaacuucagccagauccugcccgaccccuccaagcccagcaagcgguccuucaucgaggaccuccuguucaacaaggugacccuggccgacgccggcuucaucaagcaguacggcgacugccucggggacaucgcggcccgcgaccugaucugcgcccagaaguucaacggccugaccgugcucccgccccugcugaccgacgagaugaucgcccaguacaccagcgcccuccuggcggggaccaucacguccggcuggaccuucggggccggcgccgcccugcagauccccuucgcgaugcagauggccuaccgguucaacggcaucggggucacccagaacgugcucuacgagaaccagaagcugaucgccaaccaguucaacagcgccaucggcaagauccaggacucccugagcuccaccgccagcgcgcucgggaagcugcaggacguggucaaccagaacgcccaggcccugaacacgcucgugaagcagcuguccagcaacuucggcgccaucuccagcgugcugaacgacauccucucccgccuggacaaggucgaggccgaggugcagaucgaccggcugaucaccgggcgccuccagagccugcagaccuacgugacccagcagcugauccgggcggccgagauccgcgccagcgccaaccucgccgcgaccaagauguccgagugcguccugggccagagcaagcggguggacuucugcggcaagggguaccaccugauguccuucccccagagcgccccgcacggcguggucuuccuccacgugacguacguccccgcccaggagaagaacuucaccaccgcccccgcgaucugccacgacgggaaggcccacuucccccgcgagggcguguucguguccaacgggacccacugguucgucacgcagcggaacuucuacgagccgcagaucaucaccaccgacaacaccuucgugagcggcaacugcgacguggucaucggcaucgugaacaacacgguguacgacccccugcagcccgagcuggacuccuucaaggaggagcucgacaaguacuucaagaaccacaccagccccgacgucgaccugggggacaucuccggcaucaacgccagcguggugaacauccagaaggagaucgaccgccugaacgaggucgccaagaaccucaacgagucccugaucgaccugcaggagcucgggaaguacgagcaguacaucaaguggccgugguacaucuggcugggcuucaucgccggccugaucgcgaucgugauggugaccaucaugcucugcugcaugaccagcugcugcuccugccugaaggggugcugcagcugcggcuccugcugcaaguucgacgaggacgacagcgagcccguccugaagggggugaagcuccacuacacgugaggacuagucccuguucccagagcccacuuuuuuuucuuuuuuugaaauaaaauagccugucuuucagaucucaaaggcucuuuucagagccaccaaaaaaaaaaaaaaaaaaaaaaaaaaaaaaaaaaaaaaaaaaaaaaaaaaaaaaaaaaaaaaaaaaaaaaaaaaaaaaaaaaaaaaaaaaaaaaaaaaaaa

SEQ ID NO: 23634 - RNA, 4191 nt, Artificial Sequence
  SARS-CoV-2/Wuhan/WIV05/2019__EPI_ISL_402128 spike protein mRNA gc (1-1273)(N501Y_D614G)
aggagagggcgcuuggcuugcaaggacccugagcugcggcauugaagcacacccaacccaacucgacugaagucagccucacugaaccggaucugagaaucuucucucucugggcuugccagggcucuccgaaccuagcuagcauccucuucaauuccaacuagaaagcuuaccauguucguguuccugguccuccugccccuggugagcucccagugcgugaaccucaccacccgcacgcagcugccgcccgccuacaccaacagcuucacccggggcgucuacuaccccgacaagguguuccgcuccagcgugcugcacuccacccaggaccucuuccugcccuucuucagcaacgucacgugguuccacgccauccacguguccgggaccaacggcaccaagcgguucgacaacccggugcugcccuucaacgacggggucuacuucgcgagcaccgagaaguccaacaucauccgcggcuggaucuucgggacgacccucgacagcaagacccagucccugcugaucgugaacaacgccaccaacguggucaucaaggugugcgaguuccaguucugcaacgaccccuuccucggcguguacuaccacaagaacaacaagagcuggauggaguccgaguuccgggucuacagcuccgccaacaacugcacguucgaguacgugagccagcccuuccugauggaccuggagggcaagcaggggaacuucaagaaccuccgcgaguucguguucaagaacaucgacggcuacuucaagaucuacuccaagcacaccccgaucaaccugguccgggaccugccccagggguucagcgcccucgagccccugguggaccugcccaucggcaucaacaucacccgcuuccagacccuccuggcccugcaccgguccuaccucacgccgggggacagcagcuccggcuggaccgcgggcgccgccgccuacuacgugggguaccugcagccccgcaccuuccugcucaaguacaacgagaacggcaccaucacggacgcggucgacugcgcccuggacccccugagcgagaccaagugcacccucaaguccuucaccguggagaaggggaucuaccagacgagcaacuuccgggugcagcccaccgaguccaucguccgcuucccgaacaucaccaaccugugccccuucggcgagguguucaacgccacccgguucgccagcgucuacgccuggaaccgcaagcggaucuccaacugcguggcggacuacagcgugcuguacaacuccgccagcuucuccacguucaagugcuacggcgucagccccaccaagcucaacgaccugugcuucaccaacguguacgccgacuccuucgugauccgcggggacgagguccggcagaucgcccccggccagaccgggaagaucgccgacuacaacuacaagcugccggacgacuucacgggcugcgugaucgcguggaacagcaacaaccucgacuccaaggucgggggcaacuacaacuaccuguaccgccuguuccgcaagagcaaccucaagcccuucgagcgggacaucuccaccgagaucuaccaggccggcagcacccccugcaacgggguggagggcuucaacugcuacuucccccugcaguccuacggguuccagccgaccuacggcgugggguaccagcccuaccggguggucgugcugagcuucgagcuccugcacgcccccgccacggugugcggccccaagaaguccaccaaccuggucaagaacaagugcgugaacuucaacuucaacggccucaccgggaccggcgugcugaccgagagcaacaagaaguuccugccguuccagcaguucgggcgcgacaucgccgacacgaccgacgcgguccgcgacccccagacccuggagauccucgacaucacccccugcagcuucggcgggguguccgugaucacgccgggcaccaacaccagcaaccaggucgccgugcuguaccagggcgugaacugcaccgagguccccguggccauccacgccgaccagcugacgcccaccuggcggguguacuccaccggcagcaacgucuuccagacccgcgccgggugccucaucggcgcggagcacgugaacaacuccuacgagugcgacauccccaucggggccggcaucugcgccagcuaccagacgcagaccaacuccccgcggcgcgcccggagcguggcgucccagagcaucaucgccuacaccaugucccugggcgccgagaacagcgucgccuacuccaacaacagcaucgccauccccaccaacuucacgaucuccgugaccaccgagauccugcccgugagcaugaccaagacgagcgucgacugcaccauguacaucugcggggacuccaccgagugcagcaaccuccugcugcaguacggcuccuucugcacccagcucaaccgcgcgcugacggggaucgccguggagcaggacaagaacacccaggagguguucgcccaggucaagcagaucuacaagacgcccccgaucaaggacuucggcggguucaacuucagccagauccugcccgaccccuccaagcccagcaagcgguccuucaucgaggaccuccuguucaacaaggugacccuggccgacgccggcuucaucaagcaguacggcgacugccucggggacaucgcggcccgcgaccugaucugcgcccagaaguucaacggccugaccgugcucccgccccugcugaccgacgagaugaucgcccaguacaccagcgcccuccuggcggggaccaucacguccggcuggaccuucggggccggcgccgcccugcagauccccuucgcgaugcagauggccuaccgguucaacggcaucggggucacccagaacgugcucuacgagaaccagaagcugaucgccaaccaguucaacagcgccaucggcaagauccaggacucccugagcuccaccgccagcgcgcucgggaagcugcaggacguggucaaccagaacgcccaggcccugaacacgcucgugaagcagcuguccagcaacuucggcgccaucuccagcgugcugaacgacauccucucccgccuggacaaggucgaggccgaggugcagaucgaccggcugaucaccgggcgccuccagagccugcagaccuacgugacccagcagcugauccgggcggccgagauccgcgccagcgccaaccucgccgcgaccaagauguccgagugcguccugggccagagcaagcggguggacuucugcggcaagggguaccaccugauguccuucccccagagcgccccgcacggcguggucuuccuccacgugacguacguccccgcccaggagaagaacuucaccaccgcccccgcgaucugccacgacgggaaggcccacuucccccgcgagggcguguucguguccaacgggacccacugguucgucacgcagcggaacuucuacgagccgcagaucaucaccaccgacaacaccuucgugagcggcaacugcgacguggucaucggcaucgugaacaacacgguguacgacccccugcagcccgagcuggacuccuucaaggaggagcucgacaaguacuucaagaaccacaccagccccgacgucgaccugggggacaucuccggcaucaacgccagcguggugaacauccagaaggagaucgaccgccugaacgaggucgccaagaaccucaacgagucccugaucgaccugcaggagcucgggaaguacgagcaguacaucaaguggccgugguacaucuggcugggcuucaucgccggccugaucgcgaucgugauggugaccaucaugcucugcugcaugaccagcugcugcuccugccugaaggggugcugcagcugcggcuccugcugcaaguucgacgaggacgacagcgagcccguccugaagggggugaagcuccacuacacgugaggacuagucccuguucccagagcccacuuuuuuuucuuuuuuugaaauaaaauagccugucuuucagaucucaaaggcucuuuucagagccaccaaaaaaaaaaaaaaaaaaaaaaaaaaaaaaaaaaaaaaaaaaaaaaaaaaaaaaaaaaaaaaaaaaaaaaaaaaaaaaaaaaaaaaaaaaaaaaaaaaaaa

SEQ ID NO: 23635 - RNA, 4185 nt, Artificial Sequence
  SARS-CoV-2/Wuhan/WIV05/2019__EPI_ISL_402128 spike protein mRNA gc (1-1273)(H69del_V70del_D614G)
aggagagggcgcuuggcuugcaaggacccugagcugcggcauugaagcacacccaacccaacucgacugaagucagccucacugaaccggaucugagaaucuucucucucugggcuugccagggcucuccgaaccuagcuagcauccucuucaauuccaacuagaaagcuuaccauguucguguuccugguccuccugccccuggugagcucccagugcgugaaccucaccacccgcacgcagcugccgcccgccuacaccaacagcuucacccggggcgucuacuaccccgacaagguguuccgcuccagcgugcugcacuccacccaggaccucuuccugcccuucuucagcaacgucacgugguuccacgccaucuccgggaccaacggcaccaagcgguucgacaacccggugcugcccuucaacgacggggucuacuucgcgagcaccgagaaguccaacaucauccgcggcuggaucuucgggacgacccucgacagcaagacccagucccugcugaucgugaacaacgccaccaacguggucaucaaggugugcgaguuccaguucugcaacgaccccuuccucggcguguacuaccacaagaacaacaagagcuggauggaguccgaguuccgggucuacagcuccgccaacaacugcacguucgaguacgugagccagcccuuccugauggaccuggagggcaagcaggggaacuucaagaaccuccgcgaguucguguucaagaacaucgacggcuacuucaagaucuacuccaagcacaccccgaucaaccugguccgggaccugccccagggguucagcgcccucgagccccugguggaccugcccaucggcaucaacaucacccgcuuccagacccuccuggcccugcaccgguccuaccucacgccgggggacagcagcuccggcuggaccgcgggcgccgccgccuacuacgugggguaccugcagccccgcaccuuccugcucaaguacaacgagaacggcaccaucacggacgcggucgacugcgcccuggacccccugagcgagaccaagugcacccucaaguccuucaccguggagaaggggaucuaccagacgagcaacuuccgggugcagcccaccgaguccaucguccgcuucccgaacaucaccaaccugugccccuucggcgagguguucaacgccacccgguucgccagcgucuacgccuggaaccgcaagcggaucuccaacugcguggcggacuacagcgugcuguacaacuccgccagcuucuccacguucaagugcuacggcgucagccccaccaagcucaacgaccugugcuucaccaacguguacgccgacuccuucgugauccgcggggacgagguccggcagaucgcccccggccagaccgggaagaucgccgacuacaacuacaagcugccggacgacuucacgggcugcgugaucgcguggaacagcaacaaccucgacuccaaggucgggggcaacuacaacuaccuguaccgccuguuccgcaagagcaaccucaagcccuucgagcgggacaucuccaccgagaucuaccaggccggcagcacccccugcaacgggguggagggcuucaacugcuacuucccccugcaguccuacggguuccagccgaccaacggcgugggguaccagcccuaccggguggucgugcugagcuucgagcuccugcacgcccccgccacggugugcggccccaagaaguccaccaaccuggucaagaacaagugcgugaacuucaacuucaacggccucaccgggaccggcgugcugaccgagagcaacaagaaguuccugccguuccagcaguucgggcgcgacaucgccgacacgaccgacgcgguccgcgacccccagacccuggagauccucgacaucacccccugcagcuucggcgggguguccgugaucacgccgggcaccaacaccagcaaccaggucgccgugcuguaccagggcgugaacugcaccgagguccccguggccauccacgccgaccagcugacgcccaccuggcggguguacuccaccggcagcaacgucuuccagacccgcgccgggugccucaucggcgcggagcacgugaacaacuccuacgagugcgacauccccaucggggccggcaucugcgccagcuaccagacgcagaccaacuccccgcggcgcgcccggagcguggcgucccagagcaucaucgccuacaccaugucccugggcgccgagaacagcgucgccuacuccaacaacagcaucgccauccccaccaacuucacgaucuccgugaccaccgagauccugcccgugagcaugaccaagacgagcgucgacugcaccauguacaucugcggggacuccaccgagugcagcaaccuccugcugcaguacggcuccuucugcacccagcucaaccgcgcgcugacggggaucgccguggagcaggacaagaacacccaggagguguucgcccaggucaagcagaucuacaagacgcccccgaucaaggacuucggcggguucaacuucagccagauccugcccgaccccuccaagcccagcaagcgguccuucaucgaggaccuccuguucaacaaggugacccuggccgacgccggcuucaucaagcaguacggcgacugccucggggacaucgcggcccgcgaccugaucugcgcccagaaguucaacggccugaccgugcucccgccccugcugaccgacgagaugaucgcccaguacaccagcgcccuccuggcggggaccaucacguccggcuggaccuucggggccggcgccgcccugcagauccccuucgcgaugcagauggccuaccgguucaacggcaucggggucacccagaacgugcucuacgagaaccagaagcugaucgccaaccaguucaacagcgccaucggcaagauccaggacucccugagcuccaccgccagcgcgcucgggaagcugcaggacguggucaaccagaacgcccaggcccugaacacgcucgugaagcagcuguccagcaacuucggcgccaucuccagcgugcugaacgacauccucucccgccuggacaaggucgaggccgaggugcagaucgaccggcugaucaccgggcgccuccagagccugcagaccuacgugacccagcagcugauccgggcggccgagauccgcgccagcgccaaccucgccgcgaccaagauguccgagugcguccugggccagagcaagcggguggacuucugcggcaagggguaccaccugauguccuucccccagagcgccccgcacggcguggucuuccuccacgugacguacguccccgcccaggagaagaacuucaccaccgcccccgcgaucugccacgacgggaaggcccacuucccccgcgagggcguguucguguccaacgggacccacugguucgucacgcagcggaacuucuacgagccgcagaucaucaccaccgacaacaccuucgugagcggcaacugcgacguggucaucggcaucgugaacaacacgguguacgacccccugcagcccgagcuggacuccuucaaggaggagcucgacaaguacuucaagaaccacaccagccccgacgucgaccugggggacaucuccggcaucaacgccagcguggugaacauccagaaggagaucgaccgccugaacgaggucgccaagaaccucaacgagucccugaucgaccugcaggagcucgggaaguacgagcaguacaucaaguggccgugguacaucuggcugggcuucaucgccggccugaucgcgaucgugauggugaccaucaugcucugcugcaugaccagcugcugcuccugccugaaggggugcugcagcugcggcuccugcugcaaguucgacgaggacgacagcgagcccguccugaagggggugaagcuccacuacacgugaggacuagucccuguucccagagcccacuuuuuuuucuuuuuuugaaauaaaauagccugucuuucagaucucaaaggcucuuuucagagccaccaaaaaaaaaaaaaaaaaaaaaaaaaaaaaaaaaaaaaaaaaaaaaaaaaaaaaaaaaaaaaaaaaaaaaaaaaaaaaaaaaaaaaaaaaaaaaaaaaaaaa

SEQ ID NO: 23636 - RNA, 4191 nt, Artificial Sequence
  SARS-CoV-2/Wuhan/WIV05/2019__EPI_ISL_402128 spike protein mRNA gc (1-1273)(Y453F_D614G)
aggagagggcgcuuggcuugcaaggacccugagcugcggcauugaagcacacccaacccaacucgacugaagucagccucacugaaccggaucugagaaucuucucucucugggcuugccagggcucuccgaaccuagcuagcauccucuucaauuccaacuagaaagcuuaccauguucguguuccugguccuccugccccuggugagcucccagugcgugaaccucaccacccgcacgcagcugccgcccgccuacaccaacagcuucacccggggcgucuacuaccccgacaagguguuccgcuccagcgugcugcacuccacccaggaccucuuccugcccuucuucagcaacgucacgugguuccacgccauccacguguccgggaccaacggcaccaagcgguucgacaacccggugcugcccuucaacgacggggucuacuucgcgagcaccgagaaguccaacaucauccgcggcuggaucuucgggacgacccucgacagcaagacccagucccugcugaucgugaacaacgccaccaacguggucaucaaggugugcgaguuccaguucugcaacgaccccuuccucggcguguacuaccacaagaacaacaagagcuggauggaguccgaguuccgggucuacagcuccgccaacaacugcacguucgaguacgugagccagcccuuccugauggaccuggagggcaagcaggggaacuucaagaaccuccgcgaguucguguucaagaacaucgacggcuacuucaagaucuacuccaagcacaccccgaucaaccugguccgggaccugccccagggguucagcgcccucgagccccugguggaccugcccaucggcaucaacaucacccgcuuccagacccuccuggcccugcaccgguccuaccucacgccgggggacagcagcuccggcuggaccgcgggcgccgccgccuacuacgugggguaccugcagccccgcaccuuccugcucaaguacaacgagaacggcaccaucacggacgcggucgacugcgcccuggacccccugagcgagaccaagugcacccucaaguccuucaccguggagaaggggaucuaccagacgagcaacuuccgggugcagcccaccgaguccaucguccgcuucccgaacaucaccaaccugugccccuucggcgagguguucaacgccacccgguucgccagcgucuacgccuggaaccgcaagcggaucuccaacugcguggcggacuacagcgugcuguacaacuccgccagcuucuccacguucaagugcuacggcgucagccccaccaagcucaacgaccugugcuucaccaacguguacgccgacuccuucgugauccgcggggacgagguccggcagaucgcccccggccagaccgggaagaucgccgacuacaacuacaagcugccggacgacuucacgggcugcgugaucgcguggaacagcaacaaccucgacuccaaggucgggggcaacuacaacuaccuguuccgccuguuccgcaagagcaaccucaagcccuucgagcgggacaucuccaccgagaucuaccaggccggcagcacccccugcaacgggguggagggcuucaacugcuacuucccccugcaguccuacggguuccagccgaccaacggcgugggguaccagcccuaccggguggucgugcugagcuucgagcuccugcacgcccccgccacggugugcggccccaagaaguccaccaaccuggucaagaacaagugcgugaacuucaacuucaacggccucaccgggaccggcgugcugaccgagagcaacaagaaguuccugccguuccagcaguucgggcgcgacaucgccgacacgaccgacgcgguccgcgacccccagacccuggagauccucgacaucacccccugcagcuucggcgggguguccgugaucacgccgggcaccaacaccagcaaccaggucgccgugcuguaccagggcgugaacugcaccgagguccccguggccauccacgccgaccagcugacgcccaccuggcggguguacuccaccggcagcaacgucuuccagacccgcgccgggugccucaucggcgcggagcacgugaacaacuccuacgagugcgacauccccaucggggccggcaucugcgccagcuaccagacgcagaccaacuccccgcggcgcgcccggagcguggcgucccagagcaucaucgccuacaccaugucccugggcgccgagaacagcgucgccuacuccaacaacagcaucgccauccccaccaacuucacgaucuccgugaccaccgagauccugcccgugagcaugaccaagacgagcgucgacugcaccauguacaucugcggggacuccaccgagugcagcaaccuccugcugcaguacggcuccuucugcacccagcucaaccgcgcgcugacggggaucgccguggagcaggacaagaacacccaggagguguucgcccaggucaagcagaucuacaagacgcccccgaucaaggacuucggcggguucaacuucagccagauccugcccgaccccuccaagcccagcaagcgguccuucaucgaggaccuccuguucaacaaggugacccuggccgacgccggcuucaucaagcaguacggcgacugccucggggacaucgcggcccgcgaccugaucugcgcccagaaguucaacggccugaccgugcucccgccccugcugaccgacgagaugaucgcccaguacaccagcgcccuccuggcggggaccaucacguccggcuggaccuucggggccggcgccgcccugcagauccccuucgcgaugcagauggccuaccgguucaacggcaucggggucacccagaacgugcucuacgagaaccagaagcugaucgccaaccaguucaacagcgccaucggcaagauccaggacucccugagcuccaccgccagcgcgcucgggaagcugcaggacguggucaaccagaacgcccaggcccugaacacgcucgugaagcagcuguccagcaacuucggcgccaucuccagcgugcugaacgacauccucucccgccuggacaaggucgaggccgaggugcagaucgaccggcugaucaccgggcgccuccagagccugcagaccuacgugacccagcagcugauccgggcggccgagauccgcgccagcgccaaccucgccgcgaccaagauguccgagugcguccugggccagagcaagcggguggacuucugcggcaagggguaccaccugauguccuucccccagagcgccccgcacggcguggucuuccuccacgugacguacguccccgcccaggagaagaacuucaccaccgcccccgcgaucugccacgacgggaaggcccacuucccccgcgagggcguguucguguccaacgggacccacugguucgucacgcagcggaacuucuacgagccgcagaucaucaccaccgacaacaccuucgugagcggcaacugcgacguggucaucggcaucgugaacaacacgguguacgacccccugcagcccgagcuggacuccuucaaggaggagcucgacaaguacuucaagaaccacaccagccccgacgucgaccugggggacaucuccggcaucaacgccagcguggugaacauccagaaggagaucgaccgccugaacgaggucgccaagaaccucaacgagucccugaucgaccugcaggagcucgggaaguacgagcaguacaucaaguggccgugguacaucuggcugggcuucaucgccggccugaucgcgaucgugauggugaccaucaugcucugcugcaugaccagcugcugcuccugccugaaggggugcugcagcugcggcuccugcugcaaguucgacgaggacgacagcgagcccguccugaagggggugaagcuccacuacacgugaggacuagucccuguucccagagcccacuuuuuuuucuuuuuuugaaauaaaauagccugucuuucagaucucaaaggcucuuuucagagccaccaaaaaaaaaaaaaaaaaaaaaaaaaaaaaaaaaaaaaaaaaaaaaaaaaaaaaaaaaaaaaaaaaaaaaaaaaaaaaaaaaaaaaaaaaaaaaaaaaaaaa

SEQ ID NO: 23637 - RNA, 4191 nt, Artificial Sequence
  SARS-CoV-2/Wuhan/WIV05/2019__EPI_ISL_402128 spike protein mRNA gc (1-1273)(D614G_I692V)
aggagagggcgcuuggcuugcaaggacccugagcugcggcauugaagcacacccaacccaacucgacugaagucagccucacugaaccggaucugagaaucuucucucucugggcuugccagggcucuccgaaccuagcuagcauccucuucaauuccaacuagaaagcuuaccauguucguguuccugguccuccugccccuggugagcucccagugcgugaaccucaccacccgcacgcagcugccgcccgccuacaccaacagcuucacccggggcgucuacuaccccgacaagguguuccgcuccagcgugcugcacuccacccaggaccucuuccugcccuucuucagcaacgucacgugguuccacgccauccacguguccgggaccaacggcaccaagcgguucgacaacccggugcugcccuucaacgacggggucuacuucgcgagcaccgagaaguccaacaucauccgcggcuggaucuucgggacgacccucgacagcaagacccagucccugcugaucgugaacaacgccaccaacguggucaucaaggugugcgaguuccaguucugcaacgaccccuuccucggcguguacuaccacaagaacaacaagagcuggauggaguccgaguuccgggucuacagcuccgccaacaacugcacguucgaguacgugagccagcccuuccugauggaccuggagggcaagcaggggaacuucaagaaccuccgcgaguucguguucaagaacaucgacggcuacuucaagaucuacuccaagcacaccccgaucaaccugguccgggaccugccccagggguucagcgcccucgagccccugguggaccugcccaucggcaucaacaucacccgcuuccagacccuccuggcccugcaccgguccuaccucacgccgggggacagcagcuccggcuggaccgcgggcgccgccgccuacuacgugggguaccugcagccccgcaccuuccugcucaaguacaacgagaacggcaccaucacggacgcggucgacugcgcccuggacccccugagcgagaccaagugcacccucaaguccuucaccguggagaaggggaucuaccagacgagcaacuuccgggugcagcccaccgaguccaucguccgcuucccgaacaucaccaaccugugccccuucggcgagguguucaacgccacccgguucgccagcgucuacgccuggaaccgcaagcggaucuccaacugcguggcggacuacagcgugcuguacaacuccgccagcuucuccacguucaagugcuacggcgucagccccaccaagcucaacgaccugugcuucaccaacguguacgccgacuccuucgugauccgcggggacgagguccggcagaucgcccccggccagaccgggaagaucgccgacuacaacuacaagcugccggacgacuucacgggcugcgugaucgcguggaacagcaacaaccucgacuccaaggucgggggcaacuacaacuaccuguaccgccuguuccgcaagagcaaccucaagcccuucgagcgggacaucuccaccgagaucuaccaggccggcagcacccccugcaacgggguggagggcuucaacugcuacuucccccugcaguccuacggguuccagccgaccaacggcgugggguaccagcccuaccggguggucgugcugagcuucgagcuccugcacgcccccgccacggugugcggccccaagaaguccaccaaccuggucaagaacaagugcgugaacuucaacuucaacggccucaccgggaccggcgugcugaccgagagcaacaagaaguuccugccguuccagcaguucgggcgcgacaucgccgacacgaccgacgcgguccgcgacccccagacccuggagauccucgacaucacccccugcagcuucggcgggguguccgugaucacgccgggcaccaacaccagcaaccaggucgccgugcuguaccagggcgugaacugcaccgagguccccguggccauccacgccgaccagcugacgcccaccuggcggguguacuccaccggcagcaacgucuuccagacccgcgccgggugccucaucggcgcggagcacgugaacaacuccuacgagugcgacauccccaucggggccggcaucugcgccagcuaccagacgcagaccaacuccccgcggcgcgcccggagcguggcgucccagagcgucaucgccuacaccaugucccugggcgccgagaacagcgucgccuacuccaacaacagcaucgccauccccaccaacuucacgaucuccgugaccaccgagauccugcccgugagcaugaccaagacgagcgucgacugcaccauguacaucugcggggacuccaccgagugcagcaaccuccugcugcaguacggcuccuucugcacccagcucaaccgcgcgcugacggggaucgccguggagcaggacaagaacacccaggagguguucgcccaggucaagcagaucuacaagacgcccccgaucaaggacuucggcggguucaacuucagccagauccugcccgaccccuccaagcccagcaagcgguccuucaucgaggaccuccuguucaacaaggugacccuggccgacgccggcuucaucaagcaguacggcgacugccucggggacaucgcggcccgcgaccugaucugcgcccagaaguucaacggccugaccgugcucccgccccugcugaccgacgagaugaucgcccaguacaccagcgcccuccuggcggggaccaucacguccggcuggaccuucggggccggcgccgcccugcagauccccuucgcgaugcagauggccuaccgguucaacggcaucggggucacccagaacgugcucuacgagaaccagaagcugaucgccaaccaguucaacagcgccaucggcaagauccaggacucccugagcuccaccgccagcgcgcucgggaagcugcaggacguggucaaccagaacgcccaggcccugaacacgcucgugaagcagcuguccagcaacuucggcgccaucuccagcgugcugaacgacauccucucccgccuggacaaggucgaggccgaggugcagaucgaccggcugaucaccgggcgccuccagagccugcagaccuacgugacccagcagcugauccgggcggccgagauccgcgccagcgccaaccucgccgcgaccaagauguccgagugcguccugggccagagcaagcggguggacuucugcggcaagggguaccaccugauguccuucccccagagcgccccgcacggcguggucuuccuccacgugacguacguccccgcccaggagaagaacuucaccaccgcccccgcgaucugccacgacgggaaggcccacuucccccgcgagggcguguucguguccaacgggacccacugguucgucacgcagcggaacuucuacgagccgcagaucaucaccaccgacaacaccuucgugagcggcaacugcgacguggucaucggcaucgugaacaacacgguguacgacccccugcagcccgagcuggacuccuucaaggaggagcucgacaaguacuucaagaaccacaccagccccgacgucgaccugggggacaucuccggcaucaacgccagcguggugaacauccagaaggagaucgaccgccugaacgaggucgccaagaaccucaacgagucccugaucgaccugcaggagcucgggaaguacgagcaguacaucaaguggccgugguacaucuggcugggcuucaucgccggccugaucgcgaucgugauggugaccaucaugcucugcugcaugaccagcugcugcuccugccugaaggggugcugcagcugcggcuccugcugcaaguucgacgaggacgacagcgagcccguccugaagggggugaagcuccacuacacgugaggacuagucccuguucccagagcccacuuuuuuuucuuuuuuugaaauaaaauagccugucuuucagaucucaaaggcucuuuucagagccaccaaaaaaaaaaaaaaaaaaaaaaaaaaaaaaaaaaaaaaaaaaaaaaaaaaaaaaaaaaaaaaaaaaaaaaaaaaaaaaaaaaaaaaaaaaaaaaaaaaaaa

SEQ ID NO: 23638 - RNA, 4191 nt, Artificial Sequence
  SARS-CoV-2/Wuhan/WIV05/2019__EPI_ISL_402128 spike protein mRNA gc (1-1273)(D614G_M1229I)
aggagagggcgcuuggcuugcaaggacccugagcugcggcauugaagcacacccaacccaacucgacugaagucagccucacugaaccggaucugagaaucuucucucucugggcuugccagggcucuccgaaccuagcuagcauccucuucaauuccaacuagaaagcuuaccauguucguguuccugguccuccugccccuggugagcucccagugcgugaaccucaccacccgcacgcagcugccgcccgccuacaccaacagcuucacccggggcgucuacuaccccgacaagguguuccgcuccagcgugcugcacuccacccaggaccucuuccugcccuucuucagcaacgucacgugguuccacgccauccacguguccgggaccaacggcaccaagcgguucgacaacccggugcugcccuucaacgacggggucuacuucgcgagcaccgagaaguccaacaucauccgcggcuggaucuucgggacgacccucgacagcaagacccagucccugcugaucgugaacaacgccaccaacguggucaucaaggugugcgaguuccaguucugcaacgaccccuuccucggcguguacuaccacaagaacaacaagagcuggauggaguccgaguuccgggucuacagcuccgccaacaacugcacguucgaguacgugagccagcccuuccugauggaccuggagggcaagcaggggaacuucaagaaccuccgcgaguucguguucaagaacaucgacggcuacuucaagaucuacuccaagcacaccccgaucaaccugguccgggaccugccccagggguucagcgcccucgagccccugguggaccugcccaucggcaucaacaucacccgcuuccagacccuccuggcccugcaccgguccuaccucacgccgggggacagcagcuccggcuggaccgcgggcgccgccgccuacuacgugggguaccugcagccccgcaccuuccugcucaaguacaacgagaacggcaccaucacggacgcggucgacugcgcccuggacccccugagcgagaccaagugcacccucaaguccuucaccguggagaaggggaucuaccagacgagcaacuuccgggugcagcccaccgaguccaucguccgcuucccgaacaucaccaaccugugccccuucggcgagguguucaacgccacccgguucgccagcgucuacgccuggaaccgcaagcggaucuccaacugcguggcggacuacagcgugcuguacaacuccgccagcuucuccacguucaagugcuacggcgucagccccaccaagcucaacgaccugugcuucaccaacguguacgccgacuccuucgugauccgcggggacgagguccggcagaucgcccccggccagaccgggaagaucgccgacuacaacuacaagcugccggacgacuucacgggcugcgugaucgcguggaacagcaacaaccucgacuccaaggucgggggcaacuacaacuaccuguaccgccuguuccgcaagagcaaccucaagcccuucgagcgggacaucuccaccgagaucuaccaggccggcagcacccccugcaacgggguggagggcuucaacugcuacuucccccugcaguccuacggguuccagccgaccaacggcgugggguaccagcccuaccggguggucgugcugagcuucgagcuccugcacgcccccgccacggugugcggccccaagaaguccaccaaccuggucaagaacaagugcgugaacuucaacuucaacggccucaccgggaccggcgugcugaccgagagcaacaagaaguuccugccguuccagcaguucgggcgcgacaucgccgacacgaccgacgcgguccgcgacccccagacccuggagauccucgacaucacccccugcagcuucggcgggguguccgugaucacgccgggcaccaacaccagcaaccaggucgccgugcuguaccagggcgugaacugcaccgagguccccguggccauccacgccgaccagcugacgcccaccuggcggguguacuccaccggcagcaacgucuuccagacccgcgccgggugccucaucggcgcggagcacgugaacaacuccuacgagugcgacauccccaucggggccggcaucugcgccagcuaccagacgcagaccaacuccccgcggcgcgcccggagcguggcgucccagagcaucaucgccuacaccaugucccugggcgccgagaacagcgucgccuacuccaacaacagcaucgccauccccaccaacuucacgaucuccgugaccaccgagauccugcccgugagcaugaccaagacgagcgucgacugcaccauguacaucugcggggacuccaccgagugcagcaaccuccugcugcaguacggcuccuucugcacccagcucaaccgcgcgcugacggggaucgccguggagcaggacaagaacacccaggagguguucgcccaggucaagcagaucuacaagacgcccccgaucaaggacuucggcggguucaacuucagccagauccugcccgaccccuccaagcccagcaagcgguccuucaucgaggaccuccuguucaacaaggugacccuggccgacgccggcuucaucaagcaguacggcgacugccucggggacaucgcggcccgcgaccugaucugcgcccagaaguucaacggccugaccgugcucccgccccugcugaccgacgagaugaucgcccaguacaccagcgcccuccuggcggggaccaucacguccggcuggaccuucggggccggcgccgcccugcagauccccuucgcgaugcagauggccuaccgguucaacggcaucggggucacccagaacgugcucuacgagaaccagaagcugaucgccaaccaguucaacagcgccaucggcaagauccaggacucccugagcuccaccgccagcgcgcucgggaagcugcaggacguggucaaccagaacgcccaggcccugaacacgcucgugaagcagcuguccagcaacuucggcgccaucuccagcgugcugaacgacauccucucccgccuggacaaggucgaggccgaggugcagaucgaccggcugaucaccgggcgccuccagagccugcagaccuacgugacccagcagcugauccgggcggccgagauccgcgccagcgccaaccucgccgcgaccaagauguccgagugcguccugggccagagcaagcggguggacuucugcggcaagggguaccaccugauguccuucccccagagcgccccgcacggcguggucuuccuccacgugacguacguccccgcccaggagaagaacuucaccaccgcccccgcgaucugccacgacgggaaggcccacuucccccgcgagggcguguucguguccaacgggacccacugguucgucacgcagcggaacuucuacgagccgcagaucaucaccaccgacaacaccuucgugagcggcaacugcgacguggucaucggcaucgugaacaacacgguguacgacccccugcagcccgagcuggacuccuucaaggaggagcucgacaaguacuucaagaaccacaccagccccgacgucgaccugggggacaucuccggcaucaacgccagcguggugaacauccagaaggagaucgaccgccugaacgaggucgccaagaaccucaacgagucccugaucgaccugcaggagcucgggaaguacgagcaguacaucaaguggccgugguacaucuggcugggcuucaucgccggccugaucgcgaucgugaucgugaccaucaugcucugcugcaugaccagcugcugcuccugccugaaggggugcugcagcugcggcuccugcugcaaguucgacgaggacgacagcgagcccguccugaagggggugaagcuccacuacacgugaggacuagucccuguucccagagcccacuuuuuuuucuuuuuuugaaauaaaauagccugucuuucagaucucaaaggcucuuuucagagccaccaaaaaaaaaaaaaaaaaaaaaaaaaaaaaaaaaaaaaaaaaaaaaaaaaaaaaaaaaaaaaaaaaaaaaaaaaaaaaaaaaaaaaaaaaaaaaaaaaaaaa

SEQ ID NO: 23639 - RNA, 4185 nt, Artificial Sequence
  SARS-CoV-2/Wuhan/WIV05/2019__EPI_ISL_402128 spike protein mRNA gc (1-1273)(H69del_V70del_A222V_Y453F_S477N_D614G_I692V)
aggagagggcgcuuggcuugcaaggacccugagcugcggcauugaagcacacccaacccaacucgacugaagucagccucacugaaccggaucugagaaucuucucucucugggcuugccagggcucuccgaaccuagcuagcauccucuucaauuccaacuagaaagcuuaccauguucguguuccugguccuccugccccuggugagcucccagugcgugaaccucaccacccgcacgcagcugccgcccgccuacaccaacagcuucacccggggcgucuacuaccccgacaagguguuccgcuccagcgugcugcacuccacccaggaccucuuccugcccuucuucagcaacgucacgugguuccacgccaucuccgggaccaacggcaccaagcgguucgacaacccggugcugcccuucaacgacggggucuacuucgcgagcaccgagaaguccaacaucauccgcggcuggaucuucgggacgacccucgacagcaagacccagucccugcugaucgugaacaacgccaccaacguggucaucaaggugugcgaguuccaguucugcaacgaccccuuccucggcguguacuaccacaagaacaacaagagcuggauggaguccgaguuccgggucuacagcuccgccaacaacugcacguucgaguacgugagccagcccuuccugauggaccuggagggcaagcaggggaacuucaagaaccuccgcgaguucguguucaagaacaucgacggcuacuucaagaucuacuccaagcacaccccgaucaaccugguccgggaccugccccagggguucagcguccucgagccccugguggaccugcccaucggcaucaacaucacccgcuuccagacccuccuggcccugcaccgguccuaccucacgccgggggacagcagcuccggcuggaccgcgggcgccgccgccuacuacgugggguaccugcagccccgcaccuuccugcucaaguacaacgagaacggcaccaucacggacgcggucgacugcgcccuggacccccugagcgagaccaagugcacccucaaguccuucaccguggagaaggggaucuaccagacgagcaacuuccgggugcagcccaccgaguccaucguccgcuucccgaacaucaccaaccugugccccuucggcgagguguucaacgccacccgguucgccagcgucuacgccuggaaccgcaagcggaucuccaacugcguggcggacuacagcgugcuguacaacuccgccagcuucuccacguucaagugcuacggcgucagccccaccaagcucaacgaccugugcuucaccaacguguacgccgacuccuucgugauccgcggggacgagguccggcagaucgcccccggccagaccgggaagaucgccgacuacaacuacaagcugccggacgacuucacgggcugcgugaucgcguggaacagcaacaaccucgacuccaaggucgggggcaacuacaacuaccuguuccgccuguuccgcaagagcaaccucaagcccuucgagcgggacaucuccaccgagaucuaccaggccggcaacacccccugcaacgggguggagggcuucaacugcuacuucccccugcaguccuacggguuccagccgaccaacggcgugggguaccagcccuaccggguggucgugcugagcuucgagcuccugcacgcccccgccacggugugcggccccaagaaguccaccaaccuggucaagaacaagugcgugaacuucaacuucaacggccucaccgggaccggcgugcugaccgagagcaacaagaaguuccugccguuccagcaguucgggcgcgacaucgccgacacgaccgacgcgguccgcgacccccagacccuggagauccucgacaucacccccugcagcuucggcgggguguccgugaucacgccgggcaccaacaccagcaaccaggucgccgugcuguaccagggcgugaacugcaccgagguccccguggccauccacgccgaccagcugacgcccaccuggcggguguacuccaccggcagcaacgucuuccagacccgcgccgggugccucaucggcgcggagcacgugaacaacuccuacgagugcgacauccccaucggggccggcaucugcgccagcuaccagacgcagaccaacuccccgcggcgcgcccggagcguggcgucccagagcgucaucgccuacaccaugucccugggcgccgagaacagcgucgccuacuccaacaacagcaucgccauccccaccaacuucacgaucuccgugaccaccgagauccugcccgugagcaugaccaagacgagcgucgacugcaccauguacaucugcggggacuccaccgagugcagcaaccuccugcugcaguacggcuccuucugcacccagcucaaccgcgcgcugacggggaucgccguggagcaggacaagaacacccaggagguguucgcccaggucaagcagaucuacaagacgcccccgaucaaggacuucggcggguucaacuucagccagauccugcccgaccccuccaagcccagcaagcgguccuucaucgaggaccuccuguucaacaaggugacccuggccgacgccggcuucaucaagcaguacggcgacugccucggggacaucgcggcccgcgaccugaucugcgcccagaaguucaacggccugaccgugcucccgccccugcugaccgacgagaugaucgcccaguacaccagcgcccuccuggcggggaccaucacguccggcuggaccuucggggccggcgccgcccugcagauccccuucgcgaugcagauggccuaccgguucaacggcaucggggucacccagaacgugcucuacgagaaccagaagcugaucgccaaccaguucaacagcgccaucggcaagauccaggacucccugagcuccaccgccagcgcgcucgggaagcugcaggacguggucaaccagaacgcccaggcccugaacacgcucgugaagcagcuguccagcaacuucggcgccaucuccagcgugcugaacgacauccucucccgccuggacaaggucgaggccgaggugcagaucgaccggcugaucaccgggcgccuccagagccugcagaccuacgugacccagcagcugauccgggcggccgagauccgcgccagcgccaaccucgccgcgaccaagauguccgagugcguccugggccagagcaagcggguggacuucugcggcaagggguaccaccugauguccuucccccagagcgccccgcacggcguggucuuccuccacgugacguacguccccgcccaggagaagaacuucaccaccgcccccgcgaucugccacgacgggaaggcccacuucccccgcgagggcguguucguguccaacgggacccacugguucgucacgcagcggaacuucuacgagccgcagaucaucaccaccgacaacaccuucgugagcggcaacugcgacguggucaucggcaucgugaacaacacgguguacgacccccugcagcccgagcuggacuccuucaaggaggagcucgacaaguacuucaagaaccacaccagccccgacgucgaccugggggacaucuccggcaucaacgccagcguggugaacauccagaaggagaucgaccgccugaacgaggucgccaagaaccucaacgagucccugaucgaccugcaggagcucgggaaguacgagcaguacaucaaguggccgugguacaucuggcugggcuucaucgccggccugaucgcgaucgugauggugaccaucaugcucugcugcaugaccagcugcugcuccugccugaaggggugcugcagcugcggcuccugcugcaaguucgacgaggacgacagcgagcccguccugaagggggugaagcuccacuacacgugaggacuagucccuguucccagagcccacuuuuuuuucuuuuuuugaaauaaaauagccugucuuucagaucucaaaggcucuuuucagagccaccaaaaaaaaaaaaaaaaaaaaaaaaaaaaaaaaaaaaaaaaaaaaaaaaaaaaaaaaaaaaaaaaaaaaaaaaaaaaaaaaaaaaaaaaaaaaaaaaaaaaa

SEQ ID NO: 23640 - RNA, 4185 nt, Artificial Sequence
  SARS-CoV-2/Wuhan/WIV05/2019__EPI_ISL_402128 spike protein mRNA gc (1-1273)(H69del_V70del_Y453F_D614G_I692V_M1229I)
aggagagggcgcuuggcuugcaaggacccugagcugcggcauugaagcacacccaacccaacucgacugaagucagccucacugaaccggaucugagaaucuucucucucugggcuugccagggcucuccgaaccuagcuagcauccucuucaauuccaacuagaaagcuuaccauguucguguuccugguccuccugccccuggugagcucccagugcgugaaccucaccacccgcacgcagcugccgcccgccuacaccaacagcuucacccggggcgucuacuaccccgacaagguguuccgcuccagcgugcugcacuccacccaggaccucuuccugcccuucuucagcaacgucacgugguuccacgccaucuccgggaccaacggcaccaagcgguucgacaacccggugcugcccuucaacgacggggucuacuucgcgagcaccgagaaguccaacaucauccgcggcuggaucuucgggacgacccucgacagcaagacccagucccugcugaucgugaacaacgccaccaacguggucaucaaggugugcgaguuccaguucugcaacgaccccuuccucggcguguacuaccacaagaacaacaagagcuggauggaguccgaguuccgggucuacagcuccgccaacaacugcacguucgaguacgugagccagcccuuccugauggaccuggagggcaagcaggggaacuucaagaaccuccgcgaguucguguucaagaacaucgacggcuacuucaagaucuacuccaagcacaccccgaucaaccugguccgggaccugccccagggguucagcgcccucgagccccugguggaccugcccaucggcaucaacaucacccgcuuccagacccuccuggcccugcaccgguccuaccucacgccgggggacagcagcuccggcuggaccgcgggcgccgccgccuacuacgugggguaccugcagccccgcaccuuccugcucaaguacaacgagaacggcaccaucacggacgcggucgacugcgcccuggacccccugagcgagaccaagugcacccucaaguccuucaccguggagaaggggaucuaccagacgagcaacuuccgggugcagcccaccgaguccaucguccgcuucccgaacaucaccaaccugugccccuucggcgagguguucaacgccacccgguucgccagcgucuacgccuggaaccgcaagcggaucuccaacugcguggcggacuacagcgugcuguacaacuccgccagcuucuccacguucaagugcuacggcgucagccccaccaagcucaacgaccugugcuucaccaacguguacgccgacuccuucgugauccgcggggacgagguccggcagaucgcccccggccagaccgggaagaucgccgacuacaacuacaagcugccggacgacuucacgggcugcgugaucgcguggaacagcaacaaccucgacuccaaggucgggggcaacuacaacuaccuguuccgccuguuccgcaagagcaaccucaagcccuucgagcgggacaucuccaccgagaucuaccaggccggcagcacccccugcaacgggguggagggcuucaacugcuacuucccccugcaguccuacggguuccagccgaccaacggcgugggguaccagcccuaccggguggucgugcugagcuucgagcuccugcacgcccccgccacggugugcggccccaagaaguccaccaaccuggucaagaacaagugcgugaacuucaacuucaacggccucaccgggaccggcgugcugaccgagagcaacaagaaguuccugccguuccagcaguucgggcgcgacaucgccgacacgaccgacgcgguccgcgacccccagacccuggagauccucgacaucacccccugcagcuucggcgggguguccgugaucacgccgggcaccaacaccagcaaccaggucgccgugcuguaccagggcgugaacugcaccgagguccccguggccauccacgccgaccagcugacgcccaccuggcggguguacuccaccggcagcaacgucuuccagacccgcgccgggugccucaucggcgcggagcacgugaacaacuccuacgagugcgacauccccaucggggccggcaucugcgccagcuaccagacgcagaccaacuccccgcggcgcgcccggagcguggcgucccagagcgugaucgccuacaccaugucccugggcgccgagaacagcgucgccuacuccaacaacagcaucgccauccccaccaacuucacgaucuccgugaccaccgagauccugcccgugagcaugaccaagacgagcgucgacugcaccauguacaucugcggggacuccaccgagugcagcaaccuccugcugcaguacggcuccuucugcacccagcucaaccgcgcgcugacggggaucgccguggagcaggacaagaacacccaggagguguucgcccaggucaagcagaucuacaagacgcccccgaucaaggacuucggcggguucaacuucagccagauccugcccgaccccuccaagcccagcaagcgguccuucaucgaggaccuccuguucaacaaggugacccuggccgacgccggcuucaucaagcaguacggcgacugccucggggacaucgcggcccgcgaccugaucugcgcccagaaguucaacggccugaccgugcucccgccccugcugaccgacgagaugaucgcccaguacaccagcgcccuccuggcggggaccaucacguccggcuggaccuucggggccggcgccgcccugcagauccccuucgcgaugcagauggccuaccgguucaacggcaucggggucacccagaacgugcucuacgagaaccagaagcugaucgccaaccaguucaacagcgccaucggcaagauccaggacucccugagcuccaccgccagcgcgcucgggaagcugcaggacguggucaaccagaacgcccaggcccugaacacgcucgugaagcagcuguccagcaacuucggcgccaucuccagcgugcugaacgacauccucucccgccuggacaaggucgaggccgaggugcagaucgaccggcugaucaccgggcgccuccagagccugcagaccuacgugacccagcagcugauccgggcggccgagauccgcgccagcgccaaccucgccgcgaccaagauguccgagugcguccugggccagagcaagcggguggacuucugcggcaagggguaccaccugauguccuucccccagagcgccccgcacggcguggucuuccuccacgugacguacguccccgcccaggagaagaacuucaccaccgcccccgcgaucugccacgacgggaaggcccacuucccccgcgagggcguguucguguccaacgggacccacugguucgucacgcagcggaacuucuacgagccgcagaucaucaccaccgacaacaccuucgugagcggcaacugcgacguggucaucggcaucgugaacaacacgguguacgacccccugcagcccgagcuggacuccuucaaggaggagcucgacaaguacuucaagaaccacaccagccccgacgucgaccugggggacaucuccggcaucaacgccagcguggugaacauccagaaggagaucgaccgccugaacgaggucgccaagaaccucaacgagucccugaucgaccugcaggagcucgggaaguacgagcaguacaucaaguggccgugguacaucuggcugggcuucaucgccggccugaucgcgaucgugaucgugaccaucaugcucugcugcaugaccagcugcugcuccugccugaaggggugcugcagcugcggcuccugcugcaaguucgacgaggacgacagcgagcccguccugaagggggugaagcuccacuacacgugaggacuagucccuguucccagagcccacuuuuuuuucuuuuuuugaaauaaaauagccugucuuucagaucucaaaggcucuuuucagagccaccaaaaaaaaaaaaaaaaaaaaaaaaaaaaaaaaaaaaaaaaaaaaaaaaaaaaaaaaaaaaaaaaaaaaaaaaaaaaaaaaaaaaaaaaaaaaaaaaaaaaa

SEQ ID NO: 23641 - RNA, 4182 nt, Artificial Sequence
  SARS-CoV-2/Wuhan/WIV05/2019__EPI_ISL_402128 spike protein mRNA gc (1-1273)(H69del_V70del_Y144del_N501Y_A570D_D614G_P681H_T716I_S982 A_D1118H)
aggagagggcgcuuggcuugcaaggacccugagcugcggcauugaagcacacccaacccaacucgacugaagucagccucacugaaccggaucugagaaucuucucucucugggcuugccagggcucuccgaaccuagcuagcauccucuucaauuccaacuagaaagcuuaccauguucguguuccugguccuccugccccuggugagcucccagugcgugaaccucaccacccgcacgcagcugccgcccgccuacaccaacagcuucacccggggcgucuacuaccccgacaagguguuccgcuccagcgugcugcacuccacccaggaccucuuccugcccuucuucagcaacgucacgugguuccacgccaucuccgggaccaacggcaccaagcgguucgacaacccggugcugcccuucaacgacggggucuacuucgcgagcaccgagaaguccaacaucauccgcggcuggaucuucgggacgacccucgacagcaagacccagucccugcugaucgugaacaacgccaccaacguggucaucaaggugugcgaguuccaguucugcaacgaccccuuccucggcguguaccacaagaacaacaagagcuggauggaguccgaguuccgggucuacagcuccgccaacaacugcacguucgaguacgugagccagcccuuccugauggaccuggagggcaagcaggggaacuucaagaaccuccgcgaguucguguucaagaacaucgacggcuacuucaagaucuacuccaagcacaccccgaucaaccugguccgggaccugccccagggguucagcgcccucgagccccugguggaccugcccaucggcaucaacaucacccgcuuccagacccuccuggcccugcaccgguccuaccucacgccgggggacagcagcuccggcuggaccgcgggcgccgccgccuacuacgugggguaccugcagccccgcaccuuccugcucaaguacaacgagaacggcaccaucacggacgcggucgacugcgcccuggacccccugagcgagaccaagugcacccucaaguccuucaccguggagaaggggaucuaccagacgagcaacuuccgggugcagcccaccgaguccaucguccgcuucccgaacaucaccaaccugugccccuucggcgagguguucaacgccacccgguucgccagcgucuacgccuggaaccgcaagcggaucuccaacugcguggcggacuacagcgugcuguacaacuccgccagcuucuccacguucaagugcuacggcgucagccccaccaagcucaacgaccugugcuucaccaacguguacgccgacuccuucgugauccgcggggacgagguccggcagaucgcccccggccagaccgggaagaucgccgacuacaacuacaagcugccggacgacuucacgggcugcgugaucgcguggaacagcaacaaccucgacuccaaggucgggggcaacuacaacuaccuguaccgccuguuccgcaagagcaaccucaagcccuucgagcgggacaucuccaccgagaucuaccaggccggcagcacccccugcaacgggguggagggcuucaacugcuacuucccccugcaguccuacggguuccagccgaccuacggcgugggguaccagcccuaccggguggucgugcugagcuucgagcuccugcacgcccccgccacggugugcggccccaagaaguccaccaaccuggucaagaacaagugcgugaacuucaacuucaacggccucaccgggaccggcgugcugaccgagagcaacaagaaguuccugccguuccagcaguucgggcgcgacaucgacgacacgaccgacgcgguccgcgacccccagacccuggagauccucgacaucacccccugcagcuucggcgggguguccgugaucacgccgggcaccaacaccagcaaccaggucgccgugcuguaccagggcgugaacugcaccgagguccccguggccauccacgccgaccagcugacgcccaccuggcggguguacuccaccggcagcaacgucuuccagacccgcgccgggugccucaucggcgcggagcacgugaacaacuccuacgagugcgacauccccaucggggccggcaucugcgccagcuaccagacgcagaccaacucccaccggcgcgcccggagcguggcgucccagagcaucaucgccuacaccaugucccugggcgccgagaacagcgucgccuacuccaacaacagcaucgccauccccaucaacuucacgaucuccgugaccaccgagauccugcccgugagcaugaccaagacgagcgucgacugcaccauguacaucugcggggacuccaccgagugcagcaaccuccugcugcaguacggcuccuucugcacccagcucaaccgcgcgcugacggggaucgccguggagcaggacaagaacacccaggagguguucgcccaggucaagcagaucuacaagacgcccccgaucaaggacuucggcggguucaacuucagccagauccugcccgaccccuccaagcccagcaagcgguccuucaucgaggaccuccuguucaacaaggugacccuggccgacgccggcuucaucaagcaguacggcgacugccucggggacaucgcggcccgcgaccugaucugcgcccagaaguucaacggccugaccgugcucccgccccugcugaccgacgagaugaucgcccaguacaccagcgcccuccuggcggggaccaucacguccggcuggaccuucggggccggcgccgcccugcagauccccuucgcgaugcagauggccuaccgguucaacggcaucggggucacccagaacgugcucuacgagaaccagaagcugaucgccaaccaguucaacagcgccaucggcaagauccaggacucccugagcuccaccgccagcgcgcucgggaagcugcaggacguggucaaccagaacgcccaggcccugaacacgcucgugaagcagcuguccagcaacuucggcgccaucuccagcgugcugaacgacauccucgcccgccuggacaaggucgaggccgaggugcagaucgaccggcugaucaccgggcgccuccagagccugcagaccuacgugacccagcagcugauccgggcggccgagauccgcgccagcgccaaccucgccgcgaccaagauguccgagugcguccugggccagagcaagcggguggacuucugcggcaagggguaccaccugauguccuucccccagagcgccccgcacggcguggucuuccuccacgugacguacguccccgcccaggagaagaacuucaccaccgcccccgcgaucugccacgacgggaaggcccacuucccccgcgagggcguguucguguccaacgggacccacugguucgucacgcagcggaacuucuacgagccgcagaucaucaccacccacaacaccuucgugagcggcaacugcgacguggucaucggcaucgugaacaacacgguguacgacccccugcagcccgagcuggacuccuucaaggaggagcucgacaaguacuucaagaaccacaccagccccgacgucgaccugggggacaucuccggcaucaacgccagcguggugaacauccagaaggagaucgaccgccugaacgaggucgccaagaaccucaacgagucccugaucgaccugcaggagcucgggaaguacgagcaguacaucaaguggccgugguacaucuggcugggcuucaucgccggccugaucgcgaucgugauggugaccaucaugcucugcugcaugaccagcugcugcuccugccugaaggggugcugcagcugcggcuccugcugcaaguucgacgaggacgacagcgagcccguccugaagggggugaagcuccacuacacgugaggacuagucccuguucccagagcccacuuuuuuuucuuuuuuugaaauaaaauagccugucuuucagaucucaaaggcucuuuucagagccaccaaaaaaaaaaaaaaaaaaaaaaaaaaaaaaaaaaaaaaaaaaaaaaaaaaaaaaaaaaaaaaaaaaaaaaaaaaaaaaaaaaaaaaaaaaaaaaaaaaaaa

SEQ ID NO: 23642 - RNA, 4191 nt, Artificial Sequence
  SARS-CoV-2/Wuhan/WIV05/2019__EPI_ISL_402128 spike protein mRNA gc (1-1273)(K417N_E484K_N501Y_D614G)
aggagagggcgcuuggcuugcaaggacccugagcugcggcauugaagcacacccaacccaacucgacugaagucagccucacugaaccggaucugagaaucuucucucucugggcuugccagggcucuccgaaccuagcuagcauccucuucaauuccaacuagaaagcuuaccauguucguguuccugguccuccugccccuggugagcucccagugcgugaaccucaccacccgcacgcagcugccgcccgccuacaccaacagcuucacccggggcgucuacuaccccgacaagguguuccgcuccagcgugcugcacuccacccaggaccucuuccugcccuucuucagcaacgucacgugguuccacgccauccacguguccgggaccaacggcaccaagcgguucgacaacccggugcugcccuucaacgacggggucuacuucgcgagcaccgagaaguccaacaucauccgcggcuggaucuucgggacgacccucgacagcaagacccagucccugcugaucgugaacaacgccaccaacguggucaucaaggugugcgaguuccaguucugcaacgaccccuuccucggcguguacuaccacaagaacaacaagagcuggauggaguccgaguuccgggucuacagcuccgccaacaacugcacguucgaguacgugagccagcccuuccugauggaccuggagggcaagcaggggaacuucaagaaccuccgcgaguucguguucaagaacaucgacggcuacuucaagaucuacuccaagcacaccccgaucaaccugguccgggaccugccccagggguucagcgcccucgagccccugguggaccugcccaucggcaucaacaucacccgcuuccagacccuccuggcccugcaccgguccuaccucacgccgggggacagcagcuccggcuggaccgcgggcgccgccgccuacuacgugggguaccugcagccccgcaccuuccugcucaaguacaacgagaacggcaccaucacggacgcggucgacugcgcccuggacccccugagcgagaccaagugcacccucaaguccuucaccguggagaaggggaucuaccagacgagcaacuuccgggugcagcccaccgaguccaucguccgcuucccgaacaucaccaaccugugccccuucggcgagguguucaacgccacccgguucgccagcgucuacgccuggaaccgcaagcggaucuccaacugcguggcggacuacagcgugcuguacaacuccgccagcuucuccacguucaagugcuacggcgucagccccaccaagcucaacgaccugugcuucaccaacguguacgccgacuccuucgugauccgcggggacgagguccggcagaucgcccccggccagaccgggaacaucgccgacuacaacuacaagcugccggacgacuucacgggcugcgugaucgcguggaacagcaacaaccucgacuccaaggucgggggcaacuacaacuaccuguaccgccuguuccgcaagagcaaccucaagcccuucgagcgggacaucuccaccgagaucuaccaggccggcagcacccccugcaacggggugaagggcuucaacugcuacuucccccugcaguccuacggguuccagccgaccuacggcgugggguaccagcccuaccggguggucgugcugagcuucgagcuccugcacgcccccgccacggugugcggccccaagaaguccaccaaccuggucaagaacaagugcgugaacuucaacuucaacggccucaccgggaccggcgugcugaccgagagcaacaagaaguuccugccguuccagcaguucgggcgcgacaucgccgacacgaccgacgcgguccgcgacccccagacccuggagauccucgacaucacccccugcagcuucggcgggguguccgugaucacgccgggcaccaacaccagcaaccaggucgccgugcuguaccagggcgugaacugcaccgagguccccguggccauccacgccgaccagcugacgcccaccuggcggguguacuccaccggcagcaacgucuuccagacccgcgccgggugccucaucggcgcggagcacgugaacaacuccuacgagugcgacauccccaucggggccggcaucugcgccagcuaccagacgcagaccaacuccccgcggcgcgcccggagcguggcgucccagagcaucaucgccuacaccaugucccugggcgccgagaacagcgucgccuacuccaacaacagcaucgccauccccaccaacuucacgaucuccgugaccaccgagauccugcccgugagcaugaccaagacgagcgucgacugcaccauguacaucugcggggacuccaccgagugcagcaaccuccugcugcaguacggcuccuucugcacccagcucaaccgcgcgcugacggggaucgccguggagcaggacaagaacacccaggagguguucgcccaggucaagcagaucuacaagacgcccccgaucaaggacuucggcggguucaacuucagccagauccugcccgaccccuccaagcccagcaagcgguccuucaucgaggaccuccuguucaacaaggugacccuggccgacgccggcuucaucaagcaguacggcgacugccucggggacaucgcggcccgcgaccugaucugcgcccagaaguucaacggccugaccgugcucccgccccugcugaccgacgagaugaucgcccaguacaccagcgcccuccuggcggggaccaucacguccggcuggaccuucggggccggcgccgcccugcagauccccuucgcgaugcagauggccuaccgguucaacggcaucggggucacccagaacgugcucuacgagaaccagaagcugaucgccaaccaguucaacagcgccaucggcaagauccaggacucccugagcuccaccgccagcgcgcucgggaagcugcaggacguggucaaccagaacgcccaggcccugaacacgcucgugaagcagcuguccagcaacuucggcgccaucuccagcgugcugaacgacauccucucccgccuggacaaggucgaggccgaggugcagaucgaccggcugaucaccgggcgccuccagagccugcagaccuacgugacccagcagcugauccgggcggccgagauccgcgccagcgccaaccucgccgcgaccaagauguccgagugcguccugggccagagcaagcggguggacuucugcggcaagggguaccaccugauguccuucccccagagcgccccgcacggcguggucuuccuccacgugacguacguccccgcccaggagaagaacuucaccaccgcccccgcgaucugccacgacgggaaggcccacuucccccgcgagggcguguucguguccaacgggacccacugguucgucacgcagcggaacuucuacgagccgcagaucaucaccaccgacaacaccuucgugagcggcaacugcgacguggucaucggcaucgugaacaacacgguguacgacccccugcagcccgagcuggacuccuucaaggaggagcucgacaaguacuucaagaaccacaccagccccgacgucgaccugggggacaucuccggcaucaacgccagcguggugaacauccagaaggagaucgaccgccugaacgaggucgccaagaaccucaacgagucccugaucgaccugcaggagcucgggaaguacgagcaguacaucaaguggccgugguacaucuggcugggcuucaucgccggccugaucgcgaucgugauggugaccaucaugcucugcugcaugaccagcugcugcuccugccugaaggggugcugcagcugcggcuccugcugcaaguucgacgaggacgacagcgagcccguccugaagggggugaagcuccacuacacgugaggacuagucccuguucccagagcccacuuuuuuuucuuuuuuugaaauaaaauagccugucuuucagaucucaaaggcucuuuucagagccaccaaaaaaaaaaaaaaaaaaaaaaaaaaaaaaaaaaaaaaaaaaaaaaaaaaaaaaaaaaaaaaaaaaaaaaaaaaaaaaaaaaaaaaaaaaaaaaaaaaaaa

SEQ ID NO: 23643 - RNA, 4182 nt, Artificial Sequence
  SARS-CoV-2/Wuhan/WIV05/2019__EPI_ISL_402128 spike protein mRNA gc (1-1273)(L18F_D80A_D215G_L242del_A243del_L244del_R246I_K417N_E484 K_N501Y_D614G_A701V)
aggagagggcgcuuggcuugcaaggacccugagcugcggcauugaagcacacccaacccaacucgacugaagucagccucacugaaccggaucugagaaucuucucucucugggcuugccagggcucuccgaaccuagcuagcauccucuucaauuccaacuagaaagcuuaccauguucguguuccugguccuccugccccuggugagcucccagugcgugaacuucaccacccgcacgcagcugccgcccgccuacaccaacagcuucacccggggcgucuacuaccccgacaagguguuccgcuccagcgugcugcacuccacccaggaccucuuccugcccuucuucagcaacgucacgugguuccacgccauccacguguccgggaccaacggcaccaagcgguucgccaacccggugcugcccuucaacgacggggucuacuucgcgagcaccgagaaguccaacaucauccgcggcuggaucuucgggacgacccucgacagcaagacccagucccugcugaucgugaacaacgccaccaacguggucaucaaggugugcgaguuccaguucugcaacgaccccuuccucggcguguacuaccacaagaacaacaagagcuggauggaguccgaguuccgggucuacagcuccgccaacaacugcacguucgaguacgugagccagcccuuccugauggaccuggagggcaagcaggggaacuucaagaaccuccgcgaguucguguucaagaacaucgacggcuacuucaagaucuacuccaagcacaccccgaucaaccugguccggggccugccccagggguucagcgcccucgagccccugguggaccugcccaucggcaucaacaucacccgcuuccagacccuccacaucuccuaccucacgccgggggacagcagcuccggcuggaccgcgggcgccgccgccuacuacgugggguaccugcagccccgcaccuuccugcucaaguacaacgagaacggcaccaucacggacgcggucgacugcgcccuggacccccugagcgagaccaagugcacccucaaguccuucaccguggagaaggggaucuaccagacgagcaacuuccgggugcagcccaccgaguccaucguccgcuucccgaacaucaccaaccugugccccuucggcgagguguucaacgccacccgguucgccagcgucuacgccuggaaccgcaagcggaucuccaacugcguggcggacuacagcgugcuguacaacuccgccagcuucuccacguucaagugcuacggcgucagccccaccaagcucaacgaccugugcuucaccaacguguacgccgacuccuucgugauccgcggggacgagguccggcagaucgcccccggccagaccgggaacaucgccgacuacaacuacaagcugccggacgacuucacgggcugcgugaucgcguggaacagcaacaaccucgacuccaaggucgggggcaacuacaacuaccuguaccgccuguuccgcaagagcaaccucaagcccuucgagcgggacaucuccaccgagaucuaccaggccggcagcacccccugcaacggggugaagggcuucaacugcuacuucccccugcaguccuacggguuccagccgaccuacggcgugggguaccagcccuaccggguggucgugcugagcuucgagcuccugcacgcccccgccacggugugcggccccaagaaguccaccaaccuggucaagaacaagugcgugaacuucaacuucaacggccucaccgggaccggcgugcugaccgagagcaacaagaaguuccugccguuccagcaguucgggcgcgacaucgccgacacgaccgacgcgguccgcgacccccagacccuggagauccucgacaucacccccugcagcuucggcgggguguccgugaucacgccgggcaccaacaccagcaaccaggucgccgugcuguaccagggcgugaacugcaccgagguccccguggccauccacgccgaccagcugacgcccaccuggcggguguacuccaccggcagcaacgucuuccagacccgcgccgggugccucaucggcgcggagcacgugaacaacuccuacgagugcgacauccccaucggggccggcaucugcgccagcuaccagacgcagaccaacuccccgcggcgcgcccggagcguggcgucccagagcaucaucgccuacaccaugucccugggcguggagaacagcgucgccuacuccaacaacagcaucgccauccccaccaacuucacgaucuccgugaccaccgagauccugcccgugagcaugaccaagacgagcgucgacugcaccauguacaucugcggggacuccaccgagugcagcaaccuccugcugcaguacggcuccuucugcacccagcucaaccgcgcgcugacggggaucgccguggagcaggacaagaacacccaggagguguucgcccaggucaagcagaucuacaagacgcccccgaucaaggacuucggcggguucaacuucagccagauccugcccgaccccuccaagcccagcaagcgguccuucaucgaggaccuccuguucaacaaggugacccuggccgacgccggcuucaucaagcaguacggcgacugccucggggacaucgcggcccgcgaccugaucugcgcccagaaguucaacggccugaccgugcucccgccccugcugaccgacgagaugaucgcccaguacaccagcgcccuccuggcggggaccaucacguccggcuggaccuucggggccggcgccgcccugcagauccccuucgcgaugcagauggccuaccgguucaacggcaucggggucacccagaacgugcucuacgagaaccagaagcugaucgccaaccaguucaacagcgccaucggcaagauccaggacucccugagcuccaccgccagcgcgcucgggaagcugcaggacguggucaaccagaacgcccaggcccugaacacgcucgugaagcagcuguccagcaacuucggcgccaucuccagcgugcugaacgacauccucucccgccuggacaaggucgaggccgaggugcagaucgaccggcugaucaccgggcgccuccagagccugcagaccuacgugacccagcagcugauccgggcggccgagauccgcgccagcgccaaccucgccgcgaccaagauguccgagugcguccugggccagagcaagcggguggacuucugcggcaagggguaccaccugauguccuucccccagagcgccccgcacggcguggucuuccuccacgugacguacguccccgcccaggagaagaacuucaccaccgcccccgcgaucugccacgacgggaaggcccacuucccccgcgagggcguguucguguccaacgggacccacugguucgucacgcagcggaacuucuacgagccgcagaucaucaccaccgacaacaccuucgugagcggcaacugcgacguggucaucggcaucgugaacaacacgguguacgacccccugcagcccgagcuggacuccuucaaggaggagcucgacaaguacuucaagaaccacaccagccccgacgucgaccugggggacaucuccggcaucaacgccagcguggugaacauccagaaggagaucgaccgccugaacgaggucgccaagaaccucaacgagucccugaucgaccugcaggagcucgggaaguacgagcaguacaucaaguggccgugguacaucuggcugggcuucaucgccggccugaucgcgaucgugauggugaccaucaugcucugcugcaugaccagcugcugcuccugccugaaggggugcugcagcugcggcuccugcugcaaguucgacgaggacgacagcgagcccguccugaagggggugaagcuccacuacacgugaggacuagucccuguucccagagcccacuuuuuuuucuuuuuuugaaauaaaauagccugucuuucagaucucaaaggcucuuuucagagccaccaaaaaaaaaaaaaaaaaaaaaaaaaaaaaaaaaaaaaaaaaaaaaaaaaaaaaaaaaaaaaaaaaaaaaaaaaaaaaaaaaaaaaaaaaaaaaaaaaaaaa

SEQ ID NO: 23644 - RNA, 4191 nt, Artificial Sequence
  SARS-CoV-2/Wuhan/WIV05/2019__EPI_ISL_402128 spike protein mRNA gc (1-1273)(E484K_D614G)
aggagagggcgcuuggcuugcaaggacccugagcugcggcauugaagcacacccaacccaacucgacugaagucagccucacugaaccggaucugagaaucuucucucucugggcuugccagggcucuccgaaccuagcuagcauccucuucaauuccaacuagaaagcuuaccauguucguguuccugguccuccugccccuggugagcucccagugcgugaaccucaccacccgcacgcagcugccgcccgccuacaccaacagcuucacccggggcgucuacuaccccgacaagguguuccgcuccagcgugcugcacuccacccaggaccucuuccugcccuucuucagcaacgucacgugguuccacgccauccacguguccgggaccaacggcaccaagcgguucgacaacccggugcugcccuucaacgacggggucuacuucgcgagcaccgagaaguccaacaucauccgcggcuggaucuucgggacgacccucgacagcaagacccagucccugcugaucgugaacaacgccaccaacguggucaucaaggugugcgaguuccaguucugcaacgaccccuuccucggcguguacuaccacaagaacaacaagagcuggauggaguccgaguuccgggucuacagcuccgccaacaacugcacguucgaguacgugagccagcccuuccugauggaccuggagggcaagcaggggaacuucaagaaccuccgcgaguucguguucaagaacaucgacggcuacuucaagaucuacuccaagcacaccccgaucaaccugguccgggaccugccccagggguucagcgcccucgagccccugguggaccugcccaucggcaucaacaucacccgcuuccagacccuccuggcccugcaccgguccuaccucacgccgggggacagcagcuccggcuggaccgcgggcgccgccgccuacuacgugggguaccugcagccccgcaccuuccugcucaaguacaacgagaacggcaccaucacggacgcggucgacugcgcccuggacccccugagcgagaccaagugcacccucaaguccuucaccguggagaaggggaucuaccagacgagcaacuuccgggugcagcccaccgaguccaucguccgcuucccgaacaucaccaaccugugccccuucggcgagguguucaacgccacccgguucgccagcgucuacgccuggaaccgcaagcggaucuccaacugcguggcggacuacagcgugcuguacaacuccgccagcuucuccacguucaagugcuacggcgucagccccaccaagcucaacgaccugugcuucaccaacguguacgccgacuccuucgugauccgcggggacgagguccggcagaucgcccccggccagaccgggaagaucgccgacuacaacuacaagcugccggacgacuucacgggcugcgugaucgcguggaacagcaacaaccucgacuccaaggucgggggcaacuacaacuaccuguaccgccuguuccgcaagagcaaccucaagcccuucgagcgggacaucuccaccgagaucuaccaggccggcagcacccccugcaacggggugaagggcuucaacugcuacuucccccugcaguccuacggguuccagccgaccaacggcgugggguaccagcccuaccggguggucgugcugagcuucgagcuccugcacgcccccgccacggugugcggccccaagaaguccaccaaccuggucaagaacaagugcgugaacuucaacuucaacggccucaccgggaccggcgugcugaccgagagcaacaagaaguuccugccguuccagcaguucgggcgcgacaucgccgacacgaccgacgcgguccgcgacccccagacccuggagauccucgacaucacccccugcagcuucggcgggguguccgugaucacgccgggcaccaacaccagcaaccaggucgccgugcuguaccagggcgugaacugcaccgagguccccguggccauccacgccgaccagcugacgcccaccuggcggguguacuccaccggcagcaacgucuuccagacccgcgccgggugccucaucggcgcggagcacgugaacaacuccuacgagugcgacauccccaucggggccggcaucugcgccagcuaccagacgcagaccaacuccccgcggcgcgcccggagcguggcgucccagagcaucaucgccuacaccaugucccugggcgccgagaacagcgucgccuacuccaacaacagcaucgccauccccaccaacuucacgaucuccgugaccaccgagauccugcccgugagcaugaccaagacgagcgucgacugcaccauguacaucugcggggacuccaccgagugcagcaaccuccugcugcaguacggcuccuucugcacccagcucaaccgcgcgcugacggggaucgccguggagcaggacaagaacacccaggagguguucgcccaggucaagcagaucuacaagacgcccccgaucaaggacuucggcggguucaacuucagccagauccugcccgaccccuccaagcccagcaagcgguccuucaucgaggaccuccuguucaacaaggugacccuggccgacgccggcuucaucaagcaguacggcgacugccucggggacaucgcggcccgcgaccugaucugcgcccagaaguucaacggccugaccgugcucccgccccugcugaccgacgagaugaucgcccaguacaccagcgcccuccuggcggggaccaucacguccggcuggaccuucggggccggcgccgcccugcagauccccuucgcgaugcagauggccuaccgguucaacggcaucggggucacccagaacgugcucuacgagaaccagaagcugaucgccaaccaguucaacagcgccaucggcaagauccaggacucccugagcuccaccgccagcgcgcucgggaagcugcaggacguggucaaccagaacgcccaggcccugaacacgcucgugaagcagcuguccagcaacuucggcgccaucuccagcgugcugaacgacauccucucccgccuggacaaggucgaggccgaggugcagaucgaccggcugaucaccgggcgccuccagagccugcagaccuacgugacccagcagcugauccgggcggccgagauccgcgccagcgccaaccucgccgcgaccaagauguccgagugcguccugggccagagcaagcggguggacuucugcggcaagggguaccaccugauguccuucccccagagcgccccgcacggcguggucuuccuccacgugacguacguccccgcccaggagaagaacuucaccaccgcccccgcgaucugccacgacgggaaggcccacuucccccgcgagggcguguucguguccaacgggacccacugguucgucacgcagcggaacuucuacgagccgcagaucaucaccaccgacaacaccuucgugagcggcaacugcgacguggucaucggcaucgugaacaacacgguguacgacccccugcagcccgagcuggacuccuucaaggaggagcucgacaaguacuucaagaaccacaccagccccgacgucgaccugggggacaucuccggcaucaacgccagcguggugaacauccagaaggagaucgaccgccugaacgaggucgccaagaaccucaacgagucccugaucgaccugcaggagcucgggaaguacgagcaguacaucaaguggccgugguacaucuggcugggcuucaucgccggccugaucgcgaucgugauggugaccaucaugcucugcugcaugaccagcugcugcuccugccugaaggggugcugcagcugcggcuccugcugcaaguucgacgaggacgacagcgagcccguccugaagggggugaagcuccacuacacgugaggacuagucccuguucccagagcccacuuuuuuuucuuuuuuugaaauaaaauagccugucuuucagaucucaaaggcucuuuucagagccaccaaaaaaaaaaaaaaaaaaaaaaaaaaaaaaaaaaaaaaaaaaaaaaaaaaaaaaaaaaaaaaaaaaaaaaaaaaaaaaaaaaaaaaaaaaaaaaaaaaaaa

SEQ ID NO: 23645 - RNA, 4191 nt, Artificial Sequence
  SARS-CoV-2/Wuhan/WIV05/2019__EPI_ISL_402128 spike protein mRNA gc (1-1273)(L18F_T20N_P26S_D138Y_R190S_K417T_E484K_N501Y_D614G_H655Y _T1027I)
aggagagggcgcuuggcuugcaaggacccugagcugcggcauugaagcacacccaacccaacucgacugaagucagccucacugaaccggaucugagaaucuucucucucugggcuugccagggcucuccgaaccuagcuagcauccucuucaauuccaacuagaaagcuuaccauguucguguuccugguccuccugccccuggugagcucccagugcgugaacuucaccaaccgcacgcagcugccgagcgccuacaccaacagcuucacccggggcgucuacuaccccgacaagguguuccgcuccagcgugcugcacuccacccaggaccucuuccugcccuucuucagcaacgucacgugguuccacgccauccacguguccgggaccaacggcaccaagcgguucgacaacccggugcugcccuucaacgacggggucuacuucgcgagcaccgagaaguccaacaucauccgcggcuggaucuucgggacgacccucgacagcaagacccagucccugcugaucgugaacaacgccaccaacguggucaucaaggugugcgaguuccaguucugcaacuaccccuuccucggcguguacuaccacaagaacaacaagagcuggauggaguccgaguuccgggucuacagcuccgccaacaacugcacguucgaguacgugagccagcccuuccugauggaccuggagggcaagcaggggaacuucaagaaccucagcgaguucguguucaagaacaucgacggcuacuucaagaucuacuccaagcacaccccgaucaaccugguccgggaccugccccagggguucagcgcccucgagccccugguggaccugcccaucggcaucaacaucacccgcuuccagacccuccuggcccugcaccgguccuaccucacgccgggggacagcagcuccggcuggaccgcgggcgccgccgccuacuacgugggguaccugcagccccgcaccuuccugcucaaguacaacgagaacggcaccaucacggacgcggucgacugcgcccuggacccccugagcgagaccaagugcacccucaaguccuucaccguggagaaggggaucuaccagacgagcaacuuccgggugcagcccaccgaguccaucguccgcuucccgaacaucaccaaccugugccccuucggcgagguguucaacgccacccgguucgccagcgucuacgccuggaaccgcaagcggaucuccaacugcguggcggacuacagcgugcuguacaacuccgccagcuucuccacguucaagugcuacggcgucagccccaccaagcucaacgaccugugcuucaccaacguguacgccgacuccuucgugauccgcggggacgagguccggcagaucgcccccggccagaccgggaccaucgccgacuacaacuacaagcugccggacgacuucacgggcugcgugaucgcguggaacagcaacaaccucgacuccaaggucgggggcaacuacaacuaccuguaccgccuguuccgcaagagcaaccucaagcccuucgagcgggacaucuccaccgagaucuaccaggccggcagcacccccugcaacggggugaagggcuucaacugcuacuucccccugcaguccuacggguuccagccgaccuacggcgugggguaccagcccuaccggguggucgugcugagcuucgagcuccugcacgcccccgccacggugugcggccccaagaaguccaccaaccuggucaagaacaagugcgugaacuucaacuucaacggccucaccgggaccggcgugcugaccgagagcaacaagaaguuccugccguuccagcaguucgggcgcgacaucgccgacacgaccgacgcgguccgcgacccccagacccuggagauccucgacaucacccccugcagcuucggcgggguguccgugaucacgccgggcaccaacaccagcaaccaggucgccgugcuguaccagggcgugaacugcaccgagguccccguggccauccacgccgaccagcugacgcccaccuggcggguguacuccaccggcagcaacgucuuccagacccgcgccgggugccucaucggcgcggaguacgugaacaacuccuacgagugcgacauccccaucggggccggcaucugcgccagcuaccagacgcagaccaacuccccgcggcgcgcccggagcguggcgucccagagcaucaucgccuacaccaugucccugggcgccgagaacagcgucgccuacuccaacaacagcaucgccauccccaccaacuucacgaucuccgugaccaccgagauccugcccgugagcaugaccaagacgagcgucgacugcaccauguacaucugcggggacuccaccgagugcagcaaccuccugcugcaguacggcuccuucugcacccagcucaaccgcgcgcugacggggaucgccguggagcaggacaagaacacccaggagguguucgcccaggucaagcagaucuacaagacgcccccgaucaaggacuucggcggguucaacuucagccagauccugcccgaccccuccaagcccagcaagcgguccuucaucgaggaccuccuguucaacaaggugacccuggccgacgccggcuucaucaagcaguacggcgacugccucggggacaucgcggcccgcgaccugaucugcgcccagaaguucaacggccugaccgugcucccgccccugcugaccgacgagaugaucgcccaguacaccagcgcccuccuggcggggaccaucacguccggcuggaccuucggggccggcgccgcccugcagauccccuucgcgaugcagauggccuaccgguucaacggcaucggggucacccagaacgugcucuacgagaaccagaagcugaucgccaaccaguucaacagcgccaucggcaagauccaggacucccugagcuccaccgccagcgcgcucgggaagcugcaggacguggucaaccagaacgcccaggcccugaacacgcucgugaagcagcuguccagcaacuucggcgccaucuccagcgugcugaacgacauccucucccgccuggacaaggucgaggccgaggugcagaucgaccggcugaucaccgggcgccuccagagccugcagaccuacgugacccagcagcugauccgggcggccgagauccgcgccagcgccaaccucgccgcgaucaagauguccgagugcguccugggccagagcaagcggguggacuucugcggcaagggguaccaccugauguccuucccccagagcgccccgcacggcguggucuuccuccacgugacguacguccccgcccaggagaagaacuucaccaccgcccccgcgaucugccacgacgggaaggcccacuucccccgcgagggcguguucguguccaacgggacccacugguucgucacgcagcggaacuucuacgagccgcagaucaucaccaccgacaacaccuucgugagcggcaacugcgacguggucaucggcaucgugaacaacacgguguacgacccccugcagcccgagcuggacuccuucaaggaggagcucgacaaguacuucaagaaccacaccagccccgacgucgaccugggggacaucuccggcaucaacgccagcguggugaacauccagaaggagaucgaccgccugaacgaggucgccaagaaccucaacgagucccugaucgaccugcaggagcucgggaaguacgagcaguacaucaaguggccgugguacaucuggcugggcuucaucgccggccugaucgcgaucgugauggugaccaucaugcucugcugcaugaccagcugcugcuccugccugaaggggugcugcagcugcggcuccugcugcaaguucgacgaggacgacagcgagcccguccugaagggggugaagcuccacuacacgugaggacuagucccuguucccagagcccacuuuuuuuucuuuuuuugaaauaaaauagccugucuuucagaucucaaaggcucuuuucagagccaccaaaaaaaaaaaaaaaaaaaaaaaaaaaaaaaaaaaaaaaaaaaaaaaaaaaaaaaaaaaaaaaaaaaaaaaaaaaaaaaaaaaaaaaaaaaaaaaaaaaaa

SEQ ID NO: 23646 - RNA, 4191 nt, Artificial Sequence
  SARS-CoV-2/Wuhan/WIV05/2019__EPI_ISL_402128 spike protein mRNA gc (1-1273)(S13I_W152C_L452R_D614G)
aggagagggcgcuuggcuugcaaggacccugagcugcggcauugaagcacacccaacccaacucgacugaagucagccucacugaaccggaucugagaaucuucucucucugggcuugccagggcucuccgaaccuagcuagcauccucuucaauuccaacuagaaagcuuaccauguucguguuccugguccuccugccccuggugagcauccagugcgugaaccucaccacccgcacgcagcugccgcccgccuacaccaacagcuucacccggggcgucuacuaccccgacaagguguuccgcuccagcgugcugcacuccacccaggaccucuuccugcccuucuucagcaacgucacgugguuccacgccauccacguguccgggaccaacggcaccaagcgguucgacaacccggugcugcccuucaacgacggggucuacuucgcgagcaccgagaaguccaacaucauccgcggcuggaucuucgggacgacccucgacagcaagacccagucccugcugaucgugaacaacgccaccaacguggucaucaaggugugcgaguuccaguucugcaacgaccccuuccucggcguguacuaccacaagaacaacaagagcugcauggaguccgaguuccgggucuacagcuccgccaacaacugcacguucgaguacgugagccagcccuuccugauggaccuggagggcaagcaggggaacuucaagaaccuccgcgaguucguguucaagaacaucgacggcuacuucaagaucuacuccaagcacaccccgaucaaccugguccgggaccugccccagggguucagcgcccucgagccccugguggaccugcccaucggcaucaacaucacccgcuuccagacccuccuggcccugcaccgguccuaccucacgccgggggacagcagcuccggcuggaccgcgggcgccgccgccuacuacgugggguaccugcagccccgcaccuuccugcucaaguacaacgagaacggcaccaucacggacgcggucgacugcgcccuggacccccugagcgagaccaagugcacccucaaguccuucaccguggagaaggggaucuaccagacgagcaacuuccgggugcagcccaccgaguccaucguccgcuucccgaacaucaccaaccugugccccuucggcgagguguucaacgccacccgguucgccagcgucuacgccuggaaccgcaagcggaucuccaacugcguggcggacuacagcgugcuguacaacuccgccagcuucuccacguucaagugcuacggcgucagccccaccaagcucaacgaccugugcuucaccaacguguacgccgacuccuucgugauccgcggggacgagguccggcagaucgcccccggccagaccgggaagaucgccgacuacaacuacaagcugccggacgacuucacgggcugcgugaucgcguggaacagcaacaaccucgacuccaaggucgggggcaacuacaacuaccgcuaccgccuguuccgcaagagcaaccucaagcccuucgagcgggacaucuccaccgagaucuaccaggccggcagcacccccugcaacgggguggagggcuucaacugcuacuucccccugcaguccuacggguuccagccgaccaacggcgugggguaccagcccuaccggguggucgugcugagcuucgagcuccugcacgcccccgccacggugugcggccccaagaaguccaccaaccuggucaagaacaagugcgugaacuucaacuucaacggccucaccgggaccggcgugcugaccgagagcaacaagaaguuccugccguuccagcaguucgggcgcgacaucgccgacacgaccgacgcgguccgcgacccccagacccuggagauccucgacaucacccccugcagcuucggcgggguguccgugaucacgccgggcaccaacaccagcaaccaggucgccgugcuguaccagggcgugaacugcaccgagguccccguggccauccacgccgaccagcugacgcccaccuggcggguguacuccaccggcagcaacgucuuccagacccgcgccgggugccucaucggcgcggagcacgugaacaacuccuacgagugcgacauccccaucggggccggcaucugcgccagcuaccagacgcagaccaacuccccgcggcgcgcccggagcguggcgucccagagcaucaucgccuacaccaugucccugggcgccgagaacagcgucgccuacuccaacaacagcaucgccauccccaccaacuucacgaucuccgugaccaccgagauccugcccgugagcaugaccaagacgagcgucgacugcaccauguacaucugcggggacuccaccgagugcagcaaccuccugcugcaguacggcuccuucugcacccagcucaaccgcgcgcugacggggaucgccguggagcaggacaagaacacccaggagguguucgcccaggucaagcagaucuacaagacgcccccgaucaaggacuucggcggguucaacuucagccagauccugcccgaccccuccaagcccagcaagcgguccuucaucgaggaccuccuguucaacaaggugacccuggccgacgccggcuucaucaagcaguacggcgacugccucggggacaucgcggcccgcgaccugaucugcgcccagaaguucaacggccugaccgugcucccgccccugcugaccgacgagaugaucgcccaguacaccagcgcccuccuggcggggaccaucacguccggcuggaccuucggggccggcgccgcccugcagauccccuucgcgaugcagauggccuaccgguucaacggcaucggggucacccagaacgugcucuacgagaaccagaagcugaucgccaaccaguucaacagcgccaucggcaagauccaggacucccugagcuccaccgccagcgcgcucgggaagcugcaggacguggucaaccagaacgcccaggcccugaacacgcucgugaagcagcuguccagcaacuucggcgccaucuccagcgugcugaacgacauccucucccgccuggacaaggucgaggccgaggugcagaucgaccggcugaucaccgggcgccuccagagccugcagaccuacgugacccagcagcugauccgggcggccgagauccgcgccagcgccaaccucgccgcgaccaagauguccgagugcguccugggccagagcaagcggguggacuucugcggcaagggguaccaccugauguccuucccccagagcgccccgcacggcguggucuuccuccacgugacguacguccccgcccaggagaagaacuucaccaccgcccccgcgaucugccacgacgggaaggcccacuucccccgcgagggcguguucguguccaacgggacccacugguucgucacgcagcggaacuucuacgagccgcagaucaucaccaccgacaacaccuucgugagcggcaacugcgacguggucaucggcaucgugaacaacacgguguacgacccccugcagcccgagcuggacuccuucaaggaggagcucgacaaguacuucaagaaccacaccagccccgacgucgaccugggggacaucuccggcaucaacgccagcguggugaacauccagaaggagaucgaccgccugaacgaggucgccaagaaccucaacgagucccugaucgaccugcaggagcucgggaaguacgagcaguacaucaaguggccgugguacaucuggcugggcuucaucgccggccugaucgcgaucgugauggugaccaucaugcucugcugcaugaccagcugcugcuccugccugaaggggugcugcagcugcggcuccugcugcaaguucgacgaggacgacagcgagcccguccugaagggggugaagcuccacuacacgugaggacuagucccuguucccagagcccacuuuuuuuucuuuuuuugaaauaaaauagccugucuuucagaucucaaaggcucuuuucagagccaccaaaaaaaaaaaaaaaaaaaaaaaaaaaaaaaaaaaaaaaaaaaaaaaaaaaaaaaaaaaaaaaaaaaaaaaaaaaaaaaaaaaaaaaaaaaaaaaaaaaaa

SEQ ID NO: 23647 - RNA, 4191 nt, Artificial Sequence; identical to SEQ ID NO: 23629
  SARS-CoV-2/Wuhan/WIV05/2019__EPI_ISL_402128 spike protein mRNA gc (1-1273)

SEQ ID NO: 23648 - RNA, 4191 nt, Artificial Sequence
  SARS-CoV-2/Wuhan/WIV05/2019__EPI_ISL_402128 spike protein mRNA gc (1-1273)(D614G)
aggagagggcgcuuggcuugcaaggacccugagcugcggcauugaagcacacccaacccaacucgacugaagucagccucacugaaccggaucugagaaucuucucucucugggcuugccagggcucuccgaaccuagcuagcauccucuucaauuccaacuagaaagcuuaccauguucguguuccugguccuccugccccuggugagcucccagugcgugaaccucaccacccgcacgcagcugccgcccgccuacaccaacagcuucacccggggcgucuacuaccccgacaagguguuccgcuccagcgugcugcacuccacccaggaccucuuccugcccuucuucagcaacgucacgugguuccacgccauccacguguccgggaccaacggcaccaagcgguucgacaacccggugcugcccuucaacgacggggucuacuucgcgagcaccgagaaguccaacaucauccgcggcuggaucuucgggacgacccucgacagcaagacccagucccugcugaucgugaacaacgccaccaacguggucaucaaggugugcgaguuccaguucugcaacgaccccuuccucggcguguacuaccacaagaacaacaagagcuggauggaguccgaguuccgggucuacagcuccgccaacaacugcacguucgaguacgugagccagcccuuccugauggaccuggagggcaagcaggggaacuucaagaaccuccgcgaguucguguucaagaacaucgacggcuacuucaagaucuacuccaagcacaccccgaucaaccugguccgggaccugccccagggguucagcgcccucgagccccugguggaccugcccaucggcaucaacaucacccgcuuccagacccuccuggcccugcaccgguccuaccucacgccgggggacagcagcuccggcuggaccgcgggcgccgccgccuacuacgugggguaccugcagccccgcaccuuccugcucaaguacaacgagaacggcaccaucacggacgcggucgacugcgcccuggacccccugagcgagaccaagugcacccucaaguccuucaccguggagaaggggaucuaccagacgagcaacuuccgggugcagcccaccgaguccaucguccgcuucccgaacaucaccaaccugugccccuucggcgagguguucaacgccacccgguucgccagcgucuacgccuggaaccgcaagcggaucuccaacugcguggcggacuacagcgugcuguacaacuccgccagcuucuccacguucaagugcuacggcgucagccccaccaagcucaacgaccugugcuucaccaacguguacgccgacuccuucgugauccgcggggacgagguccggcagaucgcccccggccagaccgggaagaucgccgacuacaacuacaagcugccggacgacuucacgggcugcgugaucgcguggaacagcaacaaccucgacuccaaggucgggggcaacuacaacuaccuguaccgccuguuccgcaagagcaaccucaagcccuucgagcgggacaucuccaccgagaucuaccaggccggcagcacccccugcaacgggguggagggcuucaacugcuacuucccccugcaguccuacggguuccagccgaccaacggcgugggguaccagcccuaccggguggucgugcugagcuucgagcuccugcacgcccccgccacggugugcggccccaagaaguccaccaaccuggucaagaacaagugcgugaacuucaacuucaacggccucaccgggaccggcgugcugaccgagagcaacaagaaguuccugccguuccagcaguucgggcgcgacaucgccgacacgaccgacgcgguccgcgacccccagacccuggagauccucgacaucacccccugcagcuucggcgggguguccgugaucacgccgggcaccaacaccagcaaccaggucgccgugcuguaccagggcgugaacugcaccgagguccccguggccauccacgccgaccagcugacgcccaccuggcggguguacuccaccgggagcaacgucuuccagacccgcgccggcugccucaucggggcggagcacgugaacaacuccuacgagugcgacauccccaucggcgccggcaucugcgccagcuaccagacgcagaccaacuccccgcggcgcgcccggagcguggcgucccagagcaucaucgccuacaccaugucccugggggccgagaacagcgucgccuacuccaacaacagcaucgccauccccaccaacuucacgaucuccgugaccaccgagauccugcccgugagcaugaccaagacgagcgucgacugcaccauguacaucugcggcgacuccaccgagugcagcaaccuccugcugcaguacggguccuucugcacccagcucaaccgcgcgcugacgggcaucgccguggagcaggacaagaacacccaggagguguucgcccaggucaagcagaucuacaagacgcccccgaucaaggacuucgggggcuucaacuucagccagauccugcccgaccccuccaagcccagcaagcgguccuucaucgaggaccuccuguucaacaaggugacccuggccgacgccggcuucaucaagcaguacggggacugccucggcgacaucgcggcccgcgaccugaucugcgcccagaaguucaacgggcugaccgugcucccgccccugcugaccgacgagaugaucgcccaguacaccagcgcccuccuggcgggcaccaucacguccggguggaccuucggcgccggcgccgcccugcagauccccuucgcgaugcagauggccuaccgguucaacgggaucggcgucacccagaacgugcucuacgagaaccagaagcugaucgccaaccaguucaacagcgccaucgggaagauccaggacucccugagcuccaccgccagcgcgcucggcaagcugcaggacguggucaaccagaacgcccaggcccugaacacgcucgugaagcagcuguccagcaacuucggggccaucuccagcgugcugaacgacauccucucccgccuggacaaggucgaggccgaggugcagaucgaccggcugaucaccggccgccuccagagccugcagaccuacgugacccagcagcugauccgggcggccgagauccgcgccagcgccaaccucgccgcgaccaagauguccgagugcguccugggccagagcaagcggguggacuucugcgggaagggcuaccaccugauguccuucccccagagcgccccgcacgggguggucuuccuccacgugacguacguccccgcccaggagaagaacuucaccaccgcccccgcgaucugccacgacggcaaggcccacuucccccgcgaggggguguucguguccaacggcacccacugguucgucacgcagcggaacuucuacgagccgcagaucaucaccaccgacaacaccuucgugagcggcaacugcgacguggucaucgggaucgugaacaacacgguguacgacccccugcagcccgagcuggacuccuucaaggaggagcucgacaaguacuucaagaaccacaccagccccgacgucgaccugggcgacaucuccgggaucaacgccagcguggugaacauccagaaggagaucgaccgccugaacgaggucgccaagaaccucaacgagucccugaucgaccugcaggagcucggcaaguacgagcaguacaucaaguggccgugguacaucuggcugggcuucaucgccgggcugaucgcgaucgugauggugaccaucaugcucugcugcaugaccagcugcugcuccugccugaagggcugcugcagcugcggguccugcugcaaguucgacgaggacgacagcgagcccguccugaagggcgugaagcuccacuacacgugaggacuagucccuguucccagagcccacuuuuuuuucuuuuuuugaaauaaaauagccugucuuucagaucucaaaggcucuuuucagagccaccaaaaaaaaaaaaaaaaaaaaaaaaaaaaaaaaaaaaaaaaaaaaaaaaaaaaaaaaaaaaaaaaaaaaaaaaaaaaaaaaaaaaaaaaaaaaaaaaaaaaa

SEQ ID NO: 23649 - RNA, 4191 nt, Artificial Sequence
  SARS-CoV-2/Wuhan/WIV05/2019__EPI_ISL_402128 spike protein mRNA gc (1-1273)(A222V_D614G)
aggagagggcgcuuggcuugcaaggacccugagcugcggcauugaagcacacccaacccaacucgacugaagucagccucacugaaccggaucugagaaucuucucucucugggcuugccagggcucuccgaaccuagcuagcauccucuucaauuccaacuagaaagcuuaccauguucguguuccugguccuccugccccuggugagcucccagugcgugaaccucaccacccgcacgcagcugccgcccgccuacaccaacagcuucacccggggcgucuacuaccccgacaagguguuccgcuccagcgugcugcacuccacccaggaccucuuccugcccuucuucagcaacgucacgugguuccacgccauccacguguccgggaccaacggcaccaagcgguucgacaacccggugcugcccuucaacgacggggucuacuucgcgagcaccgagaaguccaacaucauccgcggcuggaucuucgggacgacccucgacagcaagacccagucccugcugaucgugaacaacgccaccaacguggucaucaaggugugcgaguuccaguucugcaacgaccccuuccucggcguguacuaccacaagaacaacaagagcuggauggaguccgaguuccgggucuacagcuccgccaacaacugcacguucgaguacgugagccagcccuuccugauggaccuggagggcaagcaggggaacuucaagaaccuccgcgaguucguguucaagaacaucgacggcuacuucaagaucuacuccaagcacaccccgaucaaccugguccgggaccugccccagggguucagcgugcucgagccccugguggaccugcccaucggcaucaacaucacccgcuuccagacccuccuggcccugcaccgguccuaccucacgccgggggacagcagcuccggcuggaccgccggcgcggccgccuacuacgucggguaccugcagccccgcaccuuccugcucaaguacaacgagaacggcaccaucacggacgccguggacugcgcgcuggacccccugagcgagaccaagugcacccucaaguccuucaccguggagaaggggaucuaccagacgagcaacuuccggguccagcccaccgaguccaucgugcgcuucccgaacaucaccaaccugugccccuucggcgaggucuucaacgccacccgguucgccagcguguacgccuggaaccgcaagcggaucuccaacugcguggccgacuacagcguccuguacaacuccgcgagcuucuccacguucaagugcuacggcgugagccccaccaagcucaacgaccugugcuucaccaacguguacgccgacuccuucgucauccgcggggacgaggugcggcagaucgcccccggccagaccgggaagaucgccgacuacaacuacaagcugccggacgacuucacgggcugcgugaucgccuggaacagcaacaaccucgacuccaaggucgggggcaacuacaacuaccuguaccgccuguuccgcaagagcaaccucaagcccuucgagcgggacaucuccaccgagaucuaccaggcgggcagcacccccugcaacgggguggagggcuucaacugcuacuucccccugcaguccuacggguuccagccgaccaacggcgugggguaccagcccuaccgggucguggugcugagcuucgagcuccugcacgcccccgccacggucugcggccccaagaaguccaccaaccuggugaagaacaagugcgugaacuucaacuucaacggccucaccgggaccggcguccugaccgagagcaacaagaaguuccugccguuccagcaguucgggcgcgacaucgccgacacgaccgacgccgugcgcgacccccagacccuggagauccucgacaucacccccugcagcuucggcgggguguccgucaucacgccgggcaccaacaccagcaaccagguggcggugcuguaccagggcgucaacugcaccgaggugcccguggccauccacgccgaccagcugacgcccaccuggcgggucuacuccaccgggagcaacguguuccagacccgcgccggcugccucaucggggccgagcacgugaacaacuccuacgagugcgacauccccaucggcgcgggcaucugcgccagcuaccagacgcagaccaacuccccgcggcgcgcccggagcgucgccucccagagcaucaucgcguacaccaugucccugggggccgagaacagcguggccuacuccaacaacagcaucgccauccccaccaacuucacgaucuccgugaccaccgagauccugcccgucagcaugaccaagacgagcguggacugcaccauguacaucugcggcgacuccaccgagugcagcaaccuccugcugcaguacggguccuucugcacccagcucaaccgcgcccugacgggcaucgcgguggagcaggacaagaacacccaggaggucuucgcccaggugaagcagaucuacaagacgcccccgaucaaggacuucgggggcuucaacuucagccagauccugcccgaccccuccaagcccagcaagcgguccuucaucgaggaccuccuguucaacaaggugacccuggccgacgccggcuucaucaagcaguacggggacugccucggcgacaucgccgcgcgcgaccugaucugcgcccagaaguucaacgggcugaccguccucccgccccugcugaccgacgagaugaucgcccaguacaccagcgcccuccuggccggcaccaucacguccggguggaccuucggcgcgggcgccgcccugcagauccccuucgccaugcagauggcguaccgguucaacgggaucggcgugacccagaacgugcucuacgagaaccagaagcugaucgccaaccaguucaacagcgccaucgggaagauccaggacucccugagcuccaccgccagcgcccucggcaagcugcaggacgucgugaaccagaacgcgcaggcccugaacacgcucgugaagcagcuguccagcaacuucggggccaucuccagcguccugaacgacauccucucccgccuggacaagguggaggccgaggugcagaucgaccggcugaucaccggccgccuccagagccugcagaccuacgucacccagcagcugauccgggccgcggagauccgcgccagcgccaaccucgccgccaccaagauguccgagugcgugcugggccagagcaagcggguggacuucugcgggaagggcuaccaccugauguccuucccccagagcgcgccgcacggggucguguuccuccacgucacguacgugcccgcccaggagaagaacuucaccaccgcccccgccaucugccacgacggcaaggcgcacuucccccgcgaggggguguucgucuccaacggcacccacugguucgugacgcagcggaacuucuacgagccgcagaucaucaccaccgacaacaccuucgugagcggcaacugcgacgucgugaucgggaucgugaacaacacggucuacgacccccugcagcccgagcuggacuccuucaaggaggagcucgacaaguacuucaagaaccacaccagccccgacguggaccugggcgacaucuccgggaucaacgccagcguggucaacauccagaaggagaucgaccgccugaacgagguggccaagaaccucaacgagucccugaucgaccugcaggagcucggcaaguacgagcaguacaucaaguggccgugguacaucuggcugggcuucaucgccgggcugaucgccaucgugauggucaccaucaugcucugcugcaugaccagcugcugcuccugccugaagggcugcugcagcugcggguccugcugcaaguucgacgaggacgacagcgagcccgugcugaagggcgugaagcuccacuacacgugaggacuagucccuguucccagagcccacuuuuuuuucuuuuuuugaaauaaaauagccugucuuucagaucucaaaggcucuuuucagagccaccaaaaaaaaaaaaaaaaaaaaaaaaaaaaaaaaaaaaaaaaaaaaaaaaaaaaaaaaaaaaaaaaaaaaaaaaaaaaaaaaaaaaaaaaaaaaaaaaaaaaa

SEQ ID NO: 23650 - RNA, 4191 nt, Artificial Sequence
  SARS-CoV-2/Wuhan/WIV05/2019__EPI_ISL_402128 spike protein mRNA gc (1-1273)(N439K_D614G)
aggagagggcgcuuggcuugcaaggacccugagcugcggcauugaagcacacccaacccaacucgacugaagucagccucacugaaccggaucugagaaucuucucucucugggcuugccagggcucuccgaaccuagcuagcauccucuucaauuccaacuagaaagcuuaccauguucguguuccugguccuccugccccuggugagcucccagugcgugaaccucaccacccgcacgcagcugccgcccgccuacaccaacagcuucacccggggcgucuacuaccccgacaagguguuccgcuccagcgugcugcacuccacccaggaccucuuccugcccuucuucagcaacgucacgugguuccacgccauccacguguccgggaccaacggcaccaagcgguucgacaacccggugcugcccuucaacgacggggucuacuucgcgagcaccgagaaguccaacaucauccgcggcuggaucuucgggacgacccucgacagcaagacccagucccugcugaucgugaacaacgccaccaacguggucaucaaggugugcgaguuccaguucugcaacgaccccuuccucggcguguacuaccacaagaacaacaagagcuggauggaguccgaguuccgggucuacagcuccgccaacaacugcacguucgaguacgugagccagcccuuccugauggaccuggagggcaagcaggggaacuucaagaaccuccgcgaguucguguucaagaacaucgacggcuacuucaagaucuacuccaagcacaccccgaucaaccugguccgggaccugccccagggguucagcgcccucgagccccugguggaccugcccaucggcaucaacaucacccgcuuccagacccuccuggcccugcaccgguccuaccucacgccgggggacagcagcuccggcuggaccgcgggcgccgccgccuacuacgugggguaccugcagccccgcaccuuccugcucaaguacaacgagaacggcaccaucacggacgcggucgacugcgcccuggacccccugagcgagaccaagugcacccucaaguccuucaccguggagaaggggaucuaccagacgagcaacuuccgggugcagcccaccgaguccaucguccgcuucccgaacaucaccaaccugugccccuucggcgagguguucaacgccacccgguucgccagcgucuacgccuggaaccgcaagcggaucuccaacugcguggcggacuacagcgugcuguacaacuccgccagcuucuccacguucaagugcuacggcgucagccccaccaagcucaacgaccugugcuucaccaacguguacgccgacuccuucgugauccgcggggacgagguccggcagaucgcccccggccagaccgggaagaucgccgacuacaacuacaagcugccggacgacuucacgggcugcgugaucgcguggaacagcaagaaccucgacuccaaggucgggggcaacuacaacuaccuguaccgccuguuccgcaagagcaaccucaagcccuucgagcgggacaucuccaccgagaucuaccaggccggcagcacccccugcaacgggguggagggcuucaacugcuacuucccccugcaguccuacggguuccagccgaccaacggcgugggguaccagcccuaccggguggucgugcugagcuucgagcuccugcacgcccccgccacggugugcggccccaagaaguccaccaaccuggucaagaacaagugcgugaacuucaacuucaacggccucaccgggaccggcgugcugaccgagagcaacaagaaguuccugccguuccagcaguucgggcgcgacaucgccgacacgaccgacgcgguccgcgacccccagacccuggagauccucgacaucacccccugcagcuucggcgggguguccgugaucacgccgggcaccaacaccagcaaccaggucgccgugcuguaccagggcgugaacugcaccgagguccccguggccauccacgccgaccagcugacgcccaccuggcggguguacuccaccgggagcaacgucuuccagacccgcgccggcugccucaucggggcggagcacgugaacaacuccuacgagugcgacauccccaucggcgccggcaucugcgccagcuaccagacgcagaccaacuccccgcggcgcgcccggagcguggcgucccagagcaucaucgccuacaccaugucccugggggccgagaacagcgucgccuacuccaacaacagcaucgccauccccaccaacuucacgaucuccgugaccaccgagauccugcccgugagcaugaccaagacgagcgucgacugcaccauguacaucugcggcgacuccaccgagugcagcaaccuccugcugcaguacggguccuucugcacccagcucaaccgcgcgcugacgggcaucgccguggagcaggacaagaacacccaggagguguucgcccaggucaagcagaucuacaagacgcccccgaucaaggacuucgggggcuucaacuucagccagauccugcccgaccccuccaagcccagcaagcgguccuucaucgaggaccuccuguucaacaaggugacccuggccgacgccggcuucaucaagcaguacggggacugccucggcgacaucgcggcccgcgaccugaucugcgcccagaaguucaacgggcugaccgugcucccgccccugcugaccgacgagaugaucgcccaguacaccagcgcccuccuggcgggcaccaucacguccggguggaccuucggcgccggcgccgcccugcagauccccuucgcgaugcagauggccuaccgguucaacgggaucggcgucacccagaacgugcucuacgagaaccagaagcugaucgccaaccaguucaacagcgccaucgggaagauccaggacucccugagcuccaccgccagcgcgcucggcaagcugcaggacguggucaaccagaacgcccaggcccugaacacgcucgugaagcagcuguccagcaacuucggggccaucuccagcgugcugaacgacauccucucccgccuggacaaggucgaggccgaggugcagaucgaccggcugaucaccggccgccuccagagccugcagaccuacgugacccagcagcugauccgggcggccgagauccgcgccagcgccaaccucgccgcgaccaagauguccgagugcguccugggccagagcaagcggguggacuucugcgggaagggcuaccaccugauguccuucccccagagcgccccgcacgggguggucuuccuccacgugacguacguccccgcccaggagaagaacuucaccaccgcccccgcgaucugccacgacggcaaggcccacuucccccgcgaggggguguucguguccaacggcacccacugguucgucacgcagcggaacuucuacgagccgcagaucaucaccaccgacaacaccuucgugagcggcaacugcgacguggucaucgggaucgugaacaacacgguguacgacccccugcagcccgagcuggacuccuucaaggaggagcucgacaaguacuucaagaaccacaccagccccgacgucgaccugggcgacaucuccgggaucaacgccagcguggugaacauccagaaggagaucgaccgccugaacgaggucgccaagaaccucaacgagucccugaucgaccugcaggagcucggcaaguacgagcaguacaucaaguggccgugguacaucuggcugggcuucaucgccgggcugaucgcgaucgugauggugaccaucaugcucugcugcaugaccagcugcugcuccugccugaagggcugcugcagcugcggguccugcugcaaguucgacgaggacgacagcgagcccguccugaagggcgugaagcuccacuacacgugaggacuagucccuguucccagagcccacuuuuuuuucuuuuuuugaaauaaaauagccugucuuucagaucucaaaggcucuuuucagagccaccaaaaaaaaaaaaaaaaaaaaaaaaaaaaaaaaaaaaaaaaaaaaaaaaaaaaaaaaaaaaaaaaaaaaaaaaaaaaaaaaaaaaaaaaaaaaaaaaaaaaa

SEQ ID NO: 23651 - RNA, 4191 nt, Artificial Sequence
  SARS-CoV-2/Wuhan/WIV05/2019__EPI_ISL_402128 spike protein mRNA gc (1-1273)(S477N_D614G)
aggagagggcgcuuggcuugcaaggacccugagcugcggcauugaagcacacccaacccaacucgacugaagucagccucacugaaccggaucugagaaucuucucucucugggcuugccagggcucuccgaaccuagcuagcauccucuucaauuccaacuagaaagcuuaccauguucguguuccugguccuccugccccuggugagcucccagugcgugaaccucaccacccgcacgcagcugccgcccgccuacaccaacagcuucacccggggcgucuacuaccccgacaagguguuccgcuccagcgugcugcacuccacccaggaccucuuccugcccuucuucagcaacgucacgugguuccacgccauccacguguccgggaccaacggcaccaagcgguucgacaacccggugcugcccuucaacgacggggucuacuucgcgagcaccgagaaguccaacaucauccgcggcuggaucuucgggacgacccucgacagcaagacccagucccugcugaucgugaacaacgccaccaacguggucaucaaggugugcgaguuccaguucugcaacgaccccuuccucggcguguacuaccacaagaacaacaagagcuggauggaguccgaguuccgggucuacagcuccgccaacaacugcacguucgaguacgugagccagcccuuccugauggaccuggagggcaagcaggggaacuucaagaaccuccgcgaguucguguucaagaacaucgacggcuacuucaagaucuacuccaagcacaccccgaucaaccugguccgggaccugccccagggguucagcgcccucgagccccugguggaccugcccaucggcaucaacaucacccgcuuccagacccuccuggcccugcaccgguccuaccucacgccgggggacagcagcuccggcuggaccgcgggcgccgccgccuacuacgugggguaccugcagccccgcaccuuccugcucaaguacaacgagaacggcaccaucacggacgcggucgacugcgcccuggacccccugagcgagaccaagugcacccucaaguccuucaccguggagaaggggaucuaccagacgagcaacuuccgggugcagcccaccgaguccaucguccgcuucccgaacaucaccaaccugugccccuucggcgagguguucaacgccacccgguucgccagcgucuacgccuggaaccgcaagcggaucuccaacugcguggcggacuacagcgugcuguacaacuccgccagcuucuccacguucaagugcuacggcgucagccccaccaagcucaacgaccugugcuucaccaacguguacgccgacuccuucgugauccgcggggacgagguccggcagaucgcccccggccagaccgggaagaucgccgacuacaacuacaagcugccggacgacuucacgggcugcgugaucgcguggaacagcaacaaccucgacuccaaggucgggggcaacuacaacuaccuguaccgccuguuccgcaagagcaaccucaagcccuucgagcgggacaucuccaccgagaucuaccaggccggcaacacccccugcaacgggguggagggcuucaacugcuacuucccccugcagagcuacggguuccagccgaccaacggcgugggguaccagcccuaccggguggucgugcuguccuucgagcuccugcacgcccccgccacggugugcggccccaagaaguccaccaaccuggucaagaacaagugcgugaacuucaacuucaacggccucaccgggaccggcgugcugaccgagagcaacaagaaguuccugccguuccagcaguucgggcgcgacaucgccgacacgaccgacgcgguccgcgacccccagacccuggagauccucgacaucacccccugcagcuucggcggggugagcgugaucacgccgggcaccaacaccuccaaccaggucgccgugcuguaccagggcgugaacugcaccgagguccccguggccauccacgccgaccagcugacgcccaccuggcggguguacagcaccggguccaacgucuuccagacccgcgccggcugccucaucggggcggagcacgugaacaacagcuacgagugcgacauccccaucggcgccggcaucugcgccuccuaccagacgcagaccaacagcccgcggcgcgcccgguccguggcgagccaguccaucaucgccuacaccaugagccugggggccgagaacuccgucgccuacagcaacaacuccaucgccauccccaccaacuucacgaucagcgugaccaccgagauccugcccguguccaugaccaagacgagcgucgacugcaccauguacaucugcggcgacagcaccgagugcuccaaccuccugcugcaguacgggagcuucugcacccagcucaaccgcgcgcugacgggcaucgccguggagcaggacaagaacacccaggagguguucgcccaggucaagcagaucuacaagacgcccccgaucaaggacuucgggggcuucaacuucucccagauccugcccgaccccagcaagcccuccaagcggagcuucaucgaggaccuccuguucaacaaggugacccuggccgacgccggcuucaucaagcaguacggggacugccucggcgacaucgcggcccgcgaccugaucugcgcccagaaguucaacgggcugaccgugcucccgccccugcugaccgacgagaugaucgcccaguacaccuccgcccuccuggcgggcaccaucacgagcggguggaccuucggcgccggcgccgcccugcagauccccuucgcgaugcagauggccuaccgguucaacgggaucggcgucacccagaacgugcucuacgagaaccagaagcugaucgccaaccaguucaacuccgccaucgggaagauccaggacagccuguccagcaccgccuccgcgcucggcaagcugcaggacguggucaaccagaacgcccaggcccugaacacgcucgugaagcagcugagcuccaacuucggggccaucagcuccgugcugaacgacauccucagccgccuggacaaggucgaggccgaggugcagaucgaccggcugaucaccggccgccuccagucccugcagaccuacgugacccagcagcugauccgggcggccgagauccgcgccagcgccaaccucgccgcgaccaagaugagcgagugcguccugggccaguccaagcggguggacuucugcgggaagggcuaccaccugaugagcuucccccaguccgccccgcacgggguggucuuccuccacgugacguacguccccgcccaggagaagaacuucaccaccgcccccgcgaucugccacgacggcaaggcccacuucccccgcgaggggguguucgugagcaacggcacccacugguucgucacgcagcggaacuucuacgagccgcagaucaucaccaccgacaacaccuucguguccggcaacugcgacguggucaucgggaucgugaacaacacgguguacgacccccugcagcccgagcuggacagcuucaaggaggagcucgacaaguacuucaagaaccacaccucccccgacgucgaccugggcgacaucagcgggaucaacgccuccguggugaacauccagaaggagaucgaccgccugaacgaggucgccaagaaccucaacgagagccugaucgaccugcaggagcucggcaaguacgagcaguacaucaaguggccgugguacaucuggcugggcuucaucgccgggcugaucgcgaucgugauggugaccaucaugcucugcugcaugaccuccugcugcagcugccugaagggcugcugcuccugcgggagcugcugcaaguucgacgaggacgacuccgagcccguccugaagggcgugaagcuccacuacacgugaggacuagucccuguucccagagcccacuuuuuuuucuuuuuuugaaauaaaauagccugucuuucagaucucaaaggcucuuuucagagccaccaaaaaaaaaaaaaaaaaaaaaaaaaaaaaaaaaaaaaaaaaaaaaaaaaaaaaaaaaaaaaaaaaaaaaaaaaaaaaaaaaaaaaaaaaaaaaaaaaaaaa

SEQ ID NO: 23652 - RNA, 4191 nt, Artificial Sequence
  SARS-CoV-2/Wuhan/WIV05/2019__EPI_ISL_402128 spike protein mRNA gc (1-1273)(N501Y_D614G)
aggagagggcgcuuggcuugcaaggacccugagcugcggcauugaagcacacccaacccaacucgacugaagucagccucacugaaccggaucugagaaucuucucucucugggcuugccagggcucuccgaaccuagcuagcauccucuucaauuccaacuagaaagcuuaccauguucguguuccugguccuccugccccuggugagcucccagugcgugaaccucaccacccgcacgcagcugccgcccgccuacaccaacagcuucacccggggcgucuacuaccccgacaagguguuccgcuccagcgugcugcacuccacccaggaccucuuccugcccuucuucagcaacgucacgugguuccacgccauccacguguccgggaccaacggcaccaagcgguucgacaacccggugcugcccuucaacgacggggucuacuucgcgagcaccgagaaguccaacaucauccgcggcuggaucuucgggacgacccucgacagcaagacccagucccugcugaucgugaacaacgccaccaacguggucaucaaggugugcgaguuccaguucugcaacgaccccuuccucggcguguacuaccacaagaacaacaagagcuggauggaguccgaguuccgggucuacagcuccgccaacaacugcacguucgaguacgugagccagcccuuccugauggaccuggagggcaagcaggggaacuucaagaaccuccgcgaguucguguucaagaacaucgacggcuacuucaagaucuacuccaagcacaccccgaucaaccugguccgggaccugccccagggguucagcgcccucgagccccugguggaccugcccaucggcaucaacaucacccgcuuccagacccuccuggcccugcaccgguccuaccucacgccgggggacagcagcuccggcuggaccgcgggcgccgccgccuacuacgugggguaccugcagccccgcaccuuccugcucaaguacaacgagaacggcaccaucacggacgcggucgacugcgcccuggacccccugagcgagaccaagugcacccucaaguccuucaccguggagaaggggaucuaccagacgagcaacuuccgggugcagcccaccgaguccaucguccgcuucccgaacaucaccaaccugugccccuucggcgagguguucaacgccacccgguucgccagcgucuacgccuggaaccgcaagcggaucuccaacugcguggcggacuacagcgugcuguacaacuccgccagcuucuccacguucaagugcuacggcgucagccccaccaagcucaacgaccugugcuucaccaacguguacgccgacuccuucgugauccgcggggacgagguccggcagaucgcccccggccagaccgggaagaucgccgacuacaacuacaagcugccggacgacuucacgggcugcgugaucgcguggaacagcaacaaccucgacuccaaggucgggggcaacuacaacuaccuguaccgccuguuccgcaagagcaaccucaagcccuucgagcgggacaucuccaccgagaucuaccaggccggcagcacccccugcaacgggguggagggcuucaacugcuacuucccccugcaguccuacggguuccagccgaccuacggcgugggguaccagcccuaccggguggucgugcugagcuucgagcuccugcacgcccccgccacggugugcggccccaagaaguccaccaaccuggucaagaacaagugcgugaacuucaacuucaacggccucaccgggaccggcgugcugaccgagagcaacaagaaguuccugccguuccagcaguucgggcgcgacaucgccgacacgaccgacgcgguccgcgacccccagacccuggagauccucgacaucacccccugcagcuucggcgggguguccgugaucacgccgggcaccaacaccagcaaccaggucgccgugcuguaccagggcgugaacugcaccgagguccccguggccauccacgccgaccagcugacgcccaccuggcggguguacuccaccgggagcaacgucuuccagacccgcgccggcugccucaucggggcggagcacgugaacaacuccuacgagugcgacauccccaucggcgccggcaucugcgccagcuaccagacgcagaccaacuccccgcggcgcgcccggagcguggcgucccagagcaucaucgccuacaccaugucccugggggccgagaacagcgucgccuacuccaacaacagcaucgccauccccaccaacuucacgaucuccgugaccaccgagauccugcccgugagcaugaccaagacgagcgucgacugcaccauguacaucugcggcgacuccaccgagugcagcaaccuccugcugcaguacggguccuucugcacccagcucaaccgcgcgcugacgggcaucgccguggagcaggacaagaacacccaggagguguucgcccaggucaagcagaucuacaagacgcccccgaucaaggacuucgggggcuucaacuucagccagauccugcccgaccccuccaagcccagcaagcgguccuucaucgaggaccuccuguucaacaaggugacccuggccgacgccggcuucaucaagcaguacggggacugccucggcgacaucgcggcccgcgaccugaucugcgcccagaaguucaacgggcugaccgugcucccgccccugcugaccgacgagaugaucgcccaguacaccagcgcccuccuggcgggcaccaucacguccggguggaccuucggcgccggcgccgcccugcagauccccuucgcgaugcagauggccuaccgguucaacgggaucggcgucacccagaacgugcucuacgagaaccagaagcugaucgccaaccaguucaacagcgccaucgggaagauccaggacucccugagcuccaccgccagcgcgcucggcaagcugcaggacguggucaaccagaacgcccaggcccugaacacgcucgugaagcagcuguccagcaacuucggggccaucuccagcgugcugaacgacauccucucccgccuggacaaggucgaggccgaggugcagaucgaccggcugaucaccggccgccuccagagccugcagaccuacgugacccagcagcugauccgggcggccgagauccgcgccagcgccaaccucgccgcgaccaagauguccgagugcguccugggccagagcaagcggguggacuucugcgggaagggcuaccaccugauguccuucccccagagcgccccgcacgggguggucuuccuccacgugacguacguccccgcccaggagaagaacuucaccaccgcccccgcgaucugccacgacggcaaggcccacuucccccgcgaggggguguucguguccaacggcacccacugguucgucacgcagcggaacuucuacgagccgcagaucaucaccaccgacaacaccuucgugagcggcaacugcgacguggucaucgggaucgugaacaacacgguguacgacccccugcagcccgagcuggacuccuucaaggaggagcucgacaaguacuucaagaaccacaccagccccgacgucgaccugggcgacaucuccgggaucaacgccagcguggugaacauccagaaggagaucgaccgccugaacgaggucgccaagaaccucaacgagucccugaucgaccugcaggagcucggcaaguacgagcaguacaucaaguggccgugguacaucuggcugggcuucaucgccgggcugaucgcgaucgugauggugaccaucaugcucugcugcaugaccagcugcugcuccugccugaagggcugcugcagcugcggguccugcugcaaguucgacgaggacgacagcgagcccguccugaagggcgugaagcuccacuacacgugaggacuagucccuguucccagagcccacuuuuuuuucuuuuuuugaaauaaaauagccugucuuucagaucucaaaggcucuuuucagagccaccaaaaaaaaaaaaaaaaaaaaaaaaaaaaaaaaaaaaaaaaaaaaaaaaaaaaaaaaaaaaaaaaaaaaaaaaaaaaaaaaaaaaaaaaaaaaaaaaaaaaa

SEQ ID NO: 23653 - RNA, 4185 nt, Artificial Sequence
  SARS-CoV-2/Wuhan/WIV05/2019__EPI_ISL_402128 spike protein mRNA gc (1-1273)(H69del_V70del_D614G)
aggagagggcgcuuggcuugcaaggacccugagcugcggcauugaagcacacccaacccaacucgacugaagucagccucacugaaccggaucugagaaucuucucucucugggcuugccagggcucuccgaaccuagcuagcauccucuucaauuccaacuagaaagcuuaccauguucguguuccugguccuccugccccuggugagcucccagugcgugaaccucaccacccgcacgcagcugccgcccgccuacaccaacagcuucacccggggcgucuacuaccccgacaagguguuccgcuccagcgugcugcacuccacccaggaccucuuccugcccuucuucagcaacgucacgugguuccacgccaucuccgggaccaacggcaccaagcgguucgacaacccggugcugcccuucaacgacgggguguacuucgcgagcaccgagaaguccaacaucauccgcggcuggaucuucgggacgacccucgacagcaagacccagucccugcugaucgucaacaacgccaccaacguggugaucaaggucugcgaguuccaguucugcaacgaccccuuccucggcguguacuaccacaagaacaacaagagcuggauggaguccgaguuccggguguacagcuccgccaacaacugcacguucgaguacgucagccagcccuuccugauggaccuggagggcaagcaggggaacuucaagaaccuccgcgaguucguguucaagaacaucgacggcuacuucaagaucuacuccaagcacaccccgaucaaccuggugcgggaccugccccagggguucagcgcccucgagccccuggucgaccugcccaucggcaucaacaucacccgcuuccagacccuccuggcccugcaccgguccuaccucacgccgggggacagcagcuccggcuggaccgcgggcgccgccgccuacuacgugggguaccugcagccccgcaccuuccugcucaaguacaacgagaacggcaccaucacggacgcgguggacugcgcccuggacccccugagcgagaccaagugcacccucaaguccuucaccgucgagaaggggaucuaccagacgagcaacuuccgggugcagcccaccgaguccaucgugcgcuucccgaacaucaccaaccugugccccuucggcgaggucuucaacgccacccgguucgccagcguguacgccuggaaccgcaagcggaucuccaacugcgucgcggacuacagcgugcuguacaacuccgccagcuucuccacguucaagugcuacggcgugagccccaccaagcucaacgaccugugcuucaccaacgucuacgccgacuccuucgugauccgcggggacgaggugcggcagaucgcccccggccagaccgggaagaucgccgacuacaacuacaagcugccggacgacuucacgggcugcgucaucgcguggaacagcaacaaccucgacuccaaggucgggggcaacuacaacuaccuguaccgccuguuccgcaagagcaaccucaagcccuucgagcgggacaucuccaccgagaucuaccaggccggcagcacccccugcaacgggguggagggcuucaacugcuacuucccccugcaguccuacggguuccagccgaccaacggcgugggguaccagcccuaccggguggugguccugagcuucgagcuccugcacgcccccgccacggugugcggccccaagaaguccaccaaccuggugaagaacaagugcgucaacuucaacuucaacggccucaccgggaccggcgugcugaccgagagcaacaagaaguuccugccguuccagcaguucgggcgcgacaucgccgacacgaccgacgcggugcgcgacccccagacccuggagauccucgacaucacccccugcagcuucggcggggucuccgugaucacgccgggcaccaacaccagcaaccagguggccguccuguaccagggcgugaacugcaccgaggugcccgucgccauccacgccgaccagcugacgcccaccuggcggguguacuccaccgggagcaacguguuccagacccgcgccggcugccucaucggggcggagcacgucaacaacuccuacgagugcgacauccccaucggcgccggcaucugcgccagcuaccagacgcagaccaacuccccgcggcgcgcccggagcguggcgucccagagcaucaucgccuacaccaugucccugggggccgagaacagcguggccuacuccaacaacagcaucgccauccccaccaacuucacgaucuccgucaccaccgagauccugcccgugagcaugaccaagacgagcguggacugcaccauguacaucugcggcgacuccaccgagugcagcaaccuccugcugcaguacggguccuucugcacccagcucaaccgcgcgcugacgggcaucgccgucgagcaggacaagaacacccaggagguguucgcccaggugaagcagaucuacaagacgcccccgaucaaggacuucgggggcuucaacuucagccagauccugcccgaccccuccaagcccagcaagcgguccuucaucgaggaccuccuguucaacaaggucacccuggccgacgccggcuucaucaagcaguacggggacugccucggcgacaucgcggcccgcgaccugaucugcgcccagaaguucaacgggcugaccgugcucccgccccugcugaccgacgagaugaucgcccaguacaccagcgcccuccuggcgggcaccaucacguccggguggaccuucggcgccggcgccgcccugcagauccccuucgcgaugcagauggccuaccgguucaacgggaucggcgugacccagaacguccucuacgagaaccagaagcugaucgccaaccaguucaacagcgccaucgggaagauccaggacucccugagcuccaccgccagcgcgcucggcaagcugcaggacguggugaaccagaacgcccaggcccugaacacgcucgucaagcagcuguccagcaacuucggggccaucuccagcgugcugaacgacauccucucccgccuggacaagguggaggccgagguccagaucgaccggcugaucaccggccgccuccagagccugcagaccuacgugacccagcagcugauccgggcggccgagauccgcgccagcgccaaccucgccgcgaccaagauguccgagugcgugcugggccagagcaagcgggucgacuucugcgggaagggcuaccaccugauguccuucccccagagcgccccgcacggggugguguuccuccacgucacguacgugcccgcccaggagaagaacuucaccaccgcccccgcgaucugccacgacggcaaggcccacuucccccgcgagggggucuucguguccaacggcacccacugguucgugacgcagcggaacuucuacgagccgcagaucaucaccaccgacaacaccuucgucagcggcaacugcgacguggugaucgggaucgucaacaacacgguguacgacccccugcagcccgagcuggacuccuucaaggaggagcucgacaaguacuucaagaaccacaccagccccgacguggaccugggcgacaucuccgggaucaacgccagcgucgugaacauccagaaggagaucgaccgccugaacgagguggccaagaaccucaacgagucccugaucgaccugcaggagcucggcaaguacgagcaguacaucaaguggccgugguacaucuggcugggcuucaucgccgggcugaucgcgaucgucauggugaccaucaugcucugcugcaugaccagcugcugcuccugccugaagggcugcugcagcugcggguccugcugcaaguucgacgaggacgacagcgagcccgugcugaagggcgucaagcuccacuacacgugaggacuagucccuguucccagagcccacuuuuuuuucuuuuuuugaaauaaaauagccugucuuucagaucucaaaggcucuuuucagagccaccaaaaaaaaaaaaaaaaaaaaaaaaaaaaaaaaaaaaaaaaaaaaaaaaaaaaaaaaaaaaaaaaaaaaaaaaaaaaaaaaaaaaaaaaaaaaaaaaaaaaa

SEQ ID NO: 23654 - RNA, 4191 nt, Artificial Sequence
  SARS-CoV-2/Wuhan/WIV05/2019__EPI_ISL_402128 spike protein mRNA gc (1-1273)(Y453F_D614G)
aggagagggcgcuuggcuugcaaggacccugagcugcggcauugaagcacacccaacccaacucgacugaagucagccucacugaaccggaucugagaaucuucucucucugggcuugccagggcucuccgaaccuagcuagcauccucuucaauuccaacuagaaagcuuaccauguucguguuccugguccuccugccccuggugagcucccagugcgugaaccucaccacccgcacgcagcugccgcccgccuacaccaacagcuucacccggggcgucuacuaccccgacaagguguuccgcuccagcgugcugcacuccacccaggaccucuuccugcccuucuucagcaacgucacgugguuccacgccauccacguguccgggaccaacggcaccaagcgguucgacaacccggugcugcccuucaacgacggggucuacuucgcgagcaccgagaaguccaacaucauccgcggcuggaucuucgggacgacccucgacagcaagacccagucccugcugaucgugaacaacgccaccaacguggucaucaaggugugcgaguuccaguucugcaacgaccccuuccucggcguguacuaccacaagaacaacaagagcuggauggaguccgaguuccgggucuacagcuccgccaacaacugcacguucgaguacgugagccagcccuuccugauggaccuggagggcaagcaggggaacuucaagaaccuccgcgaguucguguucaagaacaucgacggcuacuucaagaucuacuccaagcacaccccgaucaaccugguccgggaccugccccagggguucagcgcccucgagccccugguggaccugcccaucggcaucaacaucacccgcuuccagacccuccuggcccugcaccgguccuaccucacgccgggggacagcagcuccggcuggaccgcgggcgccgccgccuacuacgugggguaccugcagccccgcaccuuccugcucaaguacaacgagaacggcaccaucacggacgcggucgacugcgcccuggacccccugagcgagaccaagugcacccucaaguccuucaccguggagaaggggaucuaccagacgagcaacuuccgggugcagcccaccgaguccaucguccgcuucccgaacaucaccaaccugugccccuucggcgagguguucaacgccacccgguucgccagcgucuacgccuggaaccgcaagcggaucuccaacugcguggcggacuacagcgugcuguacaacuccgccagcuucuccacguucaagugcuacggcgucagccccaccaagcucaacgaccugugcuucaccaacguguacgccgacuccuucgugauccgcggggacgagguccggcagaucgcccccggccagaccgggaagaucgccgacuacaacuacaagcugccggacgacuucacgggcugcgugaucgcguggaacagcaacaaccucgacuccaaggucgggggcaacuacaacuaccuguuccgccuguuccgcaagagcaaccucaagcccuucgagcgggacaucuccaccgagaucuaccaggccggcagcacccccugcaacgggguggagggcuucaacugcuacuucccccugcaguccuacggguuccagccgaccaacggcgugggguaccagcccuaccggguggucgugcugagcuucgagcuccugcacgcccccgccacggugugcggccccaagaaguccaccaaccuggucaagaacaagugcgugaacuucaacuucaacggccucaccgggaccggcgugcugaccgagagcaacaagaaguuccugccguuccagcaguucgggcgcgacaucgccgacacgaccgacgcgguccgcgacccccagacccuggagauccucgacaucacccccugcagcuucggcgggguguccgugaucacgccgggcaccaacaccagcaaccaggucgccgugcuguaccagggcgugaacugcaccgagguccccguggccauccacgccgaccagcugacgcccaccuggcggguguacuccaccgggagcaacgucuuccagacccgcgccggcugccucaucggggcggagcacgugaacaacuccuacgagugcgacauccccaucggcgccggcaucugcgccagcuaccagacgcagaccaacuccccgcggcgcgcccggagcguggcgucccagagcaucaucgccuacaccaugucccugggggccgagaacagcgucgccuacuccaacaacagcaucgccauccccaccaacuucacgaucuccgugaccaccgagauccugcccgugagcaugaccaagacgagcgucgacugcaccauguacaucugcggcgacuccaccgagugcagcaaccuccugcugcaguacggguccuucugcacccagcucaaccgcgcgcugacgggcaucgccguggagcaggacaagaacacccaggagguguucgcccaggucaagcagaucuacaagacgcccccgaucaaggacuucgggggcuucaacuucagccagauccugcccgaccccuccaagcccagcaagcgguccuucaucgaggaccuccuguucaacaaggugacccuggccgacgccggcuucaucaagcaguacggggacugccucggcgacaucgcggcccgcgaccugaucugcgcccagaaguucaacgggcugaccgugcucccgccccugcugaccgacgagaugaucgcccaguacaccagcgcccuccuggcgggcaccaucacguccggguggaccuucggcgccggcgccgcccugcagauccccuucgcgaugcagauggccuaccgguucaacgggaucggcgucacccagaacgugcucuacgagaaccagaagcugaucgccaaccaguucaacagcgccaucgggaagauccaggacucccugagcuccaccgccagcgcgcucggcaagcugcaggacguggucaaccagaacgcccaggcccugaacacgcucgugaagcagcuguccagcaacuucggggccaucuccagcgugcugaacgacauccucucccgccuggacaaggucgaggccgaggugcagaucgaccggcugaucaccggccgccuccagagccugcagaccuacgugacccagcagcugauccgggcggccgagauccgcgccagcgccaaccucgccgcgaccaagauguccgagugcguccugggccagagcaagcggguggacuucugcgggaagggcuaccaccugauguccuucccccagagcgccccgcacgggguggucuuccuccacgugacguacguccccgcccaggagaagaacuucaccaccgcccccgcgaucugccacgacggcaaggcccacuucccccgcgaggggguguucguguccaacggcacccacugguucgucacgcagcggaacuucuacgagccgcagaucaucaccaccgacaacaccuucgugagcggcaacugcgacguggucaucgggaucgugaacaacacgguguacgacccccugcagcccgagcuggacuccuucaaggaggagcucgacaaguacuucaagaaccacaccagccccgacgucgaccugggcgacaucuccgggaucaacgccagcguggugaacauccagaaggagaucgaccgccugaacgaggucgccaagaaccucaacgagucccugaucgaccugcaggagcucggcaaguacgagcaguacaucaaguggccgugguacaucuggcugggcuucaucgccgggcugaucgcgaucgugauggugaccaucaugcucugcugcaugaccagcugcugcuccugccugaagggcugcugcagcugcggguccugcugcaaguucgacgaggacgacagcgagcccguccugaagggcgugaagcuccacuacacgugaggacuagucccuguucccagagcccacuuuuuuuucuuuuuuugaaauaaaauagccugucuuucagaucucaaaggcucuuuucagagccaccaaaaaaaaaaaaaaaaaaaaaaaaaaaaaaaaaaaaaaaaaaaaaaaaaaaaaaaaaaaaaaaaaaaaaaaaaaaaaaaaaaaaaaaaaaaaaaaaaaaaa

SEQ ID NO: 23655 - RNA, 4191 nt, Artificial Sequence
  SARS-CoV-2/Wuhan/WIV05/2019__EPI_ISL_402128 spike protein mRNA gc (1-1273)(D614G_I692V)
aggagagggcgcuuggcuugcaaggacccugagcugcggcauugaagcacacccaacccaacucgacugaagucagccucacugaaccggaucugagaaucuucucucucugggcuugccagggcucuccgaaccuagcuagcauccucuucaauuccaacuagaaagcuuaccauguucguguuccugguccuccugccccuggugagcucccagugcgugaaccucaccacccgcacgcagcugccgcccgccuacaccaacagcuucacccggggcgucuacuaccccgacaagguguuccgcuccagcgugcugcacuccacccaggaccucuuccugcccuucuucagcaacgucacgugguuccacgccauccacguguccgggaccaacggcaccaagcgguucgacaacccggugcugcccuucaacgacggggucuacuucgcgagcaccgagaaguccaacaucauccgcggcuggaucuucgggacgacccucgacagcaagacccagucccugcugaucgugaacaacgccaccaacguggucaucaaggugugcgaguuccaguucugcaacgaccccuuccucggcguguacuaccacaagaacaacaagagcuggauggaguccgaguuccgggucuacagcuccgccaacaacugcacguucgaguacgugagccagcccuuccugauggaccuggagggcaagcaggggaacuucaagaaccuccgcgaguucguguucaagaacaucgacggcuacuucaagaucuacuccaagcacaccccgaucaaccugguccgggaccugccccagggguucagcgcccucgagccccugguggaccugcccaucggcaucaacaucacccgcuuccagacccuccuggcccugcaccgguccuaccucacgccgggggacagcagcuccggcuggaccgcgggcgccgccgccuacuacgugggguaccugcagccccgcaccuuccugcucaaguacaacgagaacggcaccaucacggacgcggucgacugcgcccuggacccccugagcgagaccaagugcacccucaaguccuucaccguggagaaggggaucuaccagacgagcaacuuccgggugcagcccaccgaguccaucguccgcuucccgaacaucaccaaccugugccccuucggcgagguguucaacgccacccgguucgccagcgucuacgccuggaaccgcaagcggaucuccaacugcguggcggacuacagcgugcuguacaacuccgccagcuucuccacguucaagugcuacggcgucagccccaccaagcucaacgaccugugcuucaccaacguguacgccgacuccuucgugauccgcggggacgagguccggcagaucgcccccggccagaccgggaagaucgccgacuacaacuacaagcugccggacgacuucacgggcugcgugaucgcguggaacagcaacaaccucgacuccaaggucgggggcaacuacaacuaccuguaccgccuguuccgcaagagcaaccucaagcccuucgagcgggacaucuccaccgagaucuaccaggccggcagcacccccugcaacgggguggagggcuucaacugcuacuucccccugcaguccuacggguuccagccgaccaacggcgugggguaccagcccuaccggguggucgugcugagcuucgagcuccugcacgcccccgccacggugugcggccccaagaaguccaccaaccuggucaagaacaagugcgugaacuucaacuucaacggccucaccgggaccggcgugcugaccgagagcaacaagaaguuccugccguuccagcaguucgggcgcgacaucgccgacacgaccgacgcgguccgcgacccccagacccuggagauccucgacaucacccccugcagcuucggcgggguguccgugaucacgccgggcaccaacaccagcaaccaggucgccgugcuguaccagggcgugaacugcaccgagguccccguggccauccacgccgaccagcugacgcccaccuggcggguguacuccaccgggagcaacgucuuccagacccgcgccggcugccucaucggggcggagcacgugaacaacuccuacgagugcgacauccccaucggcgccggcaucugcgccagcuaccagacgcagaccaacuccccgcggcgcgcccggagcguggcgucccagagcgucaucgccuacaccaugucccugggggccgagaacagcguggccuacuccaacaacagcaucgccauccccaccaacuucacgaucuccgugaccaccgagauccugcccgucagcaugaccaagacgagcguggacugcaccauguacaucugcggcgacuccaccgagugcagcaaccuccugcugcaguacggguccuucugcacccagcucaaccgcgcgcugacgggcaucgccguggagcaggacaagaacacccaggaggucuucgcccaggugaagcagaucuacaagacgcccccgaucaaggacuucgggggcuucaacuucagccagauccugcccgaccccuccaagcccagcaagcgguccuucaucgaggaccuccuguucaacaaggugacccuggccgacgccggcuucaucaagcaguacggggacugccucggcgacaucgcggcccgcgaccugaucugcgcccagaaguucaacgggcugaccguccucccgccccugcugaccgacgagaugaucgcccaguacaccagcgcccuccuggcgggcaccaucacguccggguggaccuucggcgccggcgccgcccugcagauccccuucgcgaugcagauggccuaccgguucaacgggaucggcgugacccagaacgugcucuacgagaaccagaagcugaucgccaaccaguucaacagcgccaucgggaagauccaggacucccugagcuccaccgccagcgcgcucggcaagcugcaggacgucgugaaccagaacgcccaggcccugaacacgcucgugaagcagcuguccagcaacuucggggccaucuccagcguccugaacgacauccucucccgccuggacaagguggaggccgaggugcagaucgaccggcugaucaccggccgccuccagagccugcagaccuacgucacccagcagcugauccgggcggccgagauccgcgccagcgccaaccucgccgcgaccaagauguccgagugcgugcugggccagagcaagcggguggacuucugcgggaagggcuaccaccugauguccuucccccagagcgccccgcacggggucguguuccuccacgucacguacgugcccgcccaggagaagaacuucaccaccgcccccgcgaucugccacgacggcaaggcccacuucccccgcgaggggguguucgucuccaacggcacccacugguucgugacgcagcggaacuucuacgagccgcagaucaucaccaccgacaacaccuucgugagcggcaacugcgacgucgugaucgggaucgugaacaacacggucuacgacccccugcagcccgagcuggacuccuucaaggaggagcucgacaaguacuucaagaaccacaccagccccgacguggaccugggcgacaucuccgggaucaacgccagcguggucaacauccagaaggagaucgaccgccugaacgagguggccaagaaccucaacgagucccugaucgaccugcaggagcucggcaaguacgagcaguacaucaaguggccgugguacaucuggcugggcuucaucgccgggcugaucgcgaucgugauggucaccaucaugcucugcugcaugaccagcugcugcuccugccugaagggcugcugcagcugcggguccugcugcaaguucgacgaggacgacagcgagcccgugcugaagggcgugaagcuccacuacacgugaggacuagucccuguucccagagcccacuuuuuuuucuuuuuuugaaauaaaauagccugucuuucagaucucaaaggcucuuuucagagccaccaaaaaaaaaaaaaaaaaaaaaaaaaaaaaaaaaaaaaaaaaaaaaaaaaaaaaaaaaaaaaaaaaaaaaaaaaaaaaaaaaaaaaaaaaaaaaaaaaaaaa

SEQ ID NO: 23656 - RNA, 4191 nt, Artificial Sequence
  SARS-CoV-2/Wuhan/WIV05/2019__EPI_ISL_402128 spike protein mRNA gc (1-1273)(D614G_M1229I)
aggagagggcgcuuggcuugcaaggacccugagcugcggcauugaagcacacccaacccaacucgacugaagucagccucacugaaccggaucugagaaucuucucucucugggcuugccagggcucuccgaaccuagcuagcauccucuucaauuccaacuagaaagcuuaccauguucguguuccugguccuccugccccuggugagcucccagugcgugaaccucaccacccgcacgcagcugccgcccgccuacaccaacagcuucacccggggcgucuacuaccccgacaagguguuccgcuccagcgugcugcacuccacccaggaccucuuccugcccuucuucagcaacgucacgugguuccacgccauccacguguccgggaccaacggcaccaagcgguucgacaacccggugcugcccuucaacgacggggucuacuucgcgagcaccgagaaguccaacaucauccgcggcuggaucuucgggacgacccucgacagcaagacccagucccugcugaucgugaacaacgccaccaacguggucaucaaggugugcgaguuccaguucugcaacgaccccuuccucggcguguacuaccacaagaacaacaagagcuggauggaguccgaguuccgggucuacagcuccgccaacaacugcacguucgaguacgugagccagcccuuccugauggaccuggagggcaagcaggggaacuucaagaaccuccgcgaguucguguucaagaacaucgacggcuacuucaagaucuacuccaagcacaccccgaucaaccugguccgggaccugccccagggguucagcgcccucgagccccugguggaccugcccaucggcaucaacaucacccgcuuccagacccuccuggcccugcaccgguccuaccucacgccgggggacagcagcuccggcuggaccgcgggcgccgccgccuacuacgugggguaccugcagccccgcaccuuccugcucaaguacaacgagaacggcaccaucacggacgcggucgacugcgcccuggacccccugagcgagaccaagugcacccucaaguccuucaccguggagaaggggaucuaccagacgagcaacuuccgggugcagcccaccgaguccaucguccgcuucccgaacaucaccaaccugugccccuucggcgagguguucaacgccacccgguucgccagcgucuacgccuggaaccgcaagcggaucuccaacugcguggcggacuacagcgugcuguacaacuccgccagcuucuccacguucaagugcuacggcgucagccccaccaagcucaacgaccugugcuucaccaacguguacgccgacuccuucgugauccgcggggacgagguccggcagaucgcccccggccagaccgggaagaucgccgacuacaacuacaagcugccggacgacuucacgggcugcgugaucgcguggaacagcaacaaccucgacuccaaggucgggggcaacuacaacuaccuguaccgccuguuccgcaagagcaaccucaagcccuucgagcgggacaucuccaccgagaucuaccaggccggcagcacccccugcaacgggguggagggcuucaacugcuacuucccccugcaguccuacggguuccagccgaccaacggcgugggguaccagcccuaccggguggucgugcugagcuucgagcuccugcacgcccccgccacggugugcggccccaagaaguccaccaaccuggucaagaacaagugcgugaacuucaacuucaacggccucaccgggaccggcgugcugaccgagagcaacaagaaguuccugccguuccagcaguucgggcgcgacaucgccgacacgaccgacgcgguccgcgacccccagacccuggagauccucgacaucacccccugcagcuucggcgggguguccgugaucacgccgggcaccaacaccagcaaccaggucgccgugcuguaccagggcgugaacugcaccgagguccccguggccauccacgccgaccagcugacgcccaccuggcggguguacuccaccgggagcaacgucuuccagacccgcgccggcugccucaucggggcggagcacgugaacaacuccuacgagugcgacauccccaucggcgccggcaucugcgccagcuaccagacgcagaccaacuccccgcggcgcgcccggagcguggcgucccagagcaucaucgccuacaccaugucccugggggccgagaacagcgucgccuacuccaacaacagcaucgccauccccaccaacuucacgaucuccgugaccaccgagauccugcccgugagcaugaccaagacgagcgucgacugcaccauguacaucugcggcgacuccaccgagugcagcaaccuccugcugcaguacggguccuucugcacccagcucaaccgcgcgcugacgggcaucgccguggagcaggacaagaacacccaggagguguucgcccaggucaagcagaucuacaagacgcccccgaucaaggacuucgggggcuucaacuucagccagauccugcccgaccccuccaagcccagcaagcgguccuucaucgaggaccuccuguucaacaaggugacccuggccgacgccggcuucaucaagcaguacggggacugccucggcgacaucgcggcccgcgaccugaucugcgcccagaaguucaacgggcugaccgugcucccgccccugcugaccgacgagaugaucgcccaguacaccagcgcccuccuggcgggcaccaucacguccggguggaccuucggcgccggcgccgcccugcagauccccuucgcgaugcagauggccuaccgguucaacgggaucggcgucacccagaacgugcucuacgagaaccagaagcugaucgccaaccaguucaacagcgccaucgggaagauccaggacucccugagcuccaccgccagcgcgcucggcaagcugcaggacguggucaaccagaacgcccaggcccugaacacgcucgugaagcagcuguccagcaacuucggggccaucuccagcgugcugaacgacauccucucccgccuggacaaggucgaggccgaggugcagaucgaccggcugaucaccggccgccuccagagccugcagaccuacgugacccagcagcugauccgggcggccgagauccgcgccagcgccaaccucgccgcgaccaagauguccgagugcguccugggccagagcaagcggguggacuucugcgggaagggcuaccaccugauguccuucccccagagcgccccgcacgggguggucuuccuccacgugacguacguccccgcccaggagaagaacuucaccaccgcccccgcgaucugccacgacggcaaggcccacuucccccgcgaggggguguucguguccaacggcacccacugguucgucacgcagcggaacuucuacgagccgcagaucaucaccaccgacaacaccuucgugagcggcaacugcgacguggucaucgggaucgugaacaacacgguguacgacccccugcagcccgagcuggacuccuucaaggaggagcucgacaaguacuucaagaaccacaccagccccgacgucgaccugggcgacaucuccgggaucaacgccagcguggugaacauccagaaggagaucgaccgccugaacgaggucgccaagaaccucaacgagucccugaucgaccugcaggagcucggcaaguacgagcaguacaucaaguggccgugguacaucuggcugggcuucaucgccgggcugaucgcgaucgugaucgugaccaucaugcucugcugcaugaccagcugcugcuccugccugaagggcugcugcagcugcggguccugcugcaaguucgacgaggacgacagcgagcccguccugaagggcgugaagcuccacuacacgugaggacuagucccuguucccagagcccacuuuuuuuucuuuuuuugaaauaaaauagccugucuuucagaucucaaaggcucuuuucagagccaccaaaaaaaaaaaaaaaaaaaaaaaaaaaaaaaaaaaaaaaaaaaaaaaaaaaaaaaaaaaaaaaaaaaaaaaaaaaaaaaaaaaaaaaaaaaaaaaaaaaaa

SEQ ID NO: 23657 - RNA, 4185 nt, Artificial Sequence
  SARS-CoV-2/Wuhan/WIV05/2019__EPI_ISL_402128 spike protein mRNA gc (1-1273)(H69del_V70del_A222V_Y453F_S477N_D614G_I692V)
aggagagggcgcuuggcuugcaaggacccugagcugcggcauugaagcacacccaacccaacucgacugaagucagccucacugaaccggaucugagaaucuucucucucugggcuugccagggcucuccgaaccuagcuagcauccucuucaauuccaacuagaaagcuuaccauguucguguuccugguccuccugccccuggugagcucccagugcgugaaccucaccacccgcacgcagcugccgcccgccuacaccaacagcuucacccggggcgucuacuaccccgacaagguguuccgcuccagcgugcugcacuccacccaggaccucuuccugcccuucuucagcaacgucacgugguuccacgccaucuccgggaccaacggcaccaagcgguucgacaacccggugcugcccuucaacgacgggguguacuucgcgagcaccgagaaguccaacaucauccgcggcuggaucuucgggacgacccucgacagcaagacccagucccugcugaucgucaacaacgccaccaacguggugaucaaggucugcgaguuccaguucugcaacgaccccuuccucggcguguacuaccacaagaacaacaagagcuggauggaguccgaguuccggguguacagcuccgccaacaacugcacguucgaguacgucagccagcccuuccugauggaccuggagggcaagcaggggaacuucaagaaccuccgcgaguucguguucaagaacaucgacggcuacuucaagaucuacuccaagcacaccccgaucaaccuggugcgggaccugccccagggguucagcguccucgagccccugguggaccugcccaucggcaucaacaucacccgcuuccagacccuccuggcccugcaccgguccuaccucacgccgggggacagcagcuccggcuggaccgccggcgcggccgccuacuacgugggguaccugcagccccgcaccuuccugcucaaguacaacgagaacggcaccaucacggacgccgucgacugcgcgcuggacccccugagcgagaccaagugcacccucaaguccuucaccguggagaaggggaucuaccagacgagcaacuuccgggugcagcccaccgaguccaucguccgcuucccgaacaucaccaaccugugccccuucggcgagguguucaacgccacccgguucgccagcgucuacgccuggaaccgcaagcggaucuccaacugcguggccgacuacagcgugcuguacaacuccgcgagcuucuccacguucaagugcuacggcgucagccccaccaagcucaacgaccugugcuucaccaacguguacgccgacuccuucgugauccgcggggacgagguccggcagaucgcccccggccagaccgggaagaucgccgacuacaacuacaagcugccggacgacuucacgggcugcgugaucgccuggaacagcaacaaccucgacuccaaggucgggggcaacuacaacuaccuguuccgccuguuccgcaagagcaaccucaagcccuucgagcgggacaucuccaccgagaucuaccaggcgggcaacacccccugcaacgggguggagggcuucaacugcuacuucccccugcagagcuacggguuccagccgaccaacggcgugggguaccagcccuaccggguggucgugcuguccuucgagcuccugcacgcccccgccacggugugcggccccaagaaguccaccaaccuggucaagaacaagugcgugaacuucaacuucaacggccucaccgggaccggcgugcugaccgagagcaacaagaaguuccugccguuccagcaguucgggcgcgacaucgccgacacgaccgacgccguccgcgacccccagacccuggagauccucgacaucacccccugcagcuucggcggggugagcgugaucacgccgggcaccaacaccuccaaccaggucgcggugcuguaccagggcgugaacugcaccgagguccccguggccauccacgccgaccagcugacgcccaccuggcggguguacagcaccggguccaacgucuuccagacccgcgccggcugccucaucggggccgagcacgugaacaacagcuacgagugcgacauccccaucggcgcgggcaucugcgccuccuaccagacgcagaccaacagcccgcggcgcgcccgguccguggccagccaguccgucaucgcguacaccaugagccugggggccgagaacuccguggccuacagcaacaacuccaucgccauccccaccaacuucacgaucagcgugaccaccgagauccugcccgucuccaugaccaagacgagcguggacugcaccauguacaucugcggcgacagcaccgagugcuccaaccuccugcugcaguacgggagcuucugcacccagcucaaccgcgcccugacgggcaucgcgguggagcaggacaagaacacccaggaggucuucgcccaggugaagcagaucuacaagacgcccccgaucaaggacuucgggggcuucaacuucucccagauccugcccgaccccagcaagcccuccaagcggagcuucaucgaggaccuccuguucaacaaggugacccuggccgacgccggcuucaucaagcaguacggggacugccucggcgacaucgccgcgcgcgaccugaucugcgcccagaaguucaacgggcugaccguccucccgccccugcugaccgacgagaugaucgcccaguacaccuccgcccuccuggccggcaccaucacgagcggguggaccuucggcgcgggcgccgcccugcagauccccuucgccaugcagauggcguaccgguucaacgggaucggcgugacccagaacgugcucuacgagaaccagaagcugaucgccaaccaguucaacuccgccaucgggaagauccaggacagccuguccagcaccgccuccgcccucggcaagcugcaggacgucgugaaccagaacgcgcaggcccugaacacgcucgugaagcagcugagcuccaacuucggggccaucagcuccguccugaacgacauccucagccgccuggacaagguggaggccgaggugcagaucgaccggcugaucaccggccgccuccagucccugcagaccuacgucacccagcagcugauccgggccgcggagauccgcgccagcgccaaccucgccgccaccaagaugagcgagugcgugcugggccaguccaagcggguggacuucugcgggaagggcuaccaccugaugagcuucccccaguccgcgccgcacggggucguguuccuccacgucacguacgugcccgcccaggagaagaacuucaccaccgcccccgccaucugccacgacggcaaggcgcacuucccccgcgaggggguguucgucagcaacggcacccacugguucgugacgcagcggaacuucuacgagccgcagaucaucaccaccgacaacaccuucguguccggcaacugcgacgucgugaucgggaucgugaacaacacggucuacgacccccugcagcccgagcuggacagcuucaaggaggagcucgacaaguacuucaagaaccacaccucccccgacguggaccugggcgacaucagcgggaucaacgccuccguggucaacauccagaaggagaucgaccgccugaacgagguggccaagaaccucaacgagagccugaucgaccugcaggagcucggcaaguacgagcaguacaucaaguggccgugguacaucuggcugggcuucaucgccgggcugaucgccaucgugauggucaccaucaugcucugcugcaugaccuccugcugcagcugccugaagggcugcugcuccugcgggagcugcugcaaguucgacgaggacgacuccgagcccgugcugaagggcgugaagcuccacuacacgugaggacuagucccuguucccagagcccacuuuuuuuucuuuuuuugaaauaaaauagccugucuuucagaucucaaaggcucuuuucagagccaccaaaaaaaaaaaaaaaaaaaaaaaaaaaaaaaaaaaaaaaaaaaaaaaaaaaaaaaaaaaaaaaaaaaaaaaaaaaaaaaaaaaaaaaaaaaaaaaaaaaaa

SEQ ID NO: 23658 - RNA, 4185 nt, Artificial Sequence
  SARS-CoV-2/Wuhan/WIV05/2019__EPI_ISL_402128 spike protein mRNA gc (1-1273)(H69del_V70del_Y453F_D614G_I692V_M1229I)
aggagagggcgcuuggcuugcaaggacccugagcugcggcauugaagcacacccaacccaacucgacugaagucagccucacugaaccggaucugagaaucuucucucucugggcuugccagggcucuccgaaccuagcuagcauccucuucaauuccaacuagaaagcuuaccauguucguguuccugguccuccugccccuggugagcucccagugcgugaaccucaccacccgcacgcagcugccgcccgccuacaccaacagcuucacccggggcgucuacuaccccgacaagguguuccgcuccagcgugcugcacuccacccaggaccucuuccugcccuucuucagcaacgucacgugguuccacgccaucuccgggaccaacggcaccaagcgguucgacaacccggugcugcccuucaacgacgggguguacuucgcgagcaccgagaaguccaacaucauccgcggcuggaucuucgggacgacccucgacagcaagacccagucccugcugaucgucaacaacgccaccaacguggugaucaaggucugcgaguuccaguucugcaacgaccccuuccucggcguguacuaccacaagaacaacaagagcuggauggaguccgaguuccggguguacagcuccgccaacaacugcacguucgaguacgucagccagcccuuccugauggaccuggagggcaagcaggggaacuucaagaaccuccgcgaguucguguucaagaacaucgacggcuacuucaagaucuacuccaagcacaccccgaucaaccuggugcgggaccugccccagggguucagcgcccucgagccccuggucgaccugcccaucggcaucaacaucacccgcuuccagacccuccuggcccugcaccgguccuaccucacgccgggggacagcagcuccggcuggaccgcgggcgccgccgccuacuacgugggguaccugcagccccgcaccuuccugcucaaguacaacgagaacggcaccaucacggacgcgguggacugcgcccuggacccccugagcgagaccaagugcacccucaaguccuucaccgucgagaaggggaucuaccagacgagcaacuuccgggugcagcccaccgaguccaucgugcgcuucccgaacaucaccaaccugugccccuucggcgaggucuucaacgccacccgguucgccagcguguacgccuggaaccgcaagcggaucuccaacugcgucgcggacuacagcgugcuguacaacuccgccagcuucuccacguucaagugcuacggcgugagccccaccaagcucaacgaccugugcuucaccaacgucuacgccgacuccuucgugauccgcggggacgaggugcggcagaucgcccccggccagaccgggaagaucgccgacuacaacuacaagcugccggacgacuucacgggcugcgucaucgcguggaacagcaacaaccucgacuccaaggucgggggcaacuacaacuaccuguuccgccuguuccgcaagagcaaccucaagcccuucgagcgggacaucuccaccgagaucuaccaggccggcagcacccccugcaacgggguggagggcuucaacugcuacuucccccugcaguccuacggguuccagccgaccaacggcgugggguaccagcccuaccggguggugguccugagcuucgagcuccugcacgcccccgccacggugugcggccccaagaaguccaccaaccuggugaagaacaagugcgucaacuucaacuucaacggccucaccgggaccggcgugcugaccgagagcaacaagaaguuccugccguuccagcaguucgggcgcgacaucgccgacacgaccgacgcggugcgcgacccccagacccuggagauccucgacaucacccccugcagcuucggcggggucuccgugaucacgccgggcaccaacaccagcaaccagguggccguccuguaccagggcgugaacugcaccgaggugcccgucgccauccacgccgaccagcugacgcccaccuggcggguguacuccaccgggagcaacguguuccagacccgcgccggcugccucaucggggcggagcacgucaacaacuccuacgagugcgacauccccaucggcgccggcaucugcgccagcuaccagacgcagaccaacuccccgcggcgcgcccggagcguggcgucccagagcgugaucgccuacaccaugucccugggggccgagaacagcgucgccuacuccaacaacagcaucgccauccccaccaacuucacgaucuccgugaccaccgagauccugcccgugagcaugaccaagacgagcgucgacugcaccauguacaucugcggcgacuccaccgagugcagcaaccuccugcugcaguacggguccuucugcacccagcucaaccgcgcgcugacgggcaucgccguggagcaggacaagaacacccaggagguguucgcccaggucaagcagaucuacaagacgcccccgaucaaggacuucgggggcuucaacuucagccagauccugcccgaccccuccaagcccagcaagcgguccuucaucgaggaccuccuguucaacaaggugacccuggccgacgccggcuucaucaagcaguacggggacugccucggcgacaucgcggcccgcgaccugaucugcgcccagaaguucaacgggcugaccgugcucccgccccugcugaccgacgagaugaucgcccaguacaccagcgcccuccuggcgggcaccaucacguccggguggaccuucggcgccggcgccgcccugcagauccccuucgcgaugcagauggccuaccgguucaacgggaucggcgucacccagaacgugcucuacgagaaccagaagcugaucgccaaccaguucaacagcgccaucgggaagauccaggacucccugagcuccaccgccagcgcgcucggcaagcugcaggacguggucaaccagaacgcccaggcccugaacacgcucgugaagcagcuguccagcaacuucggggccaucuccagcgugcugaacgacauccucucccgccuggacaaggucgaggccgaggugcagaucgaccggcugaucaccggccgccuccagagccugcagaccuacgugacccagcagcugauccgggcggccgagauccgcgccagcgccaaccucgccgcgaccaagauguccgagugcguccugggccagagcaagcggguggacuucugcgggaagggcuaccaccugauguccuucccccagagcgccccgcacgggguggucuuccuccacgugacguacguccccgcccaggagaagaacuucaccaccgcccccgcgaucugccacgacggcaaggcccacuucccccgcgaggggguguucguguccaacggcacccacugguucgucacgcagcggaacuucuacgagccgcagaucaucaccaccgacaacaccuucgugagcggcaacugcgacguggucaucgggaucgugaacaacacgguguacgacccccugcagcccgagcuggacuccuucaaggaggagcucgacaaguacuucaagaaccacaccagccccgacgucgaccugggcgacaucuccgggaucaacgccagcguggugaacauccagaaggagaucgaccgccugaacgaggucgccaagaaccucaacgagucccugaucgaccugcaggagcucggcaaguacgagcaguacaucaaguggccgugguacaucuggcugggcuucaucgccgggcugaucgcgaucgugaucgugaccaucaugcucugcugcaugaccagcugcugcuccugccugaagggcugcugcagcugcggguccugcugcaaguucgacgaggacgacagcgagcccguccugaagggcgugaagcuccacuacacgugaggacuagucccuguucccagagcccacuuuuuuuucuuuuuuugaaauaaaauagccugucuuucagaucucaaaggcucuuuucagagccaccaaaaaaaaaaaaaaaaaaaaaaaaaaaaaaaaaaaaaaaaaaaaaaaaaaaaaaaaaaaaaaaaaaaaaaaaaaaaaaaaaaaaaaaaaaaaaaaaaaaaa

SEQ ID NO: 23659 - RNA, 4182 nt, Artificial Sequence
  SARS-CoV-2/Wuhan/WIV05/2019__EPI_ISL_402128 spike protein mRNA gc (1-1273)(H69del_V70del_Y144del_N501Y_A570D_D614G_P681H_T716I_S982 A_D1118H)
aggagagggcgcuuggcuugcaaggacccugagcugcggcauugaagcacacccaacccaacucgacugaagucagccucacugaaccggaucugagaaucuucucucucugggcuugccagggcucuccgaaccuagcuagcauccucuucaauuccaacuagaaagcuuaccauguucguguuccugguccuccugccccuggugagcucccagugcgugaaccucaccacccgcacgcagcugccgcccgccuacaccaacagcuucacccggggcgucuacuaccccgacaagguguuccgcuccagcgugcugcacuccacccaggaccucuuccugcccuucuucagcaacgucacgugguuccacgccaucuccgggaccaacggcaccaagcgguucgacaacccggugcugcccuucaacgacgggguguacuucgcgagcaccgagaaguccaacaucauccgcggcuggaucuucgggacgacccucgacagcaagacccagucccugcugaucgucaacaacgccaccaacguggugaucaaggucugcgaguuccaguucugcaacgaccccuuccucggcguguaccacaagaacaacaagagcuggauggaguccgaguuccggguguacagcuccgccaacaacugcacguucgaguacgucagccagcccuuccugauggaccuggagggcaagcaggggaacuucaagaaccuccgcgaguucguguucaagaacaucgacggcuacuucaagaucuacuccaagcacaccccgaucaaccuggugcgggaccugccccagggguucagcgcccucgagccccuggucgaccugcccaucggcaucaacaucacccgcuuccagacccuccuggcccugcaccgguccuaccucacgccgggggacagcagcuccggcuggaccgcgggcgccgccgccuacuacgugggguaccugcagccccgcaccuuccugcucaaguacaacgagaacggcaccaucacggacgcgguggacugcgcccuggacccccugagcgagaccaagugcacccucaaguccuucaccgucgagaaggggaucuaccagacgagcaacuuccgggugcagcccaccgaguccaucgugcgcuucccgaacaucaccaaccugugccccuucggcgaggucuucaacgccacccgguucgccagcguguacgccuggaaccgcaagcggaucuccaacugcgucgcggacuacagcgugcuguacaacuccgccagcuucuccacguucaagugcuacggcgugagccccaccaagcucaacgaccugugcuucaccaacgucuacgccgacuccuucgugauccgcggggacgaggugcggcagaucgcccccggccagaccgggaagaucgccgacuacaacuacaagcugccggacgacuucacgggcugcgucaucgcguggaacagcaacaaccucgacuccaaggucgggggcaacuacaacuaccuguaccgccuguuccgcaagagcaaccucaagcccuucgagcgggacaucuccaccgagaucuaccaggccggcagcacccccugcaacgggguggagggcuucaacugcuacuucccccugcaguccuacggguuccagccgaccuacggcgugggguaccagcccuaccggguggugguccugagcuucgagcuccugcacgcccccgccacggugugcggccccaagaaguccaccaaccuggugaagaacaagugcgucaacuucaacuucaacggccucaccgggaccggcgugcugaccgagagcaacaagaaguuccugccguuccagcaguucgggcgcgacaucgacgacacgaccgacgccgugcgcgacccccagacccuggagauccucgacaucacccccugcagcuucggcggggucuccgugaucacgccgggcaccaacaccagcaaccagguggcgguccuguaccagggcgugaacugcaccgaggugcccgucgccauccacgccgaccagcugacgcccaccuggcggguguacuccaccgggagcaacguguuccagacccgcgccggcugccucaucggggccgagcacgucaacaacuccuacgagugcgacauccccaucggcgcgggcaucugcgccagcuaccagacgcagaccaacucccaccggcgcgcccggagcguggccucccagagcaucaucgcguacaccaugucccugggggccgagaacagcguggccuacuccaacaacagcaucgccaucccgaucaacuucaccaucuccgucacgaccgagauccugcccgugagcaugaccaagaccagcguggacugcacgauguacaucugcggcgacuccaccgagugcagcaaccuccugcugcaguacggguccuucugcacccagcucaaccgcgcccugaccggcaucgcggucgagcaggacaagaacacgcaggagguguucgcccaggugaagcagaucuacaagaccccgcccaucaaggacuucgggggcuucaacuucagccagauccugcccgaccccuccaagcccagcaagcgguccuucaucgaggaccuccuguucaacaaggucacccuggccgacgccggcuucaucaagcaguacggggacugccucggcgacaucgccgcgcgcgaccugaucugcgcccagaaguucaacgggcugaccgugcugcccccgcuccugacggacgagaugaucgcccaguacaccagcgcccuccuggccggcaccaucaccuccggguggacguucggcgcgggcgccgcccugcagauccccuucgccaugcagauggcguaccgguucaacgggaucggcgugacccagaacguccucuacgagaaccagaagcugaucgccaaccaguucaacagcgccaucgggaagauccaggacucccugagcuccaccgccagcgcccucggcaagcugcaggacguggugaaccagaacgcgcaggcccugaacacccucgucaagcagcuguccagcaacuucggggccaucuccagcgugcugaacgacauccucgcccgccuggacaagguggaggccgagguccagaucgaccggcugaucacgggccgccuccagucccugcagaccuacgugacccagcagcugauccgggcggccgagauccgcgccagcgccaaccucgccgcgaccaagaugagcgagugcgugcugggccaguccaagcgggucgacuucugcgggaagggcuaccaccugaugagcuucccccaguccgcgccccacggggugguguuccuccacgucaccuacgugccggcccaggagaagaacuucacgaccgcccccgccaucugccacgacggcaaggcccacuucccccgcgagggggucuucgugagcaacggcacccacugguucgugacccagcggaacuucuacgagccccagaucaucacgacccacaacaccuucgucuccggcaacugcgacguggugaucgggaucgucaacaacaccguguacgacccgcugcagcccgagcuggacagcuucaaggaggagcucgacaaguacuucaagaaccacacgucccccgacguggaccugggcgacaucagcgggaucaacgccuccgucgugaacauccagaaggagaucgaccgccugaacgagguggccaagaaccucaacgagagccugaucgaccugcaggagcucggcaaguacgagcaguacaucaaguggcccugguacaucuggcugggcuucaucgccgggcugaucgcgaucgucauggugaccaucaugcucugcugcaugaccuccugcugcagcugccugaagggcugcugcuccugcgggagcugcugcaaguucgacgaggacgacuccgagccggugcugaagggcgucaagcuccacuacaccugaggacuagucccuguucccagagcccacuuuuuuuucuuuuuuugaaauaaaauagccugucuuucagaucucaaaggcucuuuucagagccaccaaaaaaaaaaaaaaaaaaaaaaaaaaaaaaaaaaaaaaaaaaaaaaaaaaaaaaaaaaaaaaaaaaaaaaaaaaaaaaaaaaaaaaaaaaaaaaaaaaaaa

SEQ ID NO: 23660 - RNA, 4191 nt, Artificial Sequence
  SARS-CoV-2/Wuhan/WIV05/2019__EPI_ISL_402128 spike protein mRNA gc (1-1273)(K417N_E484K_N501Y_D614G)
aggagagggcgcuuggcuugcaaggacccugagcugcggcauugaagcacacccaacccaacucgacugaagucagccucacugaaccggaucugagaaucuucucucucugggcuugccagggcucuccgaaccuagcuagcauccucuucaauuccaacuagaaagcuuaccauguucguguuccugguccuccugccccuggugagcucccagugcgugaaccucaccacccgcacgcagcugccgcccgccuacaccaacagcuucacccggggcgucuacuaccccgacaagguguuccgcuccagcgugcugcacuccacccaggaccucuuccugcccuucuucagcaacgucacgugguuccacgccauccacguguccgggaccaacggcaccaagcgguucgacaacccggugcugcccuucaacgacggggucuacuucgcgagcaccgagaaguccaacaucauccgcggcuggaucuucgggacgacccucgacagcaagacccagucccugcugaucgugaacaacgccaccaacguggucaucaaggugugcgaguuccaguucugcaacgaccccuuccucggcguguacuaccacaagaacaacaagagcuggauggaguccgaguuccgggucuacagcuccgccaacaacugcacguucgaguacgugagccagcccuuccugauggaccuggagggcaagcaggggaacuucaagaaccuccgcgaguucguguucaagaacaucgacggcuacuucaagaucuacuccaagcacaccccgaucaaccugguccgggaccugccccagggguucagcgcccucgagccccugguggaccugcccaucggcaucaacaucacccgcuuccagacccuccuggcccugcaccgguccuaccucacgccgggggacagcagcuccggcuggaccgcgggcgccgccgccuacuacgugggguaccugcagccccgcaccuuccugcucaaguacaacgagaacggcaccaucacggacgcggucgacugcgcccuggacccccugagcgagaccaagugcacccucaaguccuucaccguggagaaggggaucuaccagacgagcaacuuccgggugcagcccaccgaguccaucguccgcuucccgaacaucaccaaccugugccccuucggcgagguguucaacgccacccgguucgccagcgucuacgccuggaaccgcaagcggaucuccaacugcguggcggacuacagcgugcuguacaacuccgccagcuucuccacguucaagugcuacggcgucagccccaccaagcucaacgaccugugcuucaccaacguguacgccgacuccuucgugauccgcggggacgagguccggcagaucgcccccggccagaccgggaacaucgccgacuacaacuacaagcugccggacgacuucacgggcugcgugaucgcguggaacagcaacaaccucgacuccaaggucgggggcaacuacaacuaccuguaccgccuguuccgcaagagcaaccucaagcccuucgagcgggacaucuccaccgagaucuaccaggccggcagcacccccugcaacggggugaagggcuucaacugcuacuucccccugcaguccuacggguuccagccgaccuacggcgugggguaccagcccuaccggguggucgugcugagcuucgagcuccugcacgcccccgccacggugugcggccccaagaaguccaccaaccuggucaagaacaagugcgugaacuucaacuucaacggccucaccgggaccggcgugcugaccgagagcaacaagaaguuccugccguuccagcaguucgggcgcgacaucgccgacacgaccgacgcgguccgcgacccccagacccuggagauccucgacaucacccccugcagcuucggcgggguguccgugaucacgccgggcaccaacaccagcaaccaggucgccgugcuguaccagggcgugaacugcaccgagguccccguggccauccacgccgaccagcugacgcccaccuggcggguguacuccaccgggagcaacgucuuccagacccgcgccggcugccucaucggggcggagcacgugaacaacuccuacgagugcgacauccccaucggcgccggcaucugcgccagcuaccagacgcagaccaacuccccgcggcgcgcccggagcguggcgucccagagcaucaucgccuacaccaugucccugggggccgagaacagcgucgccuacuccaacaacagcaucgccauccccaccaacuucacgaucuccgugaccaccgagauccugcccgugagcaugaccaagacgagcgucgacugcaccauguacaucugcggcgacuccaccgagugcagcaaccuccugcugcaguacggguccuucugcacccagcucaaccgcgcgcugacgggcaucgccguggagcaggacaagaacacccaggagguguucgcccaggucaagcagaucuacaagacgcccccgaucaaggacuucgggggcuucaacuucagccagauccugcccgaccccuccaagcccagcaagcgguccuucaucgaggaccuccuguucaacaaggugacccuggccgacgccggcuucaucaagcaguacggggacugccucggcgacaucgcggcccgcgaccugaucugcgcccagaaguucaacgggcugaccgugcucccgccccugcugaccgacgagaugaucgcccaguacaccagcgcccuccuggcgggcaccaucacguccggguggaccuucggcgccggcgccgcccugcagauccccuucgcgaugcagauggccuaccgguucaacgggaucggcgucacccagaacgugcucuacgagaaccagaagcugaucgccaaccaguucaacagcgccaucgggaagauccaggacucccugagcuccaccgccagcgcgcucggcaagcugcaggacguggucaaccagaacgcccaggcccugaacacgcucgugaagcagcuguccagcaacuucggggccaucuccagcgugcugaacgacauccucucccgccuggacaaggucgaggccgaggugcagaucgaccggcugaucaccggccgccuccagagccugcagaccuacgugacccagcagcugauccgggcggccgagauccgcgccagcgccaaccucgccgcgaccaagauguccgagugcguccugggccagagcaagcggguggacuucugcgggaagggcuaccaccugauguccuucccccagagcgccccgcacgggguggucuuccuccacgugacguacguccccgcccaggagaagaacuucaccaccgcccccgcgaucugccacgacggcaaggcccacuucccccgcgaggggguguucguguccaacggcacccacugguucgucacgcagcggaacuucuacgagccgcagaucaucaccaccgacaacaccuucgugagcggcaacugcgacguggucaucgggaucgugaacaacacgguguacgacccccugcagcccgagcuggacuccuucaaggaggagcucgacaaguacuucaagaaccacaccagccccgacgucgaccugggcgacaucuccgggaucaacgccagcguggugaacauccagaaggagaucgaccgccugaacgaggucgccaagaaccucaacgagucccugaucgaccugcaggagcucggcaaguacgagcaguacaucaaguggccgugguacaucuggcugggcuucaucgccgggcugaucgcgaucgugauggugaccaucaugcucugcugcaugaccagcugcugcuccugccugaagggcugcugcagcugcggguccugcugcaaguucgacgaggacgacagcgagcccguccugaagggcgugaagcuccacuacacgugaggacuagucccuguucccagagcccacuuuuuuuucuuuuuuugaaauaaaauagccugucuuucagaucucaaaggcucuuuucagagccaccaaaaaaaaaaaaaaaaaaaaaaaaaaaaaaaaaaaaaaaaaaaaaaaaaaaaaaaaaaaaaaaaaaaaaaaaaaaaaaaaaaaaaaaaaaaaaaaaaaaaa

SEQ ID NO: 23661 - RNA, 4182 nt, Artificial Sequence
  SARS-CoV-2/Wuhan/WIV05/2019__EPI_ISL_402128 spike protein mRNA gc (1-1273)(L18F_D80A_D215G_L242del_A243del_L244del_R246I_K417N_E484 K_N501Y_D614G_A701V)
aggagagggcgcuuggcuugcaaggacccugagcugcggcauugaagcacacccaacccaacucgacugaagucagccucacugaaccggaucugagaaucuucucucucugggcuugccagggcucuccgaaccuagcuagcauccucuucaauuccaacuagaaagcuuaccauguucguguuccugguccuccugccccuggugagcucccagugcgugaacuucaccacccgcacgcagcucccgcccgccuacaccaacagcuucacccggggcgucuacuaccccgacaagguguuccgcuccagcgugcugcacuccacccaggaccuguuccuccccuucuucagcaacgucacgugguuccacgccauccacguguccgggaccaacggcaccaagcgguucgcgaacccggugcugcccuucaacgacggggucuacuucgccagcaccgagaaguccaacaucauccgcggcuggaucuucgggacgacccuggacagcaagacccagucccuccugaucgugaacaacgccaccaacguggucaucaaggugugcgaguuccaguucugcaacgaccccuuccugggcguguacuaccacaagaacaacaagagcuggauggaguccgaguuccgggucuacagcuccgccaacaacugcacguucgaguacgugagccagcccuuccucauggaccuggagggcaagcaggggaacuucaagaaccugcgcgaguucguguucaagaacaucgacggcuacuucaagaucuacuccaagcacaccccgaucaaccucguccgggggcugccccagggcuucagcgcccuggagccccucguggaccugcccaucgggaucaacaucacccgcuuccagacccugcacaucuccuaccucacgccgggcgacagcagcuccggcuggaccgcgggggccgccgccuacuacgugggcuaccugcagccccggaccuuccugcucaaguacaacgagaacgggaccaucacggacgcggucgacugcgcccuggacccccugagcgagaccaagugcacccucaaguccuucaccguggagaagggcaucuaccagacgagcaacuuccgcgugcagcccaccgaguccaucguccgguucccgaacaucaccaaccugugccccuucggcgagguguucaacgccacccgcuucgccagcgucuacgccuggaaccggaagcgcaucuccaacugcguggcggacuacagcgugcuguacaacuccgccagcuucuccacguucaagugcuacggggucagccccaccaagcucaacgaccugugcuucaccaacguguacgccgacuccuucgugauccggggcgacgagguccgccagaucgcccccgggcagaccggcaacaucgccgacuacaacuacaagcugccggacgacuucacggggugcgugaucgcguggaacagcaacaaccucgacuccaaggugggcggcaacuacaacuaccuguaccggcuguuccgcaagagcaaccucaagcccuucgagcgggacaucuccaccgagaucuaccaggccgggagcacccccugcaacggcgucaagggguucaacugcuacuucccccugcaguccuacggcuuccagccgaccuacggggugggcuaccagcccuaccgcguggucgugcugagcuucgagcuccugcacgcccccgccacggugugcggccccaagaaguccaccaaccuggucaagaacaagugcgugaacuucaacuucaacgggcucaccggcaccggggugcugaccgagagcaacaagaaguuccugccguuccagcaguucggccgggacaucgccgacacgaccgacgcgguccgcgacccccagacccucgagauccuggacaucacccccugcagcuucgggggcguguccgugaucacgccgggcaccaacaccagcaaccaggucgccgugcuguaccagggggugaacugcaccgagguccccguggccauccacgccgaccagcugacgcccaccuggcgcguguacuccaccggcagcaacgucuuccagacccgggccgggugccucaucggcgcggagcacgugaacaacuccuacgagugcgacauccccaucggcgccgggaucugcgccagcuaccagacgcagaccaacuccccgcgccgggcccgcagcguggcgucccagagcaucaucgccuacaccaugucccugggcgucgagaacagcguggccuacuccaacaacagcaucgccauccccaccaacuucacgaucuccgugaccaccgagauccugcccgucagcaugaccaagacgagcguggacugcaccauguacaucugcggggacuccaccgagugcagcaaccuccugcugcaguacggcuccuucugcacccagcucaaccgggcccugacggggaucgcgguggagcaggacaagaacacccaggaggucuucgcccaggugaagcagaucuacaagacgcccccgaucaaggacuucggcggcuucaacuucagccagauccugcccgaccccuccaagcccagcaagcgcuccuucaucgaggaccuccuguucaacaaggugacccuggccgacgccggguucaucaagcaguacggcgacugccucggggacaucgccgcgcgggaccugaucugcgcccagaaguucaacggccugaccguccucccgccccugcugaccgacgagaugaucgcccaguacaccagcgcccuccuggccgggaccaucacguccggcuggaccuucggcgcgggggccgcccugcagauccccuucgccaugcagauggcguaccgcuucaacggcaucggggugacccagaacgugcucuacgagaaccagaagcugaucgccaaccaguucaacagcgccaucggcaagauccaggacucccugagcuccaccgccagcgcccucgggaagcugcaggacgucgugaaccagaacgcgcaggcccugaacacgcucgugaagcagcuguccagcaacuucggcgccaucuccagcguccugaacgacauccucucccggcuggacaagguggaggccgaggugcagaucgaccgccugaucaccggccggcuccagagccugcagaccuacgucacccagcagcugauccgcgccgcggagauccgggccagcgccaaccucgccgccaccaagauguccgagugcgugcuggggcagagcaagcgcguggacuucugcggcaagggguaccaccugauguccuucccccagagcgcgccgcacggcgucguguuccuccacgucacguacgugcccgcccaggagaagaacuucaccaccgcccccgccaucugccacgacgggaaggcgcacuucccccgggagggcguguucgucuccaacggcacccacugguucgugacgcagcgcaacuucuacgagccgcagaucaucaccaccgacaacaccuucgugagcgggaacugcgacgucgugaucggcaucgugaacaacacggucuacgacccccugcagcccgagcuggacuccuucaaggaggagcucgacaaguacuucaagaaccacaccagccccgacguggaccugggggacaucuccggcaucaacgccagcguggucaacauccagaaggagaucgaccggcugaacgagguggccaagaaccucaacgagucccugaucgaccugcaggagcucggcaaguacgagcaguacaucaaguggccgugguacaucuggcugggguucaucgccggccugaucgccaucgugauggucaccaucaugcucugcugcaugaccagcugcugcuccugccugaaggggugcugcagcugcggcuccugcugcaaguucgacgaggacgacagcgagcccgugcugaagggggugaagcuccacuacacgugaggacuagucccuguucccagagcccacuuuuuuuucuuuuuuugaaauaaaauagccugucuuucagaucucaaaggcucuuuucagagccaccaaaaaaaaaaaaaaaaaaaaaaaaaaaaaaaaaaaaaaaaaaaaaaaaaaaaaaaaaaaaaaaaaaaaaaaaaaaaaaaaaaaaaaaaaaaaaaaaaaaaa

SEQ ID NO: 23662 - RNA, 4191 nt, Artificial Sequence
  SARS-CoV-2/Wuhan/WIV05/2019__EPI_ISL_402128 spike protein mRNA gc (1-1273)(E484K_D614G)
aggagagggcgcuuggcuugcaaggacccugagcugcggcauugaagcacacccaacccaacucgacugaagucagccucacugaaccggaucugagaaucuucucucucugggcuugccagggcucuccgaaccuagcuagcauccucuucaauuccaacuagaaagcuuaccauguucguguuccugguccuccugccccuggugagcucccagugcgugaaccucaccacccgcacgcagcugccgcccgccuacaccaacagcuucacccggggcgucuacuaccccgacaagguguuccgcuccagcgugcugcacuccacccaggaccucuuccugcccuucuucagcaacgucacgugguuccacgccauccacguguccgggaccaacggcaccaagcgguucgacaacccggugcugcccuucaacgacggggucuacuucgcgagcaccgagaaguccaacaucauccgcggcuggaucuucgggacgacccucgacagcaagacccagucccugcugaucgugaacaacgccaccaacguggucaucaaggugugcgaguuccaguucugcaacgaccccuuccucggcguguacuaccacaagaacaacaagagcuggauggaguccgaguuccgggucuacagcuccgccaacaacugcacguucgaguacgugagccagcccuuccugauggaccuggagggcaagcaggggaacuucaagaaccuccgcgaguucguguucaagaacaucgacggcuacuucaagaucuacuccaagcacaccccgaucaaccugguccgggaccugccccagggguucagcgcccucgagccccugguggaccugcccaucggcaucaacaucacccgcuuccagacccuccuggcccugcaccgguccuaccucacgccgggggacagcagcuccggcuggaccgcgggcgccgccgccuacuacgugggguaccugcagccccgcaccuuccugcucaaguacaacgagaacggcaccaucacggacgcggucgacugcgcccuggacccccugagcgagaccaagugcacccucaaguccuucaccguggagaaggggaucuaccagacgagcaacuuccgggugcagcccaccgaguccaucguccgcuucccgaacaucaccaaccugugccccuucggcgagguguucaacgccacccgguucgccagcgucuacgccuggaaccgcaagcggaucuccaacugcguggcggacuacagcgugcuguacaacuccgccagcuucuccacguucaagugcuacggcgucagccccaccaagcucaacgaccugugcuucaccaacguguacgccgacuccuucgugauccgcggggacgagguccggcagaucgcccccggccagaccgggaagaucgccgacuacaacuacaagcugccggacgacuucacgggcugcgugaucgcguggaacagcaacaaccucgacuccaaggucgggggcaacuacaacuaccuguaccgccuguuccgcaagagcaaccucaagcccuucgagcgggacaucuccaccgagaucuaccaggccggcagcacccccugcaacggggugaagggcuucaacugcuacuucccccugcaguccuacggguuccagccgaccaacggcgugggguaccagcccuaccggguggucgugcugagcuucgagcuccugcacgcccccgccacggugugcggccccaagaaguccaccaaccuggucaagaacaagugcgugaacuucaacuucaacggccucaccgggaccggcgugcugaccgagagcaacaagaaguuccugccguuccagcaguucgggcgcgacaucgccgacacgaccgacgcgguccgcgacccccagacccuggagauccucgacaucacccccugcagcuucggcgggguguccgugaucacgccgggcaccaacaccagcaaccaggucgccgugcuguaccagggcgugaacugcaccgagguccccguggccauccacgccgaccagcugacgcccaccuggcggguguacuccaccgggagcaacgucuuccagacccgcgccggcugccucaucggggcggagcacgugaacaacuccuacgagugcgacauccccaucggcgccggcaucugcgccagcuaccagacgcagaccaacuccccgcggcgcgcccggagcguggcgucccagagcaucaucgccuacaccaugucccugggggccgagaacagcgucgccuacuccaacaacagcaucgccauccccaccaacuucacgaucuccgugaccaccgagauccugcccgugagcaugaccaagacgagcgucgacugcaccauguacaucugcggcgacuccaccgagugcagcaaccuccugcugcaguacggguccuucugcacccagcucaaccgcgcgcugacgggcaucgccguggagcaggacaagaacacccaggagguguucgcccaggucaagcagaucuacaagacgcccccgaucaaggacuucgggggcuucaacuucagccagauccugcccgaccccuccaagcccagcaagcgguccuucaucgaggaccuccuguucaacaaggugacccuggccgacgccggcuucaucaagcaguacggggacugccucggcgacaucgcggcccgcgaccugaucugcgcccagaaguucaacgggcugaccgugcucccgccccugcugaccgacgagaugaucgcccaguacaccagcgcccuccuggcgggcaccaucacguccggguggaccuucggcgccggcgccgcccugcagauccccuucgcgaugcagauggccuaccgguucaacgggaucggcgucacccagaacgugcucuacgagaaccagaagcugaucgccaaccaguucaacagcgccaucgggaagauccaggacucccugagcuccaccgccagcgcgcucggcaagcugcaggacguggucaaccagaacgcccaggcccugaacacgcucgugaagcagcuguccagcaacuucggggccaucuccagcgugcugaacgacauccucucccgccuggacaaggucgaggccgaggugcagaucgaccggcugaucaccggccgccuccagagccugcagaccuacgugacccagcagcugauccgggcggccgagauccgcgccagcgccaaccucgccgcgaccaagauguccgagugcguccugggccagagcaagcggguggacuucugcgggaagggcuaccaccugauguccuucccccagagcgccccgcacgggguggucuuccuccacgugacguacguccccgcccaggagaagaacuucaccaccgcccccgcgaucugccacgacggcaaggcccacuucccccgcgaggggguguucguguccaacggcacccacugguucgucacgcagcggaacuucuacgagccgcagaucaucaccaccgacaacaccuucgugagcggcaacugcgacguggucaucgggaucgugaacaacacgguguacgacccccugcagcccgagcuggacuccuucaaggaggagcucgacaaguacuucaagaaccacaccagccccgacgucgaccugggcgacaucuccgggaucaacgccagcguggugaacauccagaaggagaucgaccgccugaacgaggucgccaagaaccucaacgagucccugaucgaccugcaggagcucggcaaguacgagcaguacaucaaguggccgugguacaucuggcugggcuucaucgccgggcugaucgcgaucgugauggugaccaucaugcucugcugcaugaccagcugcugcuccugccugaagggcugcugcagcugcggguccugcugcaaguucgacgaggacgacagcgagcccguccugaagggcgugaagcuccacuacacgugaggacuagucccuguucccagagcccacuuuuuuuucuuuuuuugaaauaaaauagccugucuuucagaucucaaaggcucuuuucagagccaccaaaaaaaaaaaaaaaaaaaaaaaaaaaaaaaaaaaaaaaaaaaaaaaaaaaaaaaaaaaaaaaaaaaaaaaaaaaaaaaaaaaaaaaaaaaaaaaaaaaaa

SEQ ID NO: 23663 - RNA, 4191 nt, Artificial Sequence
  SARS-CoV-2/Wuhan/WIV05/2019__EPI_ISL_402128 spike protein mRNA gc (1-1273)(L18F_T20N_P26S_D138Y_R190S_K417T_E484K_N501Y_D614G_H655Y _T1027I)
aggagagggcgcuuggcuugcaaggacccugagcugcggcauugaagcacacccaacccaacucgacugaagucagccucacugaaccggaucugagaaucuucucucucugggcuugccagggcucuccgaaccuagcuagcauccucuucaauuccaacuagaaagcuuaccauguucguguuccugguccuccugccccuggugagcucccagugcgugaacuucaccaaccgcacccagcucccgagcgccuacacgaacuccuucacccggggcgucuacuaccccgacaagguguuccgcagcuccgugcugcacagcacccaggaccuguuccuccccuucuucuccaacgucaccugguuccacgccauccacgugagcgggacgaacggcaccaagcgguucgacaaccccgugcugccguucaacgacggggucuacuucgcguccaccgagaaguccaacaucauccgcggcuggaucuucgggaccacgcuggacuccaagacccagagccuccugaucgugaacaacgccaccaacguggucaucaaggugugcgaguuccaguucugcaacuaccccuuccugggcguguacuaccacaagaacaacaaguccuggauggagagcgaguuccgggucuacuccagcgccaacaacugcaccuucgaguacgugucccagcccuuccucauggaccuggagggcaagcaggggaacuucaagaaccugagcgaguucguguucaagaacaucgacggcuacuucaagaucuacuccaagcacacgcccaucaaccucguccgcgaccugccgcagggguucagcgcccuggagccccucguggaccugcccaucggcaucaacaucacccgguuccagacccugcucgcccugcaccgcagcuaccugacccccggggacuccagcuccggcuggacggcgggcgccgccgccuacuacgugggguaccuccagccgcggaccuuccugcugaaguacaacgagaacggcaccaucaccgacgcggucgacugcgcccucgacccccugagcgagacgaagugcacccugaaguccuucaccguggagaaggggaucuaccagaccagcaacuuccgcgugcagcccacggaguccaucguccgguuccccaacaucaccaaccucugcccguucggcgagguguucaacgccacccgcuucgccagcgucuacgccuggaaccggaagcgcaucuccaacugcguggcggacuacagcgugcuguacaacuccgccagcuucuccaccuucaagugcuacggcgucagccccacgaagcugaacgaccucugcuucaccaacguguacgccgacuccuucgugauccgcggggacgagguccggcagaucgcccccggccagaccgggaccaucgccgacuacaacuacaagcugcccgacgacuucacgggcugcgugaucgcguggaacagcaacaaccuggacuccaaggucgggggcaacuacaacuaccucuaccggcuguuccgcaagagcaaccugaagccguucgagcgggacaucuccaccgagaucuaccaggccggcagcacccccugcaacggggugaagggcuucaacugcuacuucccccuccagagcuacggguuccagcccaccuacggcgugggguaccagccguaccgcguggucgugcuguccuucgagcugcuccacgcccccgccacggugugcggccccaagaaguccaccaaccuggucaagaacaagugcgugaacuucaacuucaacggccugaccgggaccggcgugcucaccgagagcaacaagaaguuccugcccuuccagcaguucgggcgggacaucgccgacacgaccgacgcgguccgcgacccgcagacccuggagauccuggacaucacccccugcagcuucggcgggguguccgugaucacgcccggcaccaacaccagcaaccaggucgccgugcucuaccagggcgugaacugcaccgaggucccgguggccauccacgccgaccagcugacgcccaccuggcgcguguacuccaccgggagcaacgucuuccagacccgggccggcugccugaucggggcggaguacgugaacaacuccuacgagugcgacauccccaucggcgccggcaucugcgccagcuaccagacgcagaccaacagcccccgccgggcccgcagcguggcgucccagagcaucaucgccuacaccaugucccucggggccgagaacagcgucgccuacuccaacaacagcaucgccaucccgaccaacuucacgaucagcgugaccaccgagauccugcccguguccaugaccaagacgagcgucgacugcaccauguacaucugcggcgacuccaccgagugcagcaaccugcuccugcaguacggguccuucugcacccagcugaaccgggcgcucacgggcaucgccguggagcaggacaagaacacccaggagguguucgcccaggucaagcagaucuacaagaccccgcccaucaaggacuucgggggcuucaacuucagccagauccugcccgaccccuccaagcccagcaagcgcuccuucaucgaggaccuccuguucaacaaggugacccuggccgacgccggcuucaucaagcaguacggggacugccugggcgacaucgcggcccgggaccucaucugcgcccagaaguucaacgggcugacggugcugcccccgcuccugaccgacgagaugaucgcccaguacaccagcgcccugcucgcgggcaccaucacguccggguggaccuucggcgccggcgccgcccugcagauccccuucgcgaugcagauggccuaccgcuucaacgggaucggcgucacccagaacgugcuguacgagaaccagaagcucaucgccaaccaguucaacagcgccaucgggaagauccaggacucccugagcuccaccgccagcgcgcugggcaagcuccaggacguggucaaccagaacgcccaggcccugaacacgcuggugaagcagcucuccagcaacuucggggccaucuccagcgugcugaacgacauccugagccggcucgacaaggucgaggccgaggugcagaucgaccgccugaucaccggccggcugcagucccuccagaccuacgugacccagcagcugauccgcgcggccgagauccgggccagcgccaaccuggccgcgaucaagauguccgagugcguccucggccagagcaagcgcguggacuucugcgggaagggcuaccaccugauguccuucccccagagcgcgccccacgggguggucuuccugcacgugaccuacgucccggcccaggagaagaacuucacgaccgcccccgccaucugccacgacggcaaggcccacuucccccgggaggggguguucguguccaacggcacccacugguucgucacccagcgcaacuucuacgagccccagaucaucacgaccgacaacaccuucgugagcggcaacugcgacguggucaucgggaucgugaacaacaccguguacgacccgcuccagcccgagcuggacuccuucaaggaggagcuggacaaguacuucaagaaccacacgagccccgacgucgaccucggcgacaucuccgggaucaacgccagcguggugaacauccagaaggagaucgaccggcugaacgaggucgccaagaaccugaacgagucccucaucgaccugcaggagcugggcaaguacgagcaguacaucaaguggcccugguacaucuggcucggcuucaucgccgggcugaucgcgaucgugauggugaccaucaugcugugcugcaugaccagcugcugcuccugccucaagggcugcugcagcugcggguccugcugcaaguucgacgaggacgacagcgagccgguccugaagggcgugaagcugcacuacaccugaggacuagucccuguucccagagcccacuuuuuuuucuuuuuuugaaauaaaauagccugucuuucagaucucaaaggcucuuuucagagccaccaaaaaaaaaaaaaaaaaaaaaaaaaaaaaaaaaaaaaaaaaaaaaaaaaaaaaaaaaaaaaaaaaaaaaaaaaaaaaaaaaaaaaaaaaaaaaaaaaaaaa

SEQ ID NO: 23664 - RNA, 4191 nt, Artificial Sequence
  SARS-CoV-2/Wuhan/WIV05/2019__EPI_ISL_402128 spike protein mRNA gc (1-1273)(S13I_W152C_L452R_D614G)
aggagagggcgcuuggcuugcaaggacccugagcugcggcauugaagcacacccaacccaacucgacugaagucagccucacugaaccggaucugagaaucuucucucucugggcuugccagggcucuccgaaccuagcuagcauccucuucaauuccaacuagaaagcuuaccauguucguguuccugguccuccugccccuggugagcauccagugcgugaaccucaccacccgcacgcagcugccgcccgccuacaccaacuccuucacccggggcgucuacuaccccgacaagguguuccgcagcuccgugcugcacagcacccaggaccucuuccugcccuucuucuccaacgucacgugguuccacgccauccacgugagcgggaccaacggcaccaagcgguucgacaacccggugcugcccuucaacgacggggucuacuucgcguccaccgagaaguccaacaucauccgcggcuggaucuucgggacgacccucgacagcaagacccagagccugcugaucgugaacaacgccaccaacguggucaucaaggugugcgaguuccaguucugcaacgaccccuuccucggcguguacuaccacaagaacaacaaguccugcauggagagcgaguuccgggucuacuccagcgccaacaacugcacguucgaguacgugucccagcccuuccugauggaccuggagggcaagcaggggaacuucaagaaccuccgcgaguucguguucaagaacaucgacggcuacuucaagaucuacagcaagcacaccccgaucaaccugguccgggaccugccccagggguucuccgcccucgagccccugguggaccugcccaucggcaucaacaucacccgcuuccagacccuccuggcccugcaccggagcuaccucacgccgggggacuccagcagcggcuggaccgcgggcgccgccgccuacuacgugggguaccugcagccccgcaccuuccugcucaaguacaacgagaacggcaccaucacggacgcggucgacugcgcccuggacccccuguccgagaccaagugcacccucaagagcuucaccguggagaaggggaucuaccagacguccaacuuccgggugcagcccaccgagagcaucguccgcuucccgaacaucaccaaccugugccccuucggcgagguguucaacgccacccgguucgccuccgucuacgccuggaaccgcaagcggaucagcaacugcguggcggacuacuccgugcuguacaacagcgccuccuucagcacguucaagugcuacggcgucucccccaccaagcucaacgaccugugcuucaccaacguguacgccgacagcuucgugauccgcggggacgagguccggcagaucgcccccggccagaccgggaagaucgccgacuacaacuacaagcugccggacgacuucacgggcugcgugaucgcguggaacuccaacaaccucgacagcaaggucgggggcaacuacaacuaccgcuaccggcuguuccgcaaguccaaccugaagcccuucgagcgggacaucagcaccgagaucuaccaggccggcuccacccccugcaacgggguggagggcuucaacugcuacuucccccuccagagcuacggguuccagccgaccaacggcgugggguaccagcccuaccgcguggucgugcuguccuucgagcugcuccacgcccccgccacggugugcggccccaagaaguccaccaaccuggucaagaacaagugcgugaacuucaacuucaacggccugaccgggaccggcgugcucaccgagagcaacaagaaguuccugccguuccagcaguucgggcgcgacaucgccgacacgaccgacgcgguccgggacccccagacccuggagauccuggacaucacccccugcagcuucggcggggugagcgugaucacgccgggcaccaacaccuccaaccaggucgccgugcucuaccagggcgugaacugcaccgagguccccguggccauccacgccgaccagcugacgcccaccuggcgcguguacagcaccggguccaacgucuuccagacccgggccggcugccugaucggggcggagcacgugaacaacagcuacgagugcgacauccccaucggcgccggcaucugcgccuccuaccagacgcagaccaacagcccgcgccgggcccgcuccguggcgagccaguccaucaucgccuacaccaugagccucggggccgagaacuccgucgccuacagcaacaacuccaucgccauccccaccaacuucacgaucagcgugaccaccgagauccugcccguguccaugaccaagacgagcgucgacugcaccauguacaucugcggcgacagcaccgagugcuccaaccugcuccugcaguacgggagcuucugcacccagcugaaccgggcgcucacgggcaucgccguggagcaggacaagaacacccaggagguguucgcccaggucaagcagaucuacaagacgcccccgaucaaggacuucgggggcuucaacuucucccagauccugcccgaccccagcaagcccuccaagcgcagcuucaucgaggaccuccuguucaacaaggugacccuggccgacgccggcuucaucaagcaguacggggacugccugggcgacaucgcggcccgggaccucaucugcgcccagaaguucaacgggcugaccgugcugccgccccuccugaccgacgagaugaucgcccaguacaccuccgcccugcucgcgggcaccaucacgagcggguggaccuucggcgccggcgccgcccugcagauccccuucgcgaugcagauggccuaccgcuucaacgggaucggcgucacccagaacgugcuguacgagaaccagaagcucaucgccaaccaguucaacuccgccaucgggaagauccaggacagccuguccagcaccgccuccgcgcugggcaagcuccaggacguggucaaccagaacgcccaggcccugaacacgcuggugaagcagcucagcuccaacuucggggccaucagcuccgugcugaacgacauccugagccggcucgacaaggucgaggccgaggugcagaucgaccgccugaucaccggccggcugcagucccuccagaccuacgugacccagcagcugauccgcgcggccgagauccgggccagcgccaaccuggccgcgaccaagaugagcgagugcguccucggccaguccaagcgcguggacuucugcgggaagggcuaccaccugaugagcuucccccaguccgccccgcacgggguggucuuccugcacgugacguacguccccgcccaggagaagaacuucaccaccgcccccgcgaucugccacgacggcaaggcccacuucccccgggaggggguguucgugagcaacggcacccacugguucgucacgcagcgcaacuucuacgagccgcagaucaucaccaccgacaacaccuucguguccggcaacugcgacguggucaucgggaucgugaacaacacgguguacgacccccuccagcccgagcuggacagcuucaaggaggagcuggacaaguacuucaagaaccacaccucccccgacgucgaccucggcgacaucagcgggaucaacgccuccguggugaacauccagaaggagaucgaccggcugaacgaggucgccaagaaccugaacgagagccucaucgaccugcaggagcugggcaaguacgagcaguacaucaaguggccgugguacaucuggcucggcuucaucgccgggcugaucgcgaucgugauggugaccaucaugcugugcugcaugaccuccugcugcagcugccucaagggcugcugcuccugcgggagcugcugcaaguucgacgaggacgacuccgagcccguccugaagggcgugaagcugcacuacacgugaggacuagucccuguucccagagcccacuuuuuuuucuuuuuuugaaauaaaauagccugucuuucagaucucaaaggcucuuuucagagccaccaaaaaaaaaaaaaaaaaaaaaaaaaaaaaaaaaaaaaaaaaaaaaaaaaaaaaaaaaaaaaaaaaaaaaaaaaaaaaaaaaaaaaaaaaaaaaaaaaaaaa
